United States Patent Application Publication US 2020/0377945 A1 - sequence listing, part 64

SEQ ID NO: 14423 - DNA, 205757 bp, Unknown
  gut microbiota DNA sequence
accttatatatataacagatttgggcgatggctcccgattccatatctactgccagcccttcgtggaacttttctttaatgtcgttaagttcggaacggtcggtgataaatttgtctccactgcatatcaggcctccatgaatggcggtcggagtatccagtgacatggcgcaatcaaacaatgtagcattaccttcgaatcgggcgggaagtccttgtatctgtccatacacattgccttctccacaccatacatcatgatatacaatttgtcggctcaccacaacatccattattttcaggcagctgtctatacctcctgctacaccggtgctgatgacacagtcgggctggaaggtacggatcagttctacagtaccggcagcagcgttcactttacctattccgcatttcatcaggataatggtattatttctaatgctgccttcagtatattggaaaggaccttcggtgtattctttcttgttttcgagcagttgcgttacttgtttctgctcggaactcatggctgttataattcctattttcataattcaactttatttatggctgcaaatgtacgcattttatcagagtatatcgtatctttgcaacgttaataaacagatatacttatgaacttatttaaaagaatactacctgatatagtagtgattatcctctttgctgtcatctcattcgtctattttttcccggcagtgacagaagggcgtatcctttcacaacatgactctgtggcgggcattggtgctggtgaagaagcgaaagaatatctggaacgtacgggagagcgtacgcgctggactaattcgatttttggtggtatgcctacttatcagatggcacccagttatgattctacggataccctgaagggagtggagaagttgtatcatttgtatctcccgaattatgtgtggtatgtatttgtcatgctgttgggcttttatatattattgcgtgcattcgatttctcggtctggctggcttcattgggggctgtgttgtgggcgttttcttcttattttttcatcattatagctgccggacacatctggaaatttgtaaccttggcctatattccacccactatagccggtatggtattggcttatagaggaaaatacttgtcaggcggtttgctgacagcggtttttgttgctttgcagatagtgtcgaaccatgtgcagatgagttattattttctatttgtcatgctctttatggcggttgcgtttggagtggatgcttggcagaagaaggaaatgccgcaatttctgaaagcaactggggtgttgttgatggccggtattttgggagtttgcataaatctatccaacttatatcatacgtatgagtatagtaaggaaacgatgcgtggaaagagtgagctggtgaaaccggatagtcataatcagactaaaagtggtctggaacgagattatatcactcagtggagttacggtatcggtgagactttctctttgcttgttcctaatgtgaaaggtggcgcttccgtacctttagcagctaacgaaaaggcgatggaaaaggcgaatcctatgtataatagcatctatagccagataggccagtattggggcgagcaacccggtacatccggtcctgtatacgtgggggcgtttgtaatgtttctgtttattcttggactgtttatagtgaaaggtcctatgaaatgggcgcttttgagtgctactgttttgtctgtcctgctgtcatggggaaagaattttatgggattcactgatttctttttggattatatcccgatgtacgataaattccgtgcggtttcttccattttggtcattgctgagtttaccatacctctgttggctgtccttgctttaaaggaggtaatggcacgtcctcagttggttaaggaacgggcccggtcgttttatatcagtctgggattgacaggtggtatcgctttattgtttgcattggctcccggtttctttttcccgtcgtatgtttcaagcatggaaatgcaggcattgcagggtattccggcagatcagctggctccgttacttgctaatctagaagaaatccgtcggagtgtctttacttcggatgcatggcgcagcttctttattattatgataggtacggcagttctttggttatatggcatgggcaagctgaaagcgaaggtgacgattctggcattggctgtcctctgtctggcagatatgtggagtgtgaacaaacgttatttgtatgatgaccagtttgtggaaaaggtacaacaggataattcctttaaaccgaccgaaacggataaggcaatattggccgataaaacgttggatttccgggtgctgaacctagccggcaatacgtttaatgaaaatacgacttcttattggcataagagcatcggtggatatcatgccgccaaactgcgccgctatcaggaaatgatagaggagcatatcagtaccgagatgaatggcgtgttcaaggctgtttcggaggcgggaggtgatatgcagaaggtggctccgtccggatttcctgtgttgaatatgctgaatacccgttactttatttttccgctgcaaggtggaaagaccgtcccaatacggaatcctcatacgctgggcaatgcttggtttgtaaacgaggtgcagtatgtggacaatgccaatgaagagatagacgctttgcatcggatagacccggcaaaaacggctgtcgtagataaaaaattcagtgcggaggtaaaatcggcagctgaaacagatacactgagtacaatcaaactgactgcgtacgaacctaatgacttgaaatatgaggttaattccaaaactggaggaacagtggttttctcggaaatttactatcccggttggcaggcatatattgatggtgtggaagcgccgcacggaagagcggattatattcttcgggcaatgaatgtgccggccggaaagcatgtagtggaatttaagttcgacccgaaatcgctgcatgttacggaaacggtggcttttgtggcattgggtgtattggcctgtgtgttggtcttgttcttgttcttgcaggtcagaaaggcccgtaggaaaattgattgagtcccgttattagtcagacttccggattatttgtagagcaggcgcagaacgaaccataagtggtgtgtcactgtgcttgcccatccatagtgacggctcataatacggaagcgttctttcaaggaggctttatggttacgggtggtcattccttcattcaggtaatcaataagagtaagatgggtattatggagtacatccgctttcttcatgatacggatacaccagtcaaaatctgccgagaaccgatattgcaggtcgtatggctctaccagatcacggcgggcgaaaaaggcttgatggcaaaccaacattccttgcttgaagcttttccaggtaagcgttgcgggtgcagacaggtggcgcatgtataaaaaatgcccttgactgtccactatttctgtttctccatatagcactcccggcagggctgttccattgatggaatgtaccatttgcagcaaagtatcatcttcgtgcaggccatcaccggcattcaagaaacaaagataatctccggttgccaattttattcctttgttcatggcatcgtataaaccttggtcgggctcactgataacagtggtgatatgttcctggtatttgtgaatgatatccagtgtttcatctgttgatcccccgtccacaataatatactccagattcttataagtttgtgtaacaatactttgtatagtatcctccaacacttttgctgcattgtaggtgacggtaataatagaaaacttgggatgaggatgatggttatgcatgattccctgtaatcttgttatagatttcaacatatttcttggcaatggtactttccgaataactggatactgccttacggcaggcttcctcactcagactttcatattctccttcggtcaatgcccagtgaatgccgtttgccagatccttggaagactgatattcggcaacataaccgttgtgcaggtggtcaatcatttgtggaatacctcctacattgaaccctatacacggaataccacaggccattgcttctacgatggtattgggtagattgtcttgtaaagaaggtgtgacgtataagtcgactgcattgtagatatctaccagttccttctcgttgctgacataattcatcggatagatagggaagggaaacagggaagtgtattgttcggcttggttaccaaaaaccactacacctaattctttactaaaatcaggatatgaggaagcaatttgtttgcaagctgataccagatagtctattccttttctcttgtctgtaatttttacggagccgaaaagcaataacttcttgtcttgcggaagatggcatttttctctggcctgttttttatcacgaggtttgaacaggttggtgttgattgcattgggaatattggtaatggtctgacctttaatcagatcacttttcttagccaatgattctaaccagcggctacaagctacaaaggtgatttgtgctccttcaaacagttttttctttttctggaaagtacggtaggctatgtcttttctgcttcctttgtaaagttgcggacagttgtggcattgtgtggcatatttatcgcaatctcctgcataatggcagataccggtaaaaggccacatatcatgcattgtccaaacgatgggtttgccggattggatgatacgccggatatctgtcagtgacaacataccttggttaatccagtgcagatgaatgacgtcggcctgggtaaattcgggcaatactgtgatattggtgccggtattggctatgtcaacggcaaacaagttatgtttcttgaagtggttggcttgccagataacgacacgttcccagatgaattgccatactttccaccatgatttctttagttcaacgacacttatctggtcggtctgcttgtcacgtacaagcatttttgcctttattccgttgttttttaaagcctccatgaggcggttggctgcaatggcggctccacctattcgctcagacgtattgatgataagtactctcatgtgcataaaagtttatgcaaatgtacgttttttagaggacatcttagatatttccagtaagctttctgctatttcatgggaaaagatttccaaattgaaacgtttttctgccaactttcgggcgttggcgcccatcttttgggcttcttcgggatggtcggctatgcgatgaatggcgttgatccagccttccacgtcattataggctacggtaattcctatttcttctttgtctatatccatttcaaaattgggattacgtgagcaaatgacagggatgcctaatgcaaaggcttctaccaatgtggtaaggcctacggtataaggaaaatccatacagcagatgacaacacagctttttcgtgccactttctgtgccaataagtatgggatgacaccgtccgtatagtgtacttgtacagaatcgggtagacaaaagctttcaataatctgttggtagtttacacttccattggtgggggcgatgtacaagtccagttgttgttcggtggcgcagaaagcttgcagcatagtgtttacatcccggttttctttcccggtggagataaagccttctggtttccgatctggcattacttgtagaatatggtcatagaaagcgagatccggtccccaatggataagctgaagcttttcttcgggagctttcccggtcgctaatgagtctttaatcaattttttactgaataggaacatatggtcaatgcctttataaaagaaacgtgagatatgttctcttatttttccggatgaagtttttaaggcagtgtgatgccaaatgacgatgggtttgcggtagaatcctaatgctctgagcaggataattagctccagtccacggaaagatgtaccgtagagtacttcgtatggctctttgcagcacagaatctctttagtggcatagagcatcagtcttagacggccggggaaagctttgtatttatgcattaccgaccggatgccatatttttccagcaaaggaagtccgtagagaatgtgtcccggaaacttataatctttccattcctcgtaactttcacgggttaaccgggtgtgataaaaataaatagtgagtggttttaccggtgttggtctcttttcagccatttgttaattctgttttttattgctttagtaatgatggaaaaattgccgtatcgcaggttcagaaataattcttcgaaagaacgtcctatcttaatccagggatgtccccaccccatgatgcggtagacggcttttttataagctacattctcaatgacataacggggatgcttgagaggaaattctacttcataccgtttcatggtgaagatgcggcggtatcctttgggcagtgtatgaacagaaccggcaaaatgggtggaatctgctgtgactcccaaattgttaatcatgttgcgggtaggtacgatagccagtcccgagttgaaaagcatggaagcgtggaagatggtttcataataggctttgttgttttctttatggcgatggcacatgtagataaagtctttgcggaatttccgttctttaatgagctgctccagttgttgcatattgaacttatcctctagaaaagtataatgctcgtcccattggtcgatgacccttttccaactggcccatccccaaatcgagaaggtggaggcaaagaaataatcgtatggtacatccggagtaatctcttcgttattgaaacctgcaatcatggtgatacgggtgtcttgctcgtatttgtctaacatttctttacagaatgtgaaaaaagaaacggaaggcacatcgtcatcttccaatacgatacatttgtcaaccatagaaaaagcccatttttgtgagatgtattccgatgggtcgcaaccatagttcttctcctgatacatgcgatggactttgcaatcccagtctatctgatctgtcacttcacgacatgcttttataccgggcaggtcgtgttcgccacgtggtccgtcctgatagaggaaaagcttggagggacgggcattcctgacttgttcaaacacttgtgatagttgttgcgggcggttgaagaacaaaatgagtacgggtacatctacaaggaacggtttcatggtttctttatcaattcggggtgaatataaatggcatggattttctgtttgtctttgggaggaatgtccatgtaattcttatataaatctttcaggtaagcatctgggttggcaggtgccttgaatggtttcccttcaaaaattatttctgatatgggaaatacagagtctttgcggtgcatgataccgtatccattgtttatcagaacattggaaagataagtatcttttttgtagagcagaccaagcagattccatattcctttgaacagccagtattttgtgccgaagtaaaagaattctgcgaaggcacgtagagaataataatgttgcgtatgcagaatggaatagcttttggagattcctttggttagcttctttacccatgatttgggtatgctggggtaatcaataaatgggaatatatctacaaaaagccccttttgataatccgcattaaaattatcgccgaattctacatacagagagttcaagtccctcacttttataatcggttccttgcttgaaggatcactttgtggggtttggaggaataacccttcggatagttcgtcaggagctacttctatgaatttttgcatatcggccaatggcattcctatatctatatcatcatcccaagggatgaatcctccgtggcgcacggctcccaataatgtacctccgtccagccagtaggtcaggtggtgcttttggcaaatacggtccatttcttctaatatggagagttgcttcagttggcaggctcgcaggttattggctacataggtagatagaaattcatttttcatactttatttctttttacatcaattacttgtcctgtaaattcggaaaccaatgactgtatggtggcaattgcgaccttttctgctgataatagggtgttctcaggttctgttccgaagttttttacgcgcatgggagttttggtacgttcggggttgatgcaattaacagcaatgccaaacggttcccattcttgtgcgatagcttgtacaaagtttacaatggccgctttcgtagaggaatagatgctgtagaaagctctgccgcgagtataggaactggaggtgaagaaaactaatttccctttgctttcttttaaataggcgtacgcctccatcgctacgttgatagttcccatatagttggtgctcaccgcattgtatatcgtttgatagtccgaactcatcaaaggctctttgttgaggacgccagccgtgttgatgatatagtctattctgtgggtttgtaagaatactttttttagagcatcggccacttgttcctttttgcctacatccacaccgttcatgcttcgggaaaaacagaatacttttgcttgtttctcctgtagcatacgggctgtatgttctcctattccatagcttccaccgaagatgacggctactttgtctttcagttggctttcattcaatggaatttcattcagctcacttttacgtaactggaagaatttgtccaataggtaggtatcttctttataggtcagcttcatgttgctttcctcgcctgtaactacatatacaggtacatcgggtaaatattttacaacaaccccacagtcatcggtaactttgaaatgttcgtctttcaaggcgatttcataagcgtggctgatggtttccaaatgaaaagcttgtggagtctgcccccgttttagtttggaccggtcgggaatctgatgaatgaaatctccatctacttcgataatggtgtcagtggcaggcatggcgacatcaatagctgcatatgtttccaatgctttgatgacatcatttagaatacgttggctgaccaatggacgtacagcatcatggaaaatcaggttgacatcgctgccttcgtaagctttgatagccgaaaggctggaatgaaatctttcctgaccgcctttcagaatcttcttcacttttttccatccattcttgataatgatggactcaaagtcagcaatataaaaaggattggaaacaatggcaatttcatcgatgtgcggattgctttcgaaagcatctattgtatgctcgactaccattttgcccgctactttaaaaaattgcttgggagtggacagacctaagcggctgcctatacctcctgctaatacgattgcgatattttttctcatttcttttgtttatcgggggactatgcaaaagtagtaattaattagcatttataagcgatgttgtttatatttgccttaaaatttaatgagaatgggtaaaattacatttgtaccggtaggaggactggctaaccgtatgcgtgcggtggcttcggccgtgacactggcagcgaagagtgatagtgatttaagtatcgtttggtttcaggattgggcgctaaatgcaccgtttagccaattgttcaaacctgtggacaggaagattgcctgtttgcgggatgcttcgcagttggattatgcattgttggacagacctcgttccaggaattttcatttcccgcttttgtttcagaaactgtttttcaagtcttgcctgtacgagcgttctattactcctttatgtaatcggcattttgattttgaacggtgggttaaagaaggtagctgtgtttatatggcatcatataccgcttttcaaccttatgattatgtatggatcagtcggttatttgttccggtagaagaggttatggaagaggtggaaaaccgttgtcggaatttttcggataccatgattggtatgcatatccgtcgtacagataatctggcttctatccggcaaagccctatcgagttattctatcagaaactggatgaggagataaaagaggacgataaggtggctatctatttggctacagattcggaagaggtgaagcgggagatgaaagagcgttatggtgaccggatattctgttccggaaaaaaggcagaccgtggatctttggagggaataagggagggtatcacggatatgtacacattggcccgtacacaaaaaatatatggttcttttcagagttcattttcggatatggcagctcagataggagggactccattggagattttgaaattatgagttgcggaaataaataattgttttaatgattatctgtaaacattttaatttttgctcctcttctttccattgcatctgctaatttgttttctatttttcctaatagcagccgtctgctccattctataacaagtgttgtcagacagatagaaacaagtgttcccataaaatacagaacaagtagattgctgtttgcataaggggtataccagggttgtaaacagtggataagaagtccttgaagcatatataaggcaaaaacgtatcctgctaggtaattgatgatgcgggatgaaaaatgccatcgggtgaactggtagaaaaccatgatagaggcgatgataatcagtagattattatctcgggcgaatctcagtatgatatttccactcattgctgtaagcagggaattcagtataaaaataccggcaaggctccctgataaaatatcccagctatgtcgtttcatgtttttcggaagaccatagaccttcagatattgtcctatgagataagctagtgtgacattgataattcccttacctgtgtcattttgaatttcaaaaaacaggattgtcggggcaaatataaaaaagaatccccatagtaacagtagttgttcataacttttttgtgagaggttttgaaccagtcggtttaaatagggtgagaaacaataaagcactacatagcaggtcataaaccagtattttttgctaagtatcggtatcaatgaggaggctagtcctgtccaggtatgcggagtgtgaagccatattgtttcgatcagataagaaacgatggaataaaaccatacgacaaccagcatcttgaaaaatttatgtgtattgaaacggattccgaaatagcctgagatcagaatgaataaagttactcctgtgtttcccaatgtattgacaaatagtatgaattctttgttcagcaaattactggtgtggaaggtattccctagaatatgcatggatacaatcagtatgatactgataattcgtaaacattctaatccggagtgacgtgtagcagccattatttcttgattatatagtgtaaactctctttaaaagtgacagagccgctcaaccacaggatggctgtgtagagtgtgccggctatgataatcttgcttgccattaataaatacagattggcaaagccgatagtgacataataggtagctgccattaccgcagtagctatgaaggcaaacggaaggatgtctttcagtgctgcgaacaagttgagccgtatttgttgccatacaaaatagtgccatacaaacagccagcagatattgatggatacatacactataatcatggtatgtacaccgtatggataaagcaggagcatggttgttaactggataatgcctaaactgatggtattccacatgtagatatccgattttcctttgctgataactaggttggaatacaaattggttatggggatgaatgcgccaccgatgcagagcaactgtaggatggaggcactgggcaaccatttgtccgtaatagtcagcataatcagttcgggtgcgattaatgataatcctaacatagccgggaaagaaataaaggcagtgaagcggagcatcttccggaaagcgcgttgttggcgttccctttcatccgataaactggaaagtacaggttgggccacactgttgactgttcctgaaattaatgaatgtcccatataattccatttattagcttgagtaaaatagcctacttcttgtcccgaatagaatttaccaagaataacggtaaagatattattattgatgtggttgaatatattggttactactaatttgctgctgaaagaaagcatcccttttaaaggcttgaaatcgaaagtaagtgtaggtcgccagggtgagaagcaccaataacagatattaatagttcctacataaacaatgctttgtgtggctatgccccaataggcaaatcccaagcaggccatagttataccgatagttcctgaggcagttaatccgatagtgaccgccattgccttttgcttgaccattaagttgcggaacaggtaagcactgtgggcaatacccaaactggctacaaagaaaccgaggaaagtgtatcgtgccaaagctgtcagttcgggagtatgatagaattcggcaatgagtggggcgcaaaggaacaaaatgaggtagagacaggcacttagtccggtactgaaccagaatacggcattatagtctttgtgggagatctcccgtttgttagctagggctgccgtgaacccactttcctgtaaggaacctgcaataagagagaagatggatagcattcccaccatgccataatcttcggcattcagaatgcgtgataggaatatcccgaaaaaaagattcagcagctgctgtactccgttgcttagtccaccccagaagaggccttttgctgttttttctttcaaggattgttctgccatttttatagatagattataaaatagtcaggctgaaagcagacgtttcagttgctttcagccttttctgtatttgggtgtatattatttcacttcactgcccggctttacctctcttaataatgaggtcactgctaaggtgccgtcaaagttttcagcacttagaatcatgccttcgctcaccagtccattcttgaattggcgcggagcaaggttggcaatgaataaaacttgtttgcctatcagttcttccggtttataatgttgcgcgataccgctgacgatggtacggttctccagtccgtcagcaatcttgaatttcagcagttttttcattttaggcactacttcacattctaatacggtacctacacggatatctaacttttcaaattcttcgaaagcaattatcggttttatcgggttagctttatagctggcagcctcgtttgcttttttggtagccaacagtttgtctacttgtgcttgaatggtttcatcttcgatcttttcgaacaacagttctgctttattcaattgatgcccttctgccagcagatcggtacgtcccagttggtcccattcaaatgtttccatattcagcatttggcggagcttttcgctgctgaaaggcaggaagggttcgaaagcaattgccagattggcaactagttgcaatgctatgttaagaatggtggctacacggtccatatcagtctttgccagtttccagggttctgtatcagctaagtatttattaccgatacgtgccaggttcattgcctctttttgtgcatcgcggaatttgaatacatccaatagtttttctacttctgcctttacgtctgcaaattcttttaatgtttctttatcgtaatcggtcaattcaccgcaaactggaactttcccatcgaaatatttatgagtcagcactaaagcacggtttacaaagttaccataaacagctaccaactcattgttgttacgtgcttgaaaatctttccaggtaaaatcgttgtcttttgtctcgggggcattggctgtcaatacatagcgcaatacatcctgtttgccggggaagtcctgcaaatattcatgcaaccatactgcccagttgcgtgaagtggaaatcttgtcaccttccaggttcaggaattcattgctaggtacgttatccggtaagatatagcttccttctgctttcagcatagcagggaaaacaatgcagtggaatacaatattgtcttttccgatgaagtgaatcaaacgggtttctggatctttccaccaagtttcccaactgtcgggaagtaattcttttgtatttgaaatatagccgatgggggcatcaaaccatacgtaaagtacttttccttcagcaccttctacaggaacagggattccccaatccaagtcacggcttaccgcacgaggttgcaagcccatatccaaccagcttttacattgtccgtatacattagggcgccattctttatgattctcaagaatccattcacgcagccatccttcgtgtttgtccaatggcagataccagtgtttagtttcacgcatcacaggttggctgccactgatagcacttttcggattgatcaggtcggttggagaaagagatgttccgcacttctcgcattggtcaccgtaggctccttctgcatggcagtgaggacattcaccgataatataacggtcggccaggaactgatgggcttcttcgtcataatattgcatggaggtcttttcaatgaactcacttttatcatacagggttttgaagaattcggaagctagttcgtggtgtgtttttgatgtagtacgagagtatatatcgaatgaaattccaaattctttgaatgattcttttatcaaggtatgatagcggtccaccacatcttgcggagtaataccttctttctttgcacgaatggtgataggtactccgtgttcgtcagagcctccgatgaaaagaacatcttctttcttcaggcggagatagcgcacgtagatatcagcaggaacatatacacctgccagatgaccaatatgtaccggaccgtttgcgtaaggcaaagcggatgtgacggtggttcttttgaatttattttccattgtatgatgtctttttttgttatttctaccagtaacgtgcaaagttagtgatttttagtaagtatatggaataatcagaaatatttctcctttaaaatttctgacagaccatacttattataagatattgttattcgggggctttgccggaagctgggaaattgcaaaaaatgttatattgtgatgcagtgatttgcacttctttgcatttaatataaaaaaggaaaaacacatgaatataaatgcccctttgtctattcgtcgtcggatgggtcttgaaatattccggcggttggaaaatgagcgtacggaagagcatcagttgaagcaactattttgggaatgtactcttcgttgtaatttgcattgtcgacattgtggcagtgattgtaaaaagatcgctggtcatcctgatatgccgaaggaagattttcttcgggtgttggatagtgtctcagctcaaaatgatccgcataaaatctttgtgattattactggtggggaacccttgatgaggaaggatctggaagagtgtgggcgtgctatttatgaaagagggtttccttggggaatggtaactaatggactatatatgactcgtgaacgattgaatgggctgttggatgccggattgcatacggctacggtcagtcttgacggttttgcgacggatcataactggatgcggggcaacccgcaaagttttgaacgggctgttgaagcgatcaagttgatggtacaggttcctgattttgtttttgatgtggttacttgtgtaaataagcatagttatatgcgtttggaggagttgaaagacttcttgataagtttgggggtaaaaggttggcggctttttactatattcccggtagggcgtgcagccaaagatcctgaacttcaattgtctaatgaggagttcagaggagtaatggaatttattaggaagagccgtaaggaaggacggatccatgtaagttacggttgtgagggatttctaggtaattatgaggctgaagtgcgcgatactttcttcgcttgccgggcgggaatatcggtcggctcagttcttattgatggagcgatttctgcttgtcccagtattcgtgccgattatcaccagggaaatatttatgagaatgattttatggaagtatggaatcatagattcaaaccttaccgtgaccgagaatggatgaaaaaagatgaatgtgctgattgtaaatattttcgtttctgtaaagggaatggcatgcacctgcgcgatgaaaatggagatttattgttctgtcatttaaaaagattgcaaacaccataaaaaagaaaggaatgaagaagatgaaacagaagaaagtattggagcagagcttatgcggtgtgctggctttattgggttttgctgcttgtgctgaaacctcagtggaatatggaactcctactatggatttctgggtaagaggtaaggtgatatctgatgacggaaaggctttgaaagacattcaggtaattgtaaaaaatgagaatgcatattataatgatgaagaaggggagttggtccggatgaatgatactatttatacagattctggaggtgagtttgtttcacagatgatgagagacggatgggtcgatacgaagaaattgatatttaatgatatagatggtgaggcaaatggaggaacttttaaatcggattctgtctgtatgaaggatatggaaagtaaacaaataaagaaaggagacggaaactggtatttaggtacttatgaatacaacatggaaataaaactttctaaagaagataaataacataaaaactgactttaaactattagggattatgaacatgaaaaagaaaatgacagtacatcggttattgtccggagcgttggttttacttggattcgcttcttgcagtaatgaagatgagaattgggagatacgatgtgaatatggtactccttatagcaaattcttagtgaaaggtacagtgacttcggataaggatgagcctttgaaaaacattcaggtaatcgtaaggcaagattggaataatggcgttttccctgccgatacaatttatacagatgaaaaaggagaattcaagaccgaagacttgagtataggtggaattaatgaacagaaagtctattttaatgatatagacggcgaagaaaatggtggtgcatttaaatcagattctgttttaatcaaagatatgaatcaaaagaagttggaagagggtggacattggtatgtaggaaaatttgagttctctcctaaaggttcgataaagctatcgaaaaaagagaaaaatagggaagattaatgaactaaacttttcttattctgtttttgatgaaaaccttagattgaaagaatcatgaatgcgtggtataaattcattttgaatgtacttttctctaaaaagagtgagaataaagattgggaaatgaccgatgaagaagaggatatacttgcaaattacattgaactggattcattgatgcaggtcatttatcatgcaaaggaaactgagcccggcagctaaactagccggcccagtcttctctatcaagatttctatagcttatcgcttctgccaggtggatggaagtaatgtgttcgctgttgtccagatcggcaatggtacgtgctacttttagaatacgaccatatgcgcgtgccgacaggttgaggcgtgtcatggcagtttgtaataattttagccctgcttcattgggttgagcatacagatggagtaatccggcttccatttgtgcgttgcagtaaatacccggatggttagcaaaacgttgagcttgtattttccgggccttgataacccgtttgcgtatgcttgcactactttctgcatgatgttgttctgccattttctcgaatggaaccggaactatttctatttggatatctatgcggtccagtaaaggaccggagatacggttcaggtaccgttgcacttgtccaggattacagacgcaagctcgtgtgggatgattataatatccgcatggacagggattcatgctggctaccagcatgaaactggccggataatctagactgtatttagctcgtgagatggatatatacctgtcctctaggggttggcgaagtacttcaagtacacttctattaaattccggcaactcgtctagaaagagcaaaccgttgtgggccagactgatttctcccggttggggattggtgccgccacctaccattgctacttgcgagattgtatgatggggactacggaaaggccgaatagcaatcagtgagctgtcttttcctaattttcctgctattgaatgtattttagtcgtttccagactttcacccaatgacaggggagggagaatgcttggcatacactttgccatcatggactttccacttccgggtgaaccgatcataatcaagttgtgtcctccagacgcggctacttccaatgcgcgttttacactttcttgtccttttacatcagcaaaatcgtatggaaagctactttggttttcatagaattcttcccgtgtattgacgatgctaggctccagattgcgttcattattgaaaaattcgatgacctctttgatattttctacgccatatactttcagattgtttactacagcagcttctcgcgcattttgtttgggaagtatgaatccttcaaaaccttgttctcgggcactgatagctatggagagagctcctttgacgggttgcaggcttccatctaggctaagttctccgataataagatagcgtgaaagtttttcttccgatacgatttgggtagcggccaatattccgattgctagcggaagatcgtatgcagacccctctttacgtatgtcagcaggggccatattcactacaatctgacaagtagggaatttatatccgtttacctgtaaagcggaaataatacgttcatgactttctttcacggccgagtccggcagaccgacaaggaagaattttatacctcgtgaactatttacttcaatagttacaatggtagcgtcgataccttgaacggctgctccatagacttttaccagcattcttttattttttattttgtctctttcgagtacgttctgcctctttggcggctttttctttctctttatcttgttctatcagctgtttcactttgtctatcagttctttgccgcgtatatcttgcgtgatgacccgcttgtcaggacctataagtatattggcaggaatccgggttatgccttgctgtttgacaatggaattgtcccagcctttgaaatcgcaaacttgtttccattgtgtggtgtctctttgaatgattttctccatccattcctttttgtccaagtcaagggagaggctgataataacaaacttattttttttcaatgccttttgtacgggtactaaagaatcttgtgtggcaatgctttctttgttccagcttgcccaaaaatccaaaaggacatatttcccttttacgctgttccagttgatggtctttccttctctgtccgtgcacgagatgttggaaacgtagcgatgatctgtcagttcttttttctcacttaatttattctggagatctataatataaggtgtgtcttttatgataccgcttaatccttttatcagttgatctatgtggttatagtcaggaagcgagtcctgtacataatatttgtctatcagatagatattgctatacgagtgtggattggttttaattaatgaatccacagcagccataacggcagttttgttattttctaatgtgttaaggtactggatatgttttgccagttgtgcgttttctccctttcctttaacctctatctctccgaccattccgtttagggtgacactttctcctttatcagcatatatcggcaagatttgtttttctcctaatagtaatgaaaagatagtaaatgtgtcaggggtaatagtgtaagtgaatttgccttttgagaggagtatggtatctagcttgtaatcgggctcttgataaaatactaatatagtgtctgaagggagtcctttaatgcttccttctaaggtgaatgtatttttcttgccgcagccgcttgccagcacaacaagagtgaaaagaaagaatagtaattttttcatttcaagatattttttgcgaaaatacgcattttgtggctaaaggcaggtataaatgaaggttattttacataaaaaagccggaagcttcatcacgaagcctccggttacagtaataatcatctaaaaactagacaagatgatatctagttatattatttgatagcgtcggcgtatttagcgaactcgcgatcgttagcagctttttcagccattgaaggatcttttgcgattgcgctcttgatgctgctgcttaccaatgaagcattgtttgtgcgagcaccaacgatagccatcaagtagtcagtcattgcatccggattcttgattgcagacaaggtcgcttttgctttgttatagtctttagccaaaatctgagcttgagcggcactgttagtcttagcgtcaccgaatgagttgacagctctgtcatactggccttgtttgatatacaagttacccaaagcttcaccggcagcattagcacctgtagctttgcctaagtaagtttcagcagctgcaacattgcccttaaccaattcgcaaagaccaaggttagcgtttacttcaggagcgctagcgttcttagaagcagcttgtttgaagtagttttctgctttagcagcatcaccggcagcgaatgccaattcacccaggttgttataagcacggaaatcgttcggataaagttgagttgtcttgttgaagatagcttctttgcgggcgttgtcgttagtcagtgtagcagcgtacaataattcttctacactcaatactttaggatcagagttgaatgcttcgttgatttcatcatcgctacgaccgatgatgtcatagttggcagttaaacgggcacgacgtaactgaggcaggatttcgtcagccaaagttttgtatacagaagaaatattcttgatttcagcttctctttgttcaggatcattgtacatagaaagaacacgcaagatcaaatctttatcctgcaagtttgatttggataccagttcttggaaaccttcccaatcttgtgcagtgtattttgcatccaggttagtatcaatcttgcctttcttcaactggcgttccatatatttttctgtgtttgcttcacggttttcagccaaaccggtgttcagtttcacaccaccatcaggtgaagcgtatgcagaaatttcaatgttattcagtttgtagttcttggtgtcagcattaacttcagccactttcttatggaattctttgatatcgtcagaattcaattcgctgttgcgcaagttagcttgctggatcaagaacatgatgttagcagtttgagcatctttaatgatgcgttggaaagcatcgttagcgtatgatgcgttagagctggcagcagtaggcagttcagaagtcgcgataacgccatcagcgattttcacagaaggaatagtgtatgatttctttccttttgtaatcttgaaatcaagataaagttcagagtttgccatttcgggaacatagtcgaaagaagctttcatcgtatagctaccacctgctttgtaagcgatagtctgattgtttccttctactttttctccttggaatacagcaggctggcctttagcttcgccacctttccatctcagaacaggggtaacttcaacagttgcgttcttcttgaaatacttctcggggaatttaccattaattgtcacaggcactttaccaccgattgcttcaagcacttcagggttagttgtgaaatagtcagaagacaattctcccatcttgccgcatgatgacagggcaaggaccaataaagccactaagggcaaatacaactttttaatcatagttactttattaatttaacgtttgtaatgtaaaattcgctatagtacgtttttgtgcgtctctttggggacaaagataggaaaaactctattatgtgctagcttcttagcctgcttttttttcaatttatcttaaaatattttagaatatagaacctttatttacctttttctctgaatttgatgttacgggggtggtgttctatgatttcactgcgtaacatattgcggtctatgtgtgtataaatttctgtggtcccgatactttcgtgtccaagcatacactgtatggcacgcaagttggcgcctccttccagcaagtgtgtcgcaaaagaatggcggaaggtatgaggactgattttttttttcaaaccgatgcgctctgccagttccttgatgatatggaaaaccatgatgcgggagatgttcttcccgaaattgctgatgaagacaaaatcttcaaatcccggctttattttcatcaggttacggtcggtgaagtagagcctgatttccttgatggcacgcggtgaaatagggaccagccgctgtttgcttcctttcccttccaccttgatgaagccttcttcaaaataaagttcggataatttcagattacagagttcggaaacacgtagtccgcaactgtaaagtgtttccaatatggctctgttgcgttgaccttctttggttccgcggtctatgctgcctatcaataagtctatttcttccaccgtcattacttcgggcagtttgaaacctgtctggggggattccagtaattctgttgggtcggattccagataatcttccataatgaggaaacggtagaaagagcggatgcctgacaagatgcgtgcctgcgaacgggggtggatgccgatatcatgtaatccggctgagaaatcttccagattttcaagccggacatccagaatgttgatattttctaatgtaagataagccagtaacttgtccaggtcagtaagataagcatctaccgtattgtcagataacgatttctccaactttaaatattgcttgtatttcaccaatatcttgtctgttttctcggttcttttcatttcttttttctacctttgtacccaaattccctgcaaaggtagaaaaagttcagatatagtataaatatgaaaatacaaattattaatggacctaatatcaatttattaggcaaacgggaaccttccatttatggtgctgtttcatttgaagactatctggtggaattgcgccgtacttatccggacattgaaatagcgtattatcagtcgaatgtggaaggtgagatgatcaataaaatacacgaagtgggttttgattatgacggcatcgtcttgaatgcaggggcttatacgcatacttccattgctttacaggatgctatccgcgccgtgacagctcctgtgattgaggtgcacatctcaaatgtacatacccgtgaggagtttcgccataagtcgatgatttcttgcgcttgtgtgggagtaatttgtgggttcgggcttcattcatatcgtttggcgattgaggctttgttgatgagaaaataaaaagtttaggtataatataaggtgataagattatgatgttgaaacaaacaaaaatcgtagcgtccatctcagatcagcgttgcgaggtagagtttataagagatcttttcaaggctggtatgaatgtggtccgtatgaatacggctcacgcttcacgtgaaggttttgaaaaattgataaccaatgtacgtgaggtttccaaccgtattgccatattgatggacacaaaaggtcccgaagtgcgtactactgctattgcaggcggcgagcctattccttatcagattggtgacaaagtaaagattgtaggcaatccagcacaagaaacgacccgtgaatgtattgctgtatcttatcccggttttgtgcatgatcttcaggtggatggcgatattctgattgatgatggtgatctggagctgcgcgtgattgagaagacagacgagtatttgttgtgcgaggtgcagaatgaagctactttgggtaaccgtaagagtgtgaatgtaccgggcgtgcgcatcaatctcccttctttgacagaaaaggaccgtaacaatatactgtatgctattgaaaaggacattgatttcatagcacattcgtttgttcgtaataagcaagatgtgctggatatccgccagatactggatgcatacggcagcgacattaagattatcgccaagatcgagaatcaggaaggagtggacaatattgatgaaatattggaagtggccgacggagtcatggtggctcgtggtgacttgggcattgaagttcctcaggaacgaatccccggcattcaacgtttgttgataaagaaatgtattctggcaaagaaaccggtgattgttgctacccagatgttgcataccatgattaataatccgcgtcctacccgtgctgaagtgaccgatattgccaatgctatttactaccgcacggatgcattgatgctgagtggagaaacggcatacggcaagtatccggtggaagccgtgaagacgatggccaagattgcagcgcaggctgagaaagataaactggccgagaatgacatccgtattcctttggatgaaaactccaatgacgtaactgctttcctggcaaaacaggcagtaaaggctaccagcaaactgaatatccgcgccattattaccgacagtttcagcgggcgtaccgcacgtaatattgctgctttccgtggcaaatatcctgtattggccatctgttataaagaaaaaacgatgcgtcatctggctttgtcatatggggtggaggctatctatatgcccgaaaaggctaacggacaggcatattatttcgctgctttgcgtaaattgctggatgatggcgttttgagtgaaagcgacatggtggcctatctgagcagcggtaagcaaggtactcagacttctttccttgaaatcaatgtagtgggagatgtgttgaagtatgctatggactatgtgctgcccaaccgcaaccgttacctataaaaatagaagataggaatgaaagaaacggacgctattgacgaatatatccttcagcacattgacgaagaaagtgattacctgaaggcactttatcgcgatacgcacgtcaagcttttacgtccccgtatggcttccggccacttgcagggacgtatgctgaaaatgtttgtgcaaatgatacgcccccgtcaggtgttggaaatcgggacttacagtggctactccgcactttgcctggccgaagggttggaagagggggccatgttgcacacatttgagataaacgatgagcaggaggactttacacgtccctggctggaaggttcgccttacgccggcaagattaaattttatataggtgatgcgctgaagttgctgcctgtcatgaacattacctttgatttagcgtttgtagacggtgataagcggaagtatattgaatattacgaaatggtactggagaaattatcacccggcggatatatcattgccgacaacacattgtgggacggacatgtcttggaggaaccgcatcatacagatcttcagactattggaataaagaaatttaatgatttggtagctgccgacaaacgggttgaaaaggtgattcttcccttgcgcgacgggctgacaatcataagaaaatgttgaataatgtgctcatagcttgcgctatgaaccgtatggcatattagcaaattagcaaactgaataattattaattatggaaacgaccagacaaaataagatttctcgtttgatccaaaaggagttgagtgagattttcctgcttcagaccaagtccatgaatggtgttttggtgtcggtaagtgctgtccgcatcagtcccgatatgagtattgcacgcgtctatctcagcgtgttcccttctgagaggagccaggaaatagtaaagaatatcaatgataatatgaaatccatccgttatgaattaggaacacgggtacgccatcagttgcgcatcattcccgagttgaaattctttgtggatgattcattggattatgccgaacgtatagacgaactgttgaaaaagtagaaccggacggtgaattttcccttttatatagcgaagcgttatcttttttccaagaagtcgcacaatgccattaatgttatttcagccatttccgtctgcggagtggctttggctacattggcattggtatgcactttgtctgtttttaacggcttccaggatctggtagctactttctttacggcttttgacccggagctgaaaattacggctgtcaccggaaaggtttttgacggacaagaagcgcgtatagaagctttgcgccggatgccggagatcgctgttttttctgagtctttggaagagaatgcgatggttcagtataaagatcgtcagaccatggcggtgattaaaggaattgaagataatttcgaggatctgaccgctattgacagtatccttttcggccgggggcaattcgtgttgcatgatgaagtggtagattatgccattcccggcatagaattggtttctatcttgggaacgggtatcaaattcctcgatccgctagagatttatgctcccaaacggggagttaaagtcaatatggccaatcctgcttccagctttaactctgccgatttatattccagcggccttgtttttgcggtgaaccaacagaagtatgactcttcttacattttgacttccctccaatttgcccgtaggttgtttcagtatgacacagaagtgagttcggtagaattgaaattgaagccggatgtagatgcagggagtgtaaaatcgaagatacagaaaatattgggagatgatttccgggtgcaggaccggtatgagcagcaagcggatactttccgcattatggagatagagaagctgatctcttatattttccttacctttatcctgatgatagcctgctttaatgtgataggctcattgtccatgctgattatagataagaaggcagatgtagtgacattgcgcaatttaggggccagcgacaagttgattacgcgtatctttctgttcgaggggcgtatgatttcattgatgggtgcggttatcggagtggcactgggcttgatcctttgttttatccagcaggaattcggattgctttcgctgggaggtggtaactccggtggcaattttgtggtggatgcctatccggtcagtgtccatgcatgggatattgttatagtttttgtcactgtgctggtggtgggctttctttctgtgtggtatcccgtgcgttatctcagccgcaggctgctgggcaggtaatttatttattattgttgatacggctgatgtttgttggtttgcacggtacgatttggctgctttctttggttttactcttttcgtcttttggtcttatggctttatctggttaagtcttttcttctttgtggttaaccctattttgttttatggttaagctcttttttatggttgtgtactatagtctcttccggtggtttgtacagtctgatatagtggactgtataaactcttgcagtagactgtacagtccactgccggagtctgtagtagttaactgtatgataagggttagctataaggaaaaacgaccttaatcgtcggagtaatagggcttggtacaggcttccttcccgggggcaaatcttctactttcggggtcctcaaatcagttcataactgctgatctggattggcatatccagattgtgcaataccttctctagcagaattccttctcggttatcatattcatatccgaaagtggcgcggatgccttgcaggatgaactgtgtggcgcggtccaaggcgataggcaggctgtctccctgcatcagtgagccggttatcacactggtaaatgtatcacctgtgccggggtaatgagcaggcaggtaggggcaagtaactttccaataacggtctccttgcctgtcgtatgcatgtacggaagtcttgtgcgggtcaccttgtacgggtacactggtgataatgacgataccgggaccgtgttctgatatttcgtgcagatagtttttcagttccgcgtccgtattctctgctttataaggtttgtcaagcagataaaagagttcggtcatattaggtgtgataacatcggctttccggatgagatggcgcatctccataatcatttgttcatcgaagttggcatataatttcccgttatctcccaaaacaggatctatcataaccagactgtcaggttgtcggaaatcatcaataaaccgggatacgatttgtatttgctggggagagcccagatagcctgtatagatagcgtcaaactgtatcttcagttgcttccattcgttgataatcttgggcatctcgtccgtgaggtccaagaaggagaagtgcgggtattgggtgtggctggataatacggctgtgggcagagggcagacttgaaagcccatggatgagaggatagggataacgacggtgagagatactcgtcctgcaccggataaatcgtgtaccgcagctatcttctttactttatttgtatacatatcttcatgaattaagcgttatggatggtatatataacaggtaaaccggaagaaagttattccaatgctatgctttctacttttatgtcctgccgacctaagaagatggaagcggattcctcgaacttgttttcactttcggtggtaaggaagcggcattttcctcctttttcgcaacgtgcgtccatttcaggatggcgattcaaatagtcctgcagacttcgggctacatattctccttgtgcgatgatgcggatatgtccgggagtaaactgtcttattttatcaagcagtaacggataatgggtacatcccagtatgatggtgtcaatcatcgggtctttatccagcagccggttgatatgttgtttgacgaaatagtcggctccttccgattgatattcattattctctactaaggaaacccacatgggacaggcttctcctgttaccacaatgtcgggagataatttatgtatttccaaaagataggattcggatttgatggtaccggctgtggccagtatgcctacgtgccggcttcgggtgatttctcctatacattctgctgtaggccggatgaccccgagtactctgcgggtagcgtctattaccggaagattgatctgctggatggtgcgtaaggcttttgccgatgctgtgttgcatgccaatatcaccaaagggcatcctagttcgaacagtttgcttacggcttgcaaggtaaattcgtaaacaacttcaaaggagcgcggtccgtatggacagcgtgcgctgtctcccaaatagatataatcatattcaggcatcagtccgcgtattttgtccagaatggttagaccaccgtagccggagtcgaatacaccgatagggccggttgaaggggggagagatgggatcatggcagtatagctatataatacaggcacggattacacggatgttcacggtttcgaaacctatgaaatctgtgtaatccgtgcctgtaaaggtctttaacttaattatttgattcctactttagctttgacagcagcagttacatctgtggactgcgcttcatttacgtagggaatttctgttctgttcaaatcaaagatataagtatatccaccttcctggcctactgctttgatggcatcctcaatttttttgtagataggttccatcatatcagcgtatgatttctgcaattgctgttgtgcgtcttgttggaactgcattcctttttcctgtaattcctgcaattctttctggcgtctttcctgaatgttcttaggaaggttggcttgttcctgttggtattcagtatattttttggtcagttcatcagtcgcacgtttcatttcatcctcatattgtttctgcatagcttggatgtcagtctgagcctttgtaaattccggcatgacagtaagtacatctgcagatttaagatgcccgaatttctgagcaaatacactcatcggaacgatgagtaaaagtagtaaagcaatttttttcaacatagttctattttttattagttattgcaaatttggattatcggttgcaaatgtaggaaattaatttgaatatcctaatcttgagagcacttcattgctgatatcaatgcttggagacgcgaaaataatactttgggcagagcctctgtctactactgccgcatatcctttttgttctgaaatctgttttaccgcttcatagattttatcttgaataggtgcgattaatgcttcttgttttttggccatttctccttcaggaccgaaatatttctttctcagttcggctgcttccttttcttttgccacaattgcttcttctctttgcgttttctgtgcggccgacagggaagccgaggctttctggtattctttataaagtgtttccgcttcttttgctttcgcctccacctcactttgatattgttgtgaagcttgattcagttgggtattcgcctgttcgtatgcaggaatattcttcaggatatattccatatcaatcaaggcaaacttttgagcgctggctgtgaatacacaagccacaaacaatagagataataggatagcctttttcataatcactttgtttttagttattaaaactcttgtcctaggataaagtggaactggcttccactataacggctggagccgttaatcttgtcgaaaccatatgcccagtcaatacccatcataccaatcatcggcaggaagatacggacaccgacacctgccgagcgtttcaactggaacggattgaacttgcttacatctgtccatgcgttacctccttcgatgaagcctagcgcatagatactggtcgaattctccagcatcaacgggtatcttaattctgcacctaaacgtacgtaagcgtagccttcactaccataaggggtcaatgaaccgttttcgtaaccacgcagtgcaatggtttcggaagcgtagctggtgctatagcctgtcataccgtcaccacccatgtagaatgtttcaaaaggtgattttttgtatttgttatagtgacccagcaagccgaattctgcgcgtgtcataataaccggacatttctgacctcctgtaagggcggtataggtctttgatttgaatttccatttatggtattcaatccagttgaacatgcttgcagcttcatcataatcatctttaccgtataccgagtagtccttgttactgaacaatgagtacggaggagtcaactgtacggaagccgagaattcagaaccgcgacgcgggaaaatcgggttgtccgtagagttacgtgccagagttagattcaaactcaagttgttgcaattaccggttgacatatactctccgttgttcaacttgatatacaggtagctccagtctttcaatataaatcgttggtaagagagttcggctgacagggtaaagtagtcatccggccacctcaaacgcttaccccaaccgatggatgctccatacatctggatagatttgtcggggtcataataagactcgtagttgttatatccaccataataattaccataaccgctgtaataattatagtaattattcatataagctgagttatagtagttactgctgatatctgtctgtatggagtagaaagccgaaacagagaatgaattcggacgtttcccgccaaaccacgggtcaaagaacgatacactatatgactggtagtaactaccgttggtctgtccgctgatggtcaatgtctgcccatcaccttgtggcaggaatcctcggtagttatcactcttatggaacaagtttgccatagagaagttcgtgaacttcaaacttaatttaccgataacaccggtctgtccccaacctgccgagaactctacctggtcatttgctttagactccagattccagttgatgtctactgtaccattggtaggatccggttgaacatccggctggatattttcagggttgaaatgtcccatttgggctatctcacgataggaacgttccaatgcttctttgctgaacagatctcccggtttggttcttaactcacggcgtaccacgttttcatacaaacggtcgttaccgttgatgcgcactttgctgatagaggcctgaggaccttcctgaatacgcatttccaagtcaatggagtcaccgtctatgtttacttctaccgggtcaaggttgtagaatacgtatcctttattatagtagtagttaccgatagcgtcttcatcaccggttagacgctcggtcattaatttctggttataaacatctccttttttcatacggagttgctcgttcagccagtccgaagcataaatggtgttacctacccatgtcacgttgcgcagatagtatttgtcaccttcttctattttcatatacacatcgacggtacggtcatcgtatggagaaatgctgtccacaacaatttgtgcgtcgcggtaacctaattcgttgtatttgtcgatgatatgctgtttgtcttcttcgtatttctcttcaatgaactttttggtacggaagaggttgacaagtttgtttttctcattcgtcttcttcatgacacgctttaacttcttgtcactcaacacagtgttgccgtcaatggtgatcttgtggactttcaccttttctttcttgtcaatcattacatcaacatccacttggtctttattgtcagccaaatcacgctctacaatagtcacttcggcgtttttaaaacctttttcatcgaaatgtttcttgattaatattttagcacggtctatcaagttgggagtaatctggcttccttttaccaaacctagtttggcttccaaatcttcacgctcgcttttctttacgccgtggtaacgaatgtcggcaatacgtggacgttgagccaggatgatttttaaatagatcttgtctccaacaattttttcagctatgatttgtacatcagagaacagtccgtgtcgccaataacgttttacagctgtggtaatgtcatctcccggaacaacaatggtctgtcctaccgatagtcctgaaagtccgatcaatacataatcttcatagttttttacgccttctactttgattccgccgatttcatacttcttgggcgttccggaataaagtatgactggattgtcgttttcttctacgtttgcttcttgggcgtaactgcctgttgaaaagcaaaataggcatgtaagcgttaatagtataagtgaaatacgatatagcattttatctaactttatatttgttcactggttttgccgaaacggcgttctcttttctgataatcataaatggctttgcaaaattcttcttcgcggaaatccggccagaacgtttcacaaaaatatagttcggaataagcacattgccaaagcagatagttgctaaggcggatttctcctccggtacgtataagcaaatctggatcgggcatatagtttgtacttaaatgcgcatttatcaaattgtcatcgatgtcgtcaatggctagtttgttgttttgaatcttgatcgttatttgtcttaccgcttctgttatttcccatttggaagagtagcttaaagcaagtgtcagacacatgccggtattgattgaggtgtgttcaatacattggttcaatcgttccagaacttctaccggtaactttgccgtatcaccgataatgcgaaaactgatgttgtttttcatgaaagtttcttcttcaatggagtccatcagaagactcatcagagcagcgacttcatctaccgggcgattccagttttcggtagagaaagtatatagtgtcaagtatttgactcccagtctagccgcttcttctgctatgatgtgtacagtttctgcaccggcttgatgtccgaagctacgtgcctgtccacgttgtttagcccatcttccatttccatccattataatggctacatgggcaggtatacggcttttgtctatttgctctctatatggcatgtcgcaatctattttatatgactctctttgactttattccttggaatcgaatcccaacttattgattcttcccctccatacttctccacttcggctccatataatccacaaaaagttatttttgtctataacataagaatagttgccgtctgcctgatggtatagatcggggaattctgttgggaaaaatacatatctagaaacaggtttccatgtaacgccttgatctgttgattcatagaattggctgaaggcgggaatgtccttaccgaaacttttgcccggaccaccgaaagcgtataattggtcgttgtaatgaatcatggctatattagccagcttgggacaataaaaactatcgtatgcggctgtaggataatctgcccaactgtcttctgtggtcagtctggtccatacagtagaggtcgtgtcggtagcaatgggattttcccccattagtaccatacggtctatggatttattggttaccaacgggtaagctgtgtatgatatctgatttttcgggaaattggccggaacctctccattagtatcccacgccatagcatccgtactttccataaaatgattgttggtgtctatggcgtacaatttgcggttatattctgaatgaacgccggcaatcagcttctcgaatttggtgttagtgccaatcttgctccagctttttccatcagaggaacagtacaggtcattgtcggcaagtatgtataatttgtttccccatgccatggcagaagaatagtccgcatttagcatattttcaggtaaagcctgtaagggtgtccaggttcctccatcattgatgtgggtgcttgtaacagcggcaccattgtcttgctgtgcgaaaacataaatataatctcctaatgtgactgctttttgtgcctggatggtgttgtcgaaactacttcctctatggctccactgcaatgagtcgggaacttgtttatgtacattaatctcagctttataaataggcccatagactccgctcattgccataactttaaattggataggtttttcgaaattcaaggagtcggtttcattccacaacgaatctttgtcctctgcaacaataaaaactccgataccatctgatgttatgctgactacaactttgctgatgtctgtaccgactggcagggagtctacattgtagatatgtcttgtgccttggtcaatggcaaaagggtatttggtaccatcaacggtgaatgtcagcgttgtatctttgccattaaccttttcggtatattgagtttcaattttatcttttatagcaaaagcggtaatgcttgattctgaactatattctgtttctacttcgttgtcgtccaagcaagatgtaatcataaaagctgcagtaagcagacttgtgatgacagtcaaaaactttattttcatttgcaaatgagtctattgttacaagtcgcaaaagtaggaagatttttttctatacagaagttttagggcaagttttatattaatttatagataaactagccctttttctctgtcaatcagccacattttgtctttggttttgtggatggacggcatgcattatttctcttccaaagtatattttattcaatttaaagtattttttttgaatagaaggtgcctctatcccattcttcaaacacagtggaaccttttctatgaaggcttcatcccatagactggaatctatgaaagactgtaataaaatacttcctccttctactagaagtgattgtatttttttctgatataatacttccattatttgcggcaggatgtctttgctaaaatccaaagatatgtattctgttaatgtgtttggctgatggggggattttcgggtgaacacgaatgtctttatcctgccactgaaaagttccaggtctcgcggtaatgtcaattctttgtctattaccaggcgtacgggatgcttgccgtaccaattccgggtggataaggagggattgtcaagtaatgccgtgcgtcgtcctactaatatagcgtcatgttcggcgcgttttttgtgtaccagcatgctggtcagtggattggatagtttgatcggttttcctcctgtgcggtttatatcgatgaaaccatcggtagattctgcccactttaaggttatgtatgggcgtttgagtgtgttgaatgtaatgaagcgtcttatcaggtgccggcattcctcctctaatacacctacagttacttcaataccggctttgcgcagtttttcgatacctctgccggctaccagagaaaacgggtccatgcagcctatcacgactttggggattttcttctctataatcagatcggcgcagggaggggtcttcccataatgggagcatggttccagacttacgtaaatggttgattccttcaacagattttcgtctttaacggaacgtatggcgtttacttcggcatgtgcctctccgcaacggatgtggtagccctctccaataatggtatcgtgatatacgatgacagcacctaccatcggattaggagctgtgttacagagtccgttgtgtgccagttgcagacaacgggaaatatatttttcatcttttgtcataacagtcttgtttaaattcttacttttgcatataaaatgacactatgaatcctgttgtatcttacataaaacaaaccttgcaggggtattaccccgatacagaacttgtacctatggctaaattgctgcttacacaagtcttcggtatgtctgttgttgaattgtatgcaggcaaagatactactttttcagtgaatgagcagaaacggttggatgatattctggtccgtctgcaaaaactagaacctattcaatatataataggcactgaagagttttatggtcttacttttgaagtgaataaacatgtattgattccacgtccggaaacgggggagttggtagattggattatacgggaacataagtatggtcgggttaaaatattggatattggtacggggagtggttgtatcgctgtttctttgaccaagaatctggaagaggcggaggtcgtttcatgggatgtctcagaaaaggcgttgcaagttgcagaacgtaattgcaggcggaacggcgttcgtgtaactcttgagcaaagggatgtgctgcttgcttctcctgccggtgagcagtttgatgtcattgtcagcaatccaccttatattacagaaaaggagaaagcgaatatgagtgctaatgtcttggagtgggagccggaattggctttgtttgtgccggatgatagtccattgctgttttatcggaaaatagcagaattgggtagggatatgttagtgtctggtggaaggctttattttgaaattaatcaggaatatggccgggagacggtggatatgctagctggtttgggatacaaaaatatagaattgaggaaagatctctttcaaaatgatagaatgataaaagcggaaaaatgagatgaaaggagaattaagtgagaatgagttgaggtataaggcagaagcttattgttcttcaatggaacgttgtgtaacggatgtagaggctaaattatcacaatggggggcaactccggaagtgatggagaaaatcgttcggtatttgcaggatgagagatacattgaccagaagcgtttttgctcggcttttgttcgtgataaatatcgctttaaccaatggggcagagtgaaaatcagtcaggctttgcgcatgaagaagatccctgcggatgttatagccgaagggttggaggagatagatgaacgggagtatgtggagattctgtctggcttgatcgagcagaaaagaagtagagtgaaagcatgtacggaatacgaacggaatgggaaattgattcgttttgctgttggtagaggatttgaaatagaggctgtttgccgttgtgtgaaacaaaccggagaagatgatgtctatttggactgatctttggaatttatttttcccacatagttgtctgctttgtgggcggcagcttatatcaggggagagagtgctttgcttgaaatgcttgtcaaggcttccgcgtactcaatttcatttacggaaagataatattgtagaatgtaacttctggggaaaaataccggtggagcgtgccacctcttttctttattatgcaaagggagggaatgtccgacagttgttgtatgaactgaaatatcatggtaatcaagaagtgggtgaagtgatggggcggatgatggcatctgaacttatgtgttctcatttttttgatgggatagatttgattgttcctgtcccgttacatcaacgtaaaaaacgtttaagggggtataatcagagtgaatgcttggcacggggagtttcggtggtgacaggtattcctatgaacactaaagttgtgataagaagcagatatactgatacgcagacgcataaaggacaatatgcaagatgggaaaacgtgcgaaatttgtttgcctgtattttccccgatggcttggaaggaaagcatctattgttggtggatgatgtgctgacaacaggggctacggttgtttcttgcgctgatgcctttcgtggcatacccggattacgtatcagtgtacttactttggcattggcaggggaatcttgataacaacaactattttttagaaaaataccttgtccgatttttcattatctcgatgtatttctatatttttgcacaatatttatcagatatagttgagttatgaagactttagaaaaattattcgcagagaaattactgaagattaaggctatcaagttgcagccggctaatccttttacttgggcatccggttggaagtcgcctttttattgtgataaccgcaaaactctttcgtatccttctcttcgtaattttgtgaaacttgagattagccgtattgtcctggagaagttcggtcaggtagatgctattgccggtgtggcgacaggggctatccctcaaggagctttggtggctgaagaattgaatctgccgtttgtgtatgttcgttctactccgaaagaccatggcttggaaaacctgattgaaggtgaacttcgtcctggtatgaaagtcgtagttattgaggacttgatttcaactggcggcagtagcttgaaagctgttgaagctatccgtcgtgacggatgtgaagtgattggtatggtcgctgcatttacttatggtttcccggtggcaattgaagcgttcaaggaagcaaaagtgaacttggttactctgactaattatgaagctgtattggattcggccttgaaaaccggatatattaatgaagaggatgtttctgttttagataactggagaaaggatccggctcattgggaggcaggcaaataagttatagttttaaaacaaatataatatgaagagaaccgttcggaaatttttatggatttccggattgttcttttcgtgtttttagagagcaggtattatggcacaatttgagagtagtgtgaaatatgttccttatagtcaggagcaggtgtttaataagttgtcggatttaagtaacttggaatctgtacgtgataaattggctgacaaggtacaaggtatggagttcgactgtgattctttaagttttacggtacaaggcataagcattactttgcgtattatagaacgtgaaccttgtaaatgtgttaaattcgaaagtgaaaaatctccggtccctatgaatttgtggattcagattttgcctgtagaggctgggcaggcaaaactgaaagtaactattcgtgcagaagtgaatatgtttatgaaggcgatggttactaaacctttacaggatggggtggataaactggctgagatgttatcgatgattccttattaaaaaataaagaaaaatatggcacagaaactttgggaaaaaaatgtccgagtaaatgaggagatagatcgttttacagtaggacgtgaccgtgaaatggacctttatctggctaaacacgatgtattgggctcaatggcacatatcaccatgttggaaagtattggtttgcttacggccggagaattggaaatgctgttagcggaattaaagaatatctatgcttctgccgaaaagggagagtttgtaatagaggatggtatagaggatgtacactcgcaagtagaattgatgttgacgcgtaagttgggagatgtcgggaagaaaattcatagtggacgttcacgcaatgaccaggtgctggtggatttgaagctgtttactcgtgcggaattaaaagaagtggccgaagcagtagagcggcttttccatgtgctgatttctcaaagcaatcaatataaagatgtgctgatgccgggatatacccatttgcagatagcgatgccttcttcatttggcttgtggtttggtgcatatgcagagagtttggtggacgatatgatgtttctgcaggccgcattcaaaatgtgcaaccgtaatccgttggggtctgctgccggttatggttcttctttcccgctaaaccgtgagatgactactagtctgctgggttttgattcgatgaactataatgtggtatatgcgcagatgggacgtggcaaaatggaacgtaatgtagcttttgccttggcttctattgccggaaccgtttctaagatggcttttgatgcttgtatgtttagtagtcagaattttggcttcgtgaaacttccggacgagtgtacaactggttccagtattatgccccataagaagaatcccgatgtgttcgaactgacacgggctaagtgtaacaagatacaggttctcccccaacaaattatgatgataatgaacaatctgccttcgggttacttccgtgatttgcagattataaaagaagtattcctgcctgcttttcaggagctgaaggagtgtttgcaaatggctgcctatattatggacaagattaaaatcaacgagcatattctggatgatgatcgttacctttatatatttagtgtggaagaggttaaccgtctggcttctgagggcatgccattccgtgatgcttataagaaggtgggcttggatatagaagccggaaaatttactcacaacaagaaggtacatcatactcatgagggtagtataggtaatttgtgtaatgacagaattgaaaatctgatgcaacaggtagtagatggttttaacttctcagtcatggagcaggcagaacaatcccttttgggtagatagaaacaattataaatcgcatgatcatgaaatatcaaccttcagcagagcgctatgacaagatgcagtataaatactgtgggaatagcggattacttttgcctcgtatctctttaggcttgtggcataattttggcagtgtggacgatttcggtgtggcaaccgatatgattaaatacgctttcgataatggggttacgcattttgacttggctaataattatggccccattccgggaagtgctgagattaattttggtaaaatcttaaaggaaaattttcaaggttatcgtgatgaattgattatttcctcaaaagcagggcatgaaatgtgggatggaccttatggaggaaacagttcgcgtaagaatttaatggccagcattgatcaaagtttgcgtcgtaccggtttggattactttgatatattctatagtcaccgttatgatggggtgactcctgttgaggaaacaatgcaggcattgattgatatagtgaaacaaggaaaggcattgtatgtgggtatttcaaaataccctccagcacaagctaaaatagcttatgaaatgttgagggctgccggtgtgccgtgtctcattagccaatatcgttatagtatgtttgaccgtactgtagaggagaaatcattgccattggctgcagaacaaggctccggttttattgcattttcgcctttggcgcaaggcttgctgactaaaaaatatctgcatggtattccggaacattctcgtgcggcccgttctaccggatttttgaaagtagatcaagtgacagaagataaagtaggaaaagcacgtcggttggatgaaatagccgctcgtcgtggccagactttggctgagatggcattggcatgggtcttgaaagacgaacgaatgacttctgttattgtggggacaagttctgtgaaacagttggcagataatcttcatgcattggataatttgaactttactaatgaagaattggccgaaatagagggaattttacgattgtaaataaaaaaatgggtgcaaagtttggttggtattataaaatgacttatctttgcatccgttaaaacaaaaggcggaaatagctcagttggtagagcataaccttgccaaggttagggtcgcgagttcgagtctcgttttccgctctctctcgtcgaggatgctcgaatggtggaatcggtagacacgagggacttaaaatcccttggccattgcggctgtgcgggttcaagtcccgcttcgagtacaaaataaaatcacaaatatctagttattagatatttgtgatttttattttagtaaattgcaccatatttgcggctcagtttgaaaattctacaacgcttcccacatctcggttcagtttggaaacttcgatttctacatactagaattattcttgaagttaaaaaagtgatacttcttttattaaataatttaggcttgatattttcttttattatgtaatttttgcacaaaacacttatcgttttaaaaaatataaagaaaaaaagtgaataaagtttttattcatcgattatatttaatatatttgtttccatcatattaaacctattaaaaaaaatctaaatggtatgggaaaacgcattgttctgtttttaatgtgcttattagttgtaataggccatttatcggctcaagtaaccaaaatgtcgggaattgttctttccaaggatgatggattgccggtagtaggagcttctgtgttgatacagggaactacacatggtacgataacagatgtggatggtaaatttgtgttggataatattaaaccaactgataagaaagtaatggtttcatttattggtatgaagacccaagtggttgatgttaaatcttttgtcaaggtagtattggttacagagtctgaaatgatggatgaagtgatggttgttgcttatggtacagccaaaaggtcggcatttactggatcggcttcagttgtaaatgctgagaaactttctaaaagacagacaacgaacgtcgttcaggcacttgctggacaagtggcaggcttacaaatgacaagtggatctgggcagccgggaggagatgctccaacattgataattcgtggtattggttctatcaatgcggataatgatccacttattattgtagatggtatgccctatgagggaggatggaacaatatcaacccatctgatgttgaatcagtgtccgttttaaaagatgcagcatcaaatgcgttatatggtgcacgtggtgccaatggtgttattattattactaccaagcaggcaaaagctggtgaagctgttgttacggctagtgcaaaatggggagtgaatactcgtggtacaattgattatgactatatcaaagatccgggtgaatattatgaagcacattataaggcattatataatcaattgaggtatgtaaaggggctttcagaaggagaggcttatgctcaagctaataaaaatatggtgggtaatacgaaggaaaatggtggtttgacttataatgtgtatagttatcctgaaaacgaaaatcttattggtatgaacggaaagctgaatcccaatgcaactttgggcagggtggttaatggatatatgctttatccggatgattgggttgatgaagcttatagttctgccttgcgtcaagaatataatgtgaatattgctggaggaaccgataagatgcaatcatatggttcttttggttatttaaaagatgatggaattgttcctagttcaaattatgaacgatattccgctcgttttaaaggcttgtaccaagcaaaaaaatggatgaaatatggtgctaacatcagttatacacatagtaatagtgcttccttgacagaaaagtatgatacggatttatccagctttacagagggcatggcaccaatctatcctgtatatgtgaggaatgctgatggaaatattctgacggatttaaatgggaaagtatatgattatggaacagcgacggcacaactgggattggcacgtcctaaccatcctaattcttctattcagtcatctatgcttaaccaagaaaataggaatggtaatacatttaatggtaatgcatttgtagatattacttttttgaaagattttaagtttacatttaatgtgggaaccacagttaatgaaatcagatattatactacaacaaatccatattatggttttggtgcagaacagaatggcacagtgacaatgtatcattatcgtactactacattaaacttacagcagatattgaattatagccataattttggtaaacataatatttcggtaatgttgggacatgagagttataaatataattatgcagaattatccgcatccaagaaaaatatgttttcatattggggaaaccatgaattgaatggggctgttatagatggttcaagtgctgcttcttattcgaatgattataatacggagggatattttttccgtgctttatatgattacgatgcaaaatattatttttcggcttcttatcgtcgtgatgcttcttcgcgttttcatcctgatcattggtggggtaatttttattctgtaggcggtgcttatctaatgtctaaagaggactggtttgatgtgaaatggattgatatgctcaaaataaagttctccataggacagcaaggtaatgataatataggttcatataattatacagacagatataatatagtgaatagtaatgatgaactttcattgtcttttaatagtaaggggaaaaaagatataacttgggaaacgaatactaacatgaatttgggagttgagtttgaactgcttaaaggaaaactgaatggtggtgttgaattgttttatcgtaagactactgatatgttaaattggttcaatgttcctctttctttgggttatcctgggtactatgataatatcggcgatatggcgaataagggtgttgaactggaactgaactatattcctgttaataaaaagaattttacatggaaaataaatctgaatctgacacactataagaataagattacttatttgccagatgagaaaaagactactgttatggatggtcatggaggatatatgaatggaagcagatattatggtgaggatctgcctatcaatacatggtatatgaaacgttttgccggtttgtctgaggacggactttcactgtggtattatacggataaagaaaccaatgaggaaaaaacaacgaccacttattctacaggcgacttttatttgtgtggagatcctaatccggatttgtatggtggttttggcacttccattactttccatggttttgatctctctactcaattttcctatttggttggtggtttgacttatgattacggttatgcaggtatgatgggtaacccaactgcaacatctgtaggtaaccgttggcataaagatgtgctaaaggcatggtctccagaaaatccctcatcaaccattccacgttggtatttcaatgatctgaatacgactggttcgtcagaccgctttctgattgatggaagctatttgaatctacaaaatattcaagtggggtatacattacctgatagttggacttctcatttgaaaattaaaaatttacgtttatattttgtttgcgataatgtatactattggtcaaaaagaaaaggcttggatcctcgccgttccatttcaggagtaggtacatcaggaaagatagctccgttccgtacttattccggaggtatcagtcttcaattctaacttagttataatcaaaaattttaagacgatgaaaaagaaaaatatattatttcaaacagcggtagttgcctgtctgcttttcggtacaggtataaatatgagcagttgtatcgaacagacctttcccaaaagctctaccgctatttccgagcagattgcagaatcaccagctgctatgaatgctatgttaaatgccgtggtaggctttgttaatgcatataatacttatggacaaggttatacttgggacttgggctatacctcatacggtattataagagaagttatgtgtgaggatttttatatatataaatctggttatgattattataattctttcggattgtgccgtagcttggctgataattcagaggtgaattctatttattattactactataaatttttgaataatgtcaataatttaatccgtattgtggatcttgataatactacagaaacaaataggcaatatgtaggaatagccaaagcctttcgtgcgatgatttacatggatatggctcgtctgtttgagtttaagaagactggattttctaagctggatgacgaggctgctaccaatggggtatatggattaacagtccctatcattggtgagaatataacggaagcagaagcacgtaataatccgcgggttcctttttatactatttacagatatatcttggatgatttggagaatgcagaagttctattagctgattacttgaggcctactaagaatatgcctgatttgtccattatatttgcattaaaagctcgtttttggctagaattgggtacgcgatttgaaaagtattctaatgatttggcagcactgatccagaatgtggatttagatatagattcggataaggattgttatattaaagctgccgattgtgcaagacaggctatagttaaaagtggtgctgctccattgacagaattggaatggtatggtggaaaagactattttacggcctttaactctattcagacaagtgcatggatgtggggaggaatcatgaataaagagaatattcacagtgtatggcttaatttggcagggcacttgtgtacagaacagacatttggggtaggaggaatttcctatggggcacacagaatgatcagtaaggttttatttgagcaaatctcggatgatgattggcgcaaagaaacttggattgctcctgaagatgctggaaaggctccaggtactaaatatcatacattgttcaccgatgagaattttaaaaaggtgcctgcatatgttcatttaaaattcaagccgaaagaaggcaatatgattgacgccaatgtaggtgcaccgatagataatcttttaatgcgtgttgaagaaatgtattttattgaggctgaggcaatagccgctagtcagggggtaagtgctggaatttctgctttagagaattttatgaaaacttatcgttacagttcctatcaatgtacggcatctactatggaggattttcgtaaggaattgattttgcaaaaaaggatagaattttggggagagggtattatttattgggattataagcgtttagaattgcctgttacacgggggtatctaggtaccaattgtccggtggggtatcgtatgaactctaaagaaggatattgctgtccatggttcaatttattttttagtaagtttgaatctattaataaccaagctattatattgaatccggatccttcggctatagtggaggactggacagaataatgaattgttaatttttaaagatcagtttatggtttagcattgtgaatgtctggatagacgttcatcttgttcttttctctgccgaagctatacttcggcagagttcttttgaaaggggaggttatggtgtgatattgctacttatggtagaatttcttataaaaacaggtctaatcattgtaataactattcaggctattggtttgtgacatctttttccgatatttgtgtggttgaaaaaggtaaatactatgttgaaacagattcttcttatatggttgtatttttctgccttgcctttgtttggtcagagtttgattgatattaaatattattcagttcaggatgggttatcacagaaaaatattcagaatttcattcaagatgataatggttatatatggatggctacgtggaacggactagagcgttttgatggatattcttttactaattataaaacttatcctgaaagtgatgtacgtataacaaatcatcgttttaccaatattgaaaaaagttctctgaataatatttggtgtcagacgtatgataaacattgttatctgtttaatacccgtacttgtcagtatgaagatccctttcttttcaacaaaggggtgataaactcagttgaaaaactgtatgtattgcgtaaagggataacatgggccgtaggtgtacaaaatgagttattccgtttggatgaaaatagatttcctgctacggagtcagtgcaattatatactggaaaaatagaaaataacataggagacagtatctatattgtgatgcaggacaaggatggagatgaatggattctgacaaataaaggagctacgattgtaggaaagaagagtatggcaaatcttatgccttttaagtttatggtagagaatgcagatgatatctatcttgctacttcaaaaggcttttttgcccgatatgactatcagagtcaaaatgttgttccatgtgtccccaatgaacctatgtctgagattatcggactgaaatctttatctgatcataaaatcgctattttacagagaaaagagattcggttttataatccgaaaacaggcaagtttactctttataaaatgcctgtagagatcagtcctgatatatatcaagatagaaaaggtattttttggttgctggggggcacgggtggggttattcgtttagattgtactactgaggatattatcttattaagttatcctaagttaaaggaagttccttttaccaagccctgtacttttatacatgaggacgagtatggttgtatttgggtgaatcctgtagaaggtgagttatacttttatgatccgatgactagatctttggaacaggcttatgtttatgaaaaaggagtgagagtaccaatctcatttcaggctttcagctattttattgatcatcataaaaatctgtggtataccactccaggaagtgaattaggatatctttcttttcatcaaagtgggttggattatataatcaacagacataaagagtctgctcgttcgttgatggaagatcatcgcaaacgtgtatggattggttggaaacggaatcataaaactcaaccgggaaacatctgtctttatgattcgttaggacagtggataggaaatatttcgcaaaaaggaaaaatagtggcggatcagtctgtctcatttaatgctgacgtgtactgtatttacgaagataaggatcataacatctggatggggactagagaagacggtttgtttttattccgttttcaaggggaggacaactatcaggtaacttgttacctgcctgataaagataatccttacagcatttcttccaagtctatattctctattttgcaagattcgtctggaagaatatggattggcactttcggtggaggtatcaatttggttgagtctgcttccgcaggaggagatttgaagtttgttcattacggtaatattctcaataattaccccattcatgtatgtgagaaagtgcgttgtttatatgaggtggctgatggagtgattttgataggtactactggcggattgctgtcctgttctacagatttttcccgtccggaagagattcgtttttttcataatgtttgtgatgagcgttattccagtttgagcaataatgatatattggatataacccaaactaagggtggtaaactgctggtaactactttgagtggtggtattaatattttggatgatggtagcagtttatctgaaagattgaactttaaacattacaatgccactaatgaccgattaccggatttgtcactgtccagcatagaggatcaagaaggaaatatatggatagtttcagaaaacaagatttccaaatttgatgctggcctgaatctgctcgaagagtataaagatcagatacagatggcagagactaggcctgttttgctatcttctggtaaattgcttttagggtcactatatggtgcgttatgtataattcccgatgagttgcataagagtgatttcgttcctcctatcgttttttcccatcttgacatttatcagaataatacttctcgcaggcaggacatatatagtaacgatgaggctcagtacctgcagccggatgaacgtaatttcactataacttttgctgccttggactatgttaactctccggctataaaatacgtatatcgaattaagggactgaatgaccaatggatagagcttggaaataatcgttctgccagtttggtgaatgtacctgccggcgattatctgtttcaagtcaaatccactaatgccgatggggtatgggttgataatgtggcatctttgtccgtacatattgatcctgtgttcggtgaaactgtttgggcggtattgctctatatcaccatggccgtggtgattatgttggtagtgatctgcattgtgttacgcattactaacctgcaaagaaggatagattttgaacaacagatttccaacttaaaactgcgtttctttactgatatatcccatgagcttcgtacaccgttgacgcttatagccagtcccattgacgaagtcattagtaatgagaaattatctgatgcaggcatggagaatatgcaagtggccaaaagaaacacagacagaatgttgcggctcatcaatcaaatattggattttcgcaagatacagaatgacaagatgaaagtattgatggaacaagtagatataatccctttaattctaaaaatctacggtaattttgttcctatggctcatacgcatcgtattgatttcaggttgttttgtcctctcgattcctttgttatgtatacggatgtggacaaattggagaagattctttttaatttattgtccaatgcctttaaatatactcctgatgagaaaagtatctccctatctgttacttgcgagaaacagattttgtgtttgcaggtgaaagatgagggtagaggtattaatgcccaaaagctcaatcgtctgtttacccgttttgatactttggatgagattgatcccaatatgtctaccggtataggactttcattggtcaaagaattactgaatctgcttcatggtactgtcagagtagacagcaaactgggtgaaggtagcagtttctttatcagactgccgggtaaccgtgatgttttcgatgccgatgccaatattgaatttattctagcggacagcaagaattccggacaggaggtggcaatacccgataagcttacagaagaggaagaagataaggaaacacggattctcattattgaggataatgaagaacttcgccattttatctgtggtgtgcttgctagggagtatgtggttcttgaagcgggtaatggttgtcaaggacttgaaatgacgttgagagaattacccgatatcgtgatcagtgatattatgatgcccgaaatggatggaatagaatatctgaaacgggttaaaggaaacaatgatatttgtcatattcctattattttgttatctgccaagtcttctttgaatgaccaaatccaaggactggaatacggggcagatgaatatataacgaaaccttttagttctgcttatttgaaagccagagtagattccttactcaaacaacggcaaatattgtatgattattacatttcaaagatgagagaaggcgagaaagatactagtcttatggaacaacttactccttctactcctcaagttactcattttgataatgatttcatccggaatattcttcagagtgtggaggaaaacattcagaattctgaatttaaaattgacgatttggcagaagctatgagcatgagccggactgtattctaccggaaggtgaaatctttgatgggagtttctcctgtagattttgtaaagacgatgcggattaaacgggctgtccaacttttggaacaagatgaatttactgtatctgaagtaggatatatgagtggattcactactccgcaatatttcagcagagtattcaaagaagcaatgggatgtacaccaaaagagtacagattaaagcataaaacgattgttgaacaaaatgtataattaatgccccaaatactgcaatggctgtataggtatcttgtcctatttttgcatagaattataaacataatacaatactatgcagacaagaaccgctcaaattttggtatctttgctgtttctgacaacagccatatcttcatgtgataaaaaagaagtatctccgtggaatcaaatgaccgaggttaataatcaaattgtacctcctgtcttccctgagggaagtttcgtgattacggattatcacgacgtaaaagacacgctttatacgaatgccattaatagggccataactatttgttctgagcagggaggtgggaaagttattattcccgatggagagtttctcacagcccccatccgtttgaaatccaatgtaaaccttcatttatctgacagtacggtactgaagtttactacagatcccttcttcttcgaccttgtgcagactcgcatagaaggaatagattgttacaatatctctccgttgatttatgcctatggagaaactaatattgccatcactggtaacggggtgatggatggccaggctgatagcagtaattggctcagtgaaaacagaattcgtggtattgtacaggaagatggtaagaaaataaatgagaaaactttgttgtatgaaatgaaagaggattctattccttttaaagaacgtgtctttatgagagagaatggtatacgcccccagtttatcaacctctataaatgtaagaatattctattggaaggatttactctcaaccgttctccgttctggcttattcatccgttgttgtccgagaatatcactgtcaggaaagtcaaaatgcagagtcatggctataataatgatggttgtgatccggaatcatgcaggaatgtattgattgaggattgtgattttgatacaggtgatgattgtatcgccatcaaatcgggacgtgatgaagatggccgttactggaatatccccagtgagaatattatagtccgtcattgtagaatgaaggatggtcatgccggagtagctattggcagtgaagtgaccggaggatgccgtaacgtatgggtggaaaattgtaccatggacagtcctgaactcgaccgtattatccgtataaaatcaaatgccatgcgaggaggcgaagtagaaaatatatttatccggaatattagggtaggtgaatgtaaggagtctattttaggctttgaattgaaatattggcatgtggatgacggaccgtatcttccttattttcacaatattcatttggaaaatatcacaagtaagaaaagtcagtatgttttgcatctggatggttttgaggataaaatacaggcgcgagatatttttgtgaaagattgcacttttgatggagtgatgaaaccggaaataaataaggtgactggtgttgaaaacattcactttgagaatgtaacagtaaatggacaggattttaaaggagtataaagtaatgaacagattcgtatttttattaggttttcttttgatggcattgatgacggttactcttcaggctcagaaaataattcctttgtggcagaataatatgcccaatagcaaaggtatagttcttaaagattctgtagtcagggaacgtgtggtacaagtcggaattcctgctgttcatgtttatgaaccgtcaaaagccgagcgtaccggtacggcggtattgatcattcctggtggcggatatgtgaaactggcgcatgaaatcagcggtatcgcattggcaaaatggtataataccttgggagtaacggcttttgtcctgatacatcgtttcccgcaatcaccggatgtaatagaatcttacaaagctcctttgcaggatggacaacgtgctcttcgctatatacgtgctcatgcggaggaatatggaatagatattcataaagtgggagtgatgggttgttctgccggcggtcatctggccgcttcattgtgtgctattgatgaagactggtcaaaagtgggcgatgcactggatgcatatagttgtaaaccttcttttgctgtattgatatctccggttatttctatggatgacgctattgttcataaagggagccggacaaatctgttgggaaagcgggaacaggatatcgctctcagaaacttgttttctttggaaaaacaagtggatggtaacacggcaccggctatcttgtttcatgcttctaatgacaaggctgtttctcctttgaacagcatcgcttattatacagccttgtataaagcgggaatagagaaatcttcgttgcatctgtttcctgtcggcgggcatgccatctctttgcgtgcacaaaggggaagcacggtcatgtggccggagttggctgaagcttggttgatagagaatggatttctttctccattataaaagtcgatgatatttattaatttaattataaaatgacacgtaagttattaaaaatagcacttgtagttttgctatctgtagtcagcatcagcatagacgctcaggaaaaacctgtattatggtatgataagcctgccagatattgggaagaggcattacctttgggaaatggacgattgggagccatggtatatggtaatcctgtaaccgaagagattcaattgaatgaggaaacagtatcggcaggttctccttataaaaattataatcctgaggctaaaggagcgttggcgaccatccgtcagttaatttttgctggtagatatcctgaagctcaagcgttggcaggtgaaaaaatcctctccaagaacggtttcgggatgccatatcagacagtgggcagcttgcgtctggactttcctagtcatgaaaattatacaaacttccgtcgtgaattggatttggaaaaagctgtagccacgactgcttatactgtaaatggaatagattataagcgtgaggtctttacctcttttgtcgaccagctggtcattgtccgccttactgcttctcaaccgggaaaacttactttttccgcttccctgacttgtcctcagaaggtggatgttaccgtttctggaaagaatgccttgattttggaaggcacaactaaaggagacgatttcacaaaaggttctatttgtttccgtgcagatttgaagttagatttacagggtggaaagagtgtggcaggagatacattattatccgtgactaatgctaatagtgctactatttatatcgccatggccactaattttgtgaattataaggatatatccggaaatccatccgggcgtaataaggtatccatgaagaatgccggaaagaattatgcccgagctttacaggctcatatcagtgcatatcaaaaatactataaccgtgtatctctgaatttgggacgcacttcgcaggctgataaacctactgatgtccggataaaagaattcgctatttccgatgatccccatctggttgctctttattttcagttcggtcgttatttgcttatttccagttctcagccgggaggacaacctgctaatttacaaggtatttggaatcagaaactaaatcctgcttggaaatgccgttataccaccaatatcaatgcggaaatgaattattggcctgccgaagttaccaatttgcgtgagatgcatgagcctttcctacaaatggtgaaagaattgtatgagaacggtcaggaggctgcccgggagatgtatggttgccggggatgggtattgcatcacaatacggatttgtggcgtatgaatggtgctgtagatagggcttattgtggaccgtggcctacctgtaatgcgtggttatgtcaacatttgtgggaccgttacctctattcgggtgataaggaatacctggcttccgtgtatcctattctgaagagtgcttcagaattttttgttgattttttagtaagagatcccaataccggttatctggtagtcactcctagtaactctccagagaattcgcctagtatttggaaagggaaagccaatctgtttgcaggtatcacgatggacaatcagttggtatccgatttattttcaaatactcgttcagcagcacagattttgaatctggacaagcaattctgtgataccattctgtcattaaaaaggcaacttcctcccatgcaagtagggcaatacggacagttgcaagagtggttcgaagactgggataaccctaatgaccatcatcgtcatatctctcatttatggggacttttccccggttatcaaatttctccttattcatcacctatactttttgaagctgcccgtaatacattgatacagcgtggtgatccttctactggttggtctatgggatggaaagtctgtttttgggcaagatgtttggatgggaatcatgcatttaagttgattgccaatcagttgaattttgtttctcctgaagtacagaaaggtcagggaggaggtacttatccaaatttattcgatgctcatccgcctttccagattgatggaaattttggttgtgcagccggaattgctgaaatgttgatgcagagccatgatggggctgttcatttacttcctgctttacctgatacctggaaaaatggagagattagggggcttcgtgcacgtggtggtttcgaaatcgtttctctgaaatggaaagacggcaaggtagagtcggcaattatcaaatctactatcggtggtaatcttcgcttacgtgtgcacaatactttggcgatggatggtatgacattggttaaagcggaaggagataatcctaatcccttgtttgaaaagcaagaaatcagtcgtccgctggttagtgagaaagttccattgaaaggagtggaattgaaagattcttatttatatgatgtagctactgaagcgggacagacttatacttttatttcaagttgtctttgattttacaagaatattttctgatataaattcaaatatgaaaaaaatatcaatttactgttttatactaatatctttaggatttatcggttgtacttctaaaacccatgaaaaaacaattgaggatttcgacattcgggaaatgagcctgcaagtagatacgctttatagtaggatgacacaagccgaaagagttgcacaattgtatggtattcgtccgaaagaaataatggaggatggaaaattgtcattagaaaagtgtaaagagaagatacctgacggtatagggcatatttgtcaatatgcttgcgctttagatatggaaccaaatgaactgcgtgattttgtgcgtgatcttcaaaattatctgatacatgagactccctcaggtataccagccatatttcacgaagaggccattaccggactggctgccaaaggagcgaccgtttatccccaacaattgggtatagcctgcacatggaatccggaactggctacagtaaaaacggaacaaacggcggaagtcatgcgctctgttggcgctactcttgctttgtcacccatggtcgatctcatacgtaccgctcattggccacgtatagaagaatcctatggtgaagatgggtatcttagtgcagctatgggagtcgcttttgtggaaggtctgcagaagaaaggattgaaaaatggagttgctgcgtgcaccaagcattttttgggatatggtggaggctcttctttgagttggaaagaaatttatgaggaagtgcttttgccacacgaagctatgatacgacaggcgggatgtaaggtcttgatgacatcctatggccggttccgtagtgaacaagccgtatccagcgatactcttctgaataaaatattacgtggatatcttggatttgatggagtagtggtcagtgactatggggcagtaggatatgctagtcagaaaggaaatcctgatatcttgaaacaacgggctgttgaggctctaaccgcaggtaatgacattgaattgccatcaaataattgttataaatatctgcccgaattaatagaagacagtttggttaatgagaaatattttgagattgcggtaaaacgtgcattaatgttgaaagcacgtttgggggtattatctacagaccggaagctctatgcaacaggaaatttggatttggattgtcccgaatatcgtaaaacttcttataacttggcatgtcaatccattgtcttgttaaaaaataacaatgtattgcccctctctggcaaatataggaaaatagctttggtagggccgaacgcaaatacatattggtgtatgttaggagattatacatatcagtctatgcaggcattctggtggggaggaaaaatagaccctgacagtcctaaaattgtttctgtatatgatgcttttaagcacaaggcgaatggtagattcactgtggactatgaacgcggatgtgattggagtgcaaaaaatgagacttccattatccgtgaaggagatcctagaactgaacgcttgaatatgatgttaatggaatcatccgattctactaactggcaggctgccataaatgtagcttcggaaagtgatgtgattattgctgcattaggagagaatcctaccttatgcggagaggctcggcaacgtaaaggtatctgtttgccgggagatcaggaacagtttttaaaagaactgattgctacaggtaaaccggttgttctggttatgtttggtggacgtccacaagtgattgacgaagtagaagcaggttgttcagctattctgcaagcgtggtatccgggcgaagaaggaggaaatgctgttgttgatattttgttaggcaatgtcaatccgtccggaaaattatgcgttagctatcctaagactgaagataaagaactttattgttataacaatggtgaattccaagaaagaatagcttatccgtttggttttgggctttcatatacttcctttgaatatagcgatataaaagttccgtctactgcacaaacaactgatgatttgattgaggttagctgtaaggtgaaaaatacaggaaaatgtgcaggtactgaagttgtgcaactttatctgtctcctacttcctcggaatttctcaaacctatacagctaaaagggtttgcccgtgtgaatttgaaccccggcgaatcgaaaataataagttttaaggtttctcttcagcaaatggcttattatgcaaataatggatggactatagccggtggtcaatatacatttaaaataggtgcgtcatcttctgatatccgtttggaatcatcatgtcagctaactggagaaaatgtgcggatggagcgtagaaatactcttttttctataagtgaaatagaataggaaaaataagaaagcttcaaaaagctatattgcattaccctttttactttggtcttttgaacgtaatgaagaatctgttaacgcaaaatagtgtgtgtattcggattcttcattatgtttagaatggcaaaaagacagaatgccgggattttcagattccctcctgttagcctaaatcgatttatattcggataactctgtttttgttattctcaaaccggattttataaatcttagactgaataatgcaatatccggtttttgtttttattcatctttgcagtgctaaaaactttaaatgatactataaatgaaaacaatgaagaacatgaaacaaagtaggtttattttgtttgtgctttcattcctggtgatgagtgtcgggaatgtttatgcacaaaatgttaccgtaacaggtacagttctagacagtaccggtgagcctgtcatcggtgctaatgtgaaagtggcggggaagtcatctataggaaccattaccgatttcgaggggaatttctccttgtcggtccctgcggacacgaaaaaattggaaatcagttatatcggtatgctttcacaagaggctgtcattaagccgggaactccggtaaaggtaattttgaaagaagatacggaagaattggatgaagtggtagtcattggttatggtactgtaaagaaacgggacttgaccggttctatgacctccatcaagcaagcggacattattgctgttcctacgacgaatgctttggaaagcctgcaagggaaagtggctggactggatatgactaaatcaagtggtcagacaggttcgggcttgtccttttccattcgcggtaatcggtcattgaacgcttcgaatgctccgctgattattgtagacggagtgccctatgggacagatattgatatcaatcccaatgtcatagaatccatggaaattctgaaggatgcttcctccaccgctatttatggttctcgcggtgctaacggagttatcttgatcactacaaagaaaggggctgtaggcaagaccaaggtttcatataacggttattattccatcaattccgtagctgcttatcccgatagaatgaatttgtccgaatgggccgacttcaagagagaggcttatcgtacggacggccagtggggaggtcctgaagatgatgccaaaatttttggttctgcttatgatgcggtaaaatccaatcaaaatgtagactgggtggatatgctgatgcaaacgggtagccagatgtcccattctgtcaatatttcaaatggtacggagaaaacaacattcaatctggcttttgaatatatgtccgaagacggtttggtgaagatggatgatatggaccgttataatgcaaccttatccttatcgcataagctcactgataacttgaaactgaatgccaatgtggtatatacctatttggatcagaatatccgacgtgatcctttcaaccgttctatttattacgctccctatggagatgtatataatgaagatggttctatcaatgtgcttccttttaatgatgggcagaccattagccccatagccgaagaagttcccggagcctataaaaataaccggctgaccagccatttggtggggaatgtaggggctacctggaacattatcaaggacttgacaatgacttctacttttggctttgacaagaaagatatccgtacaggacattttgctgatacatatacgttagacggagcgggaaattattcgttggcggatgctaccaatcatagtgacgtcaattggtcgtgggaaaatacattggcttattcgttcacattaggaaaacataatctgagtctgatggctggtaacgcattatataaaaatgtggccgaggaatataagggtgcggggcataaccttatttcatccactatgttgttttataatttgggtggtttgcaggatagtcagcagatatccagcagttatgtacaaaccactatggcatctttctttgggcgtatcaactacaaattcaatgagaaatacctgatgactgtgactttgcgtcaggatggttcatctgtattggcaaaagatcatcagtggggggtcttcccatctgtggctttggcttggcgtatgaatgaagagaattttttgaagaacgtagaacaactttccaatttgaaacttcggctgagttatggtatttcgggaaacagtgctgtttctgcctatcagactcagggaggattgggaaagaccatgtatgcttatctcataaataatacggaaaacggagcctatggctactatccagctttgacaccgaattataatctgggctgggaaaaaacagcaacggctaatatcggtattgacttcggtttcttcaataaccgtatcagtggttcattggatatttatcaacaaaagacatcagatttgttgatgcagaagaaagtacctagttctaccggatattctttggcatgggataatgtaggaaaaactgagaataaaggtgtggaattagttattaatacccaaaatttcaatcaaaaggatttctcttggaataccgattatacatttactttgaacagagagaaaattactgagctggcagatggaactgaccgtgatatcagtaacggttggtttgtagggcattccatcaagacacattatggattggagaaaatcggtatctggcaacttgacgaagctgaggaggcggctaagtatggtgagaagccgggacgtataaaaataaaggaccagaataaggatggttcaatagacaatgataatgaccgtatcatcttgggctcggaaactcccgatttcgtaatggggttgaacaatacattcaaatacaagaactttgatttgcgcgttttcatgtattggagacaagggcaaatgttacattcggaagccaacggttacggctcataccgtattcagggagatccgggtattaaagtaaactattggactccggagaatcctactaacgaatttccccgtccggaaaaaagttattcggattcttccaaattagatgcattgggatacgtggatggttcgtatttgaagattaaagaaatcactttgggatatcagttgcctaaatcatggatcgggaagattcatgcttctaatatccgtatctattgttcattaaagaatttctttactttcagtcatttagacaattatgatcccgaacgaggaggctccttgagctatccgatgacaaaacaagcagtatttggtattaatgttgatttctaaacaagcgaacaggtatgaataaattatataaatggtgtttgctcagctgtatggcggcaaccttgagctcatgtaatgatttcctgacagaggaaaatcctagcggattgaccgctgatactttttataaaaccgaatcgggtgcggaagctctgattaactcatgttacacaccgttgcgtttttggtatggacaggaatatgccacatcaatgacagagttgggaacggatatatttacccggggaaatggttgtgccgaagctgagctttccgattataactcgtcattacaaggttccagcaatgcgataactaaagagtgggaacgtttgtattcggcattgaatacttgtaacactgccttgaaccgtttgcctagctctgaactttcagcttcggttaaagatatccgtatgggggaagcctatttcttgcgggctctttatctatggcatattgtagagacatggggaggtgtttatttaacgacagaagaatgtaccgagccgtcaggttacgtttaccgttcgtccgaagaggatttttatactcagattatagccgatttaaaagaggcgttggctaaattaccggtttccacttccgattacgggcgtgctaccaaaggtgcggcagaagcgtttctggcacgcgtttatctgtataataaaaattatgaggaagcgttgaaatatgctcgtaatgttattaacaattatgattatagcttggcagaagattattcggacctttgtgatatttataaatgtaatgatgtaaaagagaatgtgtttgtttgtatgtacacaaagagtgagatattcggaacttccattgaagaaggtcctgacgggaaccccatcatttggaggacaccgggtaataacccttcacatctgttgtgggtgatgtgttatgatcaggtactcgataaagacggtaagaaacctgttacgcgctccatagaatatggtcgcagtttcaacagatatatgcctacgctgtattatctgaacctgttcgatgaaaagatggatgcccgttatgatgatgtgttccagcaggcatggatttgtaacaatacgaacagtacttatatctcaccgggagatacggctattttctttactaaatatagtgtgtccgatgcagaggaagctaaacacgattatatcaccatagacaaggattttgtttacaatgccgatggctctgtcaagaatagggttcagaatgtgactttcaaaaaattccttgatccgtctcgtgagtcagtgaattatacgggaagtgtgagacatggtgtggtcattcgtcttgctgagttgtatctgatagctgccgaggctgaattattcttgaacgataatgcctctggaacatcttatatcaatgaggtaaggagaagagcagctattcccggcaaggaagccgccatgaagataaagccggaacagttgacattggattttattttggatgaacgggcccgtgagttgggaggagagcagcaacgttggttcgatttgaagcgtaccggtaagctgctggaaagagtaaaagcatacaatccggatgcgaaagtgaatataaaagagcatcatttgctacgtcctattcctcagactcaactggatgccattatcaataaagaagagttcgggcaaaatgccggttacaattaagtgtgcctgtcaggctgaagtttgatttccggtgaaggtgtatcttgatgattggcagagaagttatttagcttgcaaaagttggtaaataacataagttcgttttttaaaaaggtcttgttctttttttaaaatgaacttatgtttttaaaaaacatccttatcttttttgcataggaacttgtgtttttgtacatgaacaaaaaattgatgattcccacatatatatgtgtaacctcacgcggacgtatatatagtcctacgtgaacgttcatgaagtgccgcatgaacattcgtataaaacaggttgtctttcctcggaacattttccctttcacgacgggaggtttttacaaactgacagcataagtttagggagtttcttccattgtttccgaaagttatgccgttaactttcgggactactcctatcaatgcaaaaaacacattttatctctcatgctctcatcttttatcactttcccccgatgaataaagcgtttcaaaggtgagagatgaggtgagagatgccccaaaagatgagagcaactgctctcacaaagccaaaaaatgtcttgttatgcaatctgggaacagaacatctctttcttttcgggtcagtcaagatatatacatgaaactattgaattacagatacccttatagtcttgaattcaatcccggctgtcatatcgttgctatttttctcgaaaagaaaaggtaggaaaagacatattgaggtttccgataaaaggtgatgatagtgtcagcagagttaataattctgttgtgggactttccggcaaatgcagtctgtcagatgatcgttgataaaacctgaagcttgtaagtgggcgtagcaaattgtagttccgaagaatttgaaacctcgttttttcatatctttactcatggcatcggattcgggggaggataccggaatctcgctcaatgaccggaatgtgttgataatcggctttttgttgggaaagaataacagggtataattataaaaactgccgaactccttttgtacggcaaggaatagtcttgcattcgtgattgtcgctttgattttcagacggttttttacaatgccctcaaactgcattagccgttcaacgtcttcatcagtcatttgtgccaccagctcggcatcaaaattacagaaggctttacgatacccctctctttttctaagaattgttatccaccttagtcctgcttgggcactttccaatacaagaaactcgaacagcgtcttgtcatcggttactaactttccccactcctgatcatggtattttacatacaactcgtcagttccgcaccaaccgcaacgaccgtttgttatatcttgcataattctaacatttgtgatatggaacaaatgtagtgaattcatgacattatgccaaatttaaaagaactattttatacatatatgtaaattatcttacagtgtcaggagccgttcttgcaaaaatcttttggcagtactccaaattgtttttgaaaacatttggcaaaataggaagaagagttgaaaccgacaatatagcatacttcattgattctgtattctccggattgaatcagttgggctgccattttcaaccgttccagttgaataaactcattgggggtaatttgagcgattccctttatttttcgatgtaggctggaacggctcatattcattttctcggctaatatatccacattaaaatcgggttccgaaatgttcttttgaattacttctattagtttgtctaaaaagttttcatcagctttgctcagtgcaatggttttggcgttcacaaaaggtgatgaagtgaaagcatggcgcaatttgtcctgattgcttaataagttcgctatgcgtgccaataaatactccgtagaaaaaggtttttctatatagtcgtcggctcctagttctattccttctatcttagattgtatggtaacttttgctgtgagcaggataataggaatatggctgtgttcaatatcggtctttaatgtatggcataattcgaaaccatccatttcgggcatcatcacatcactgacaatcagactgattgtcttttctgatagcacttgaagggcttccttgccattagatgcacgtataacgcaatatacagtctccagttgtgcgcaaataaagttctgcatctcggggtcatcctctactacaagaatacagatgttagtgctgtgttgccggatggctgtctgcatattgccggtctggctgatagtggaatctttttgtaattgtatggctttttcttgatcgacaggaagctcgacacagaaacagatttcttcactatcctttaaataaagttttcctttatgtaattctgccagggaacgtgccaaaggcagtccgatgccggtaccggctgtgcgttgcccaccggaggtttgtttgatttgcacaaaaggctggaaaattttttcttgcatatcgtgggggatgggatgcccgtcattactgacaatgatggaaaaatatcctgattgtttcacttcgtatgacgggggaaccaaagatacatgaatggatgatatggcatattttactgcattactgaacagattacttaatattttagttagtgcctctttatctacgggtgcgttgaaatcctgttcgggtaggtctgtttgaaatttcaacccattctgttgggcggcgggattaaaacggatataagtatctcttattagttgggagatattgcaatccatgaagttaagacggaaccccttggtttctgtttttcggaagtcgagtaactgatttgtcaggtcaagtaatcgcagggtattccgttccatgacgtccaggttctcacggatggtgttacgatctatgttctccttatgcaggatgttctctaacgggccttttatcagagttagcggtgtgcgaatttcatgtgctatattagtgaaaaagtctattttggcatgataaatttctttttccttttcggcttctaaaatttctagttgtcgccgttgtctgtccgtgatttgttttcggaagcgatagaagatatatccgataccggcggccgaaagtataaaataaaggaaataggcccacagggatttccagaaaggaggtgcgatatgtatgtggatgcttttgatgtcattactccattcgcctttggcattggctgtttttacgcagaaagtatagtcgcctggttttagattggtataggtggcggtagaactttttgtggtactataccattctttgtcaaatcctttcaatgtatagctcagataattttcttcaggggcggcgtaacaaagagctgcaaaacggaaggcaaaagagttttgattatacttcaggtttatttcccgggtataggtcacgcttcggctgagaggggaatctttggtacctatgtctgcacttttgttgaaaagtaggaagtcggtgatggctacaggtggaaaataagtgttttcggtgaaggactcgggtttgaaggtaatgaaaccattgatacatccgaaatagatggtaccgtctttgctcttaattcctgaactataattgaactgattggtgagcagtccattgttgtctgcatagatgttcgaggttttggtcttcagatcgaaccgtatcaatcctttgttggaggtgagccaaagaatgtcattgttggcttctacaatcttatagattacatcattggcaagcccttgtgaagaatcataagtagtgaatatctctgtatcttgattgaatgagcagaatcctcgtcccagcatggtgaaccacaagcgttgcttgctgtcttcataaatacttatcaccttattgtaagggagtccgtggggaactccgggaatagaaacataatttttccagctgtcgtttctaggattgtatttgaatataccggagttataggtagcaaaccagatatttcctttactgtcttccaatatgttgaaaacaaagataccatccattttgtggatacgggtgaaatcatttgtttcatgattatagagattgagtccggttgtggtacctatatagagttgacctgcagaggtgcggcacatggaatagatgttgttgtcattcaacgtattttcggcatgtcccatcaggtagtgacgggaacggtgggtcttcagatccaatgagtataatcctttggaatatgtacctatccatagagtgtgattgtccatacttagagcgtggacattatagtgtagtcctgccagtggacaagagctgaattctttggtctttggattgaatttgtttaagccgccgtcttctgttcctatccatagatttccgtcttcatcttcgcaaaactcacggactacttttccgctgaggctgttttgtcctatgatgggatagtatttttcgaaagtggcatattgggtgggataatagtctatgcctccgaaatagctaccgatccatatgccaccttcgtcatccttgtagagggaataaatggcattgtctgacaaagagtagtcatcgttgggattgtaggtgagatgctggatttctcgggtttccttgttgtaggtatatattcctcgttctgtagcaacccacaatgtttttttgtcgataggatagatgtttcttacaaaaatactttcggtttgggaagagtctggcagtaagtcggtgactgtccgggtaaggatattgatgcttttcagaccgccttttgcagaaccagtgtacaaggtgttatgctgttcggggaaaattttgaaaatttggtcatcggtgaagaggttgtttccctcttgtgtttgaaataatcggaagttctgaaaatgatcatctgtataataaagtccttttccgttatagcctatccatactgcgttctgctggtctatacagatagaactgagcagatgggcatcggggatagcatagtgtgttaatgtttgtcggtcgttatcgaataggaaaacgccttgggactctactgctatccagatgtttttttgtgtatcggtagtaatttgtacaatgggctgggtgatacacaaactgtcctgacttttgcaggtgagttttgaaaaagtttccgtcaatggatcatagatataaattccgtcgtctgttcctatccataattttccgtccttattttcgtgcaatgagttgacgttattattacctaaagaatgggggttggaatgattgtgtttgaaaatacgaaaattggatccgtcataacgattcagtccgtctttggtgccgaaccacatgaatccgtttctgtcttgggtgatacaaagaacggaactttgagacagtttgtttttcagacccaaatgttggaaataatatctttcagcatgaacactgggggatgacaggctgaaaaggattgatatgagaaggaataagtgtttgtacatagtttgttttatcaggtgatttactatggtgcaaaagtagatatttggctgaaaaacacaaggggaaggcagaatattgtcctgttttggcagaatattgctctcttttcgtagagtagagggggtaaagtgctgtaaaaggaatgtggaaatgttgttttggcagaaaaatcatcttatttggatggatattcttgtagctttttatctaataagtctacttttgggctgtaattaaattaaatatcgaatatgaaaaacatgtttagtaaaggtgcacatccgtctgaatttggacatcgacaaataacgatgttgatgttgggcttgtttttactcgtttcccaatgcttgtttgctcagagcagaataataaagggaacggtatatgatgaacataaggatgcactgatcggtgcgtcggttattcttaaaggtacttctcagggaaccattaccgatatggacggtaactttagtgtggaggtaagcggaaagaatgctgttttggttgtttcttatataggttatgacgctcaagagataaatgtgggtggtcagacctctgttaaggtacagctgaaaccttcttctctggcactggaggaagttgtagtggtgggttacggttcgcaaaagaaaagtgagctgacagctgccatctctagcgtcaagtcttcggattttgtccgtggaaatgtgagggatgtgggacaattattgaaaggaaaaattgctggtcttagcattgtgaattctacaggtgaccctactgagaattcgtctatcttacttcgtggtactaactccttgcaaggtaacaattcgccattagtgttgattgacggtattccgggagatttgagaactgtagctcctgaggatattgctcaaattgatgtgttgaaggatggttcgtctgcggctatttatggtacacgagctaccaatggggtgattttggttactacccgtaaggctaattctgatttttccatagactataatgggtatgctggtacagaagagtttgtgaaaacagaaaaagtgttgactggagatgaatttcgttctttaattcaagatggtacaatttctgcgactgattttggaggtaatacagattggctggaagccataactcgtactccgatcaatcatgggcataatttgagtgtaaagggtggctccgagaagactaattatttgttgaatgtcaattataaaaagaatcagggaattttcaagaagtcagataatgaggcgttgattgtacgactggcggtgaatcattcaatgttgaatgataaattgcgtttgaacgtcagcgttaattctaatactcagaactatacaacgaccggagatggttcttctttcaatagaggagtatatagtgcggcattggttactaatcctaccttgcctatttataagcagaatgtaaataaggatgtcctgtcatcaatgccggaatatgatggtccttgggcacagccttcggctctggtggctatcgccaatccgctgagtactatcgaaacagctaatggcagacatcacagacagcgtaccaggttgaatggtaatgttacttttcagccaatcgagtcattgaaattcaatgcgttgttatcttgggatcgatataatgaaacaagaggctatcgtgaaacatttgataactttaatactacagtagctcattcccgtgacggtttcgcctccagaggtacctgtgagacaacagaccagttgtttgaatttactgctcagtatagtgaggtctttggcattcataatatttctgtattgggaggttatggctatcagaaaaatatatgggaggattattggatgcggaattggaattttcctacagaccagttcggatgggataatattgctttaggacgtggtgacagcgatattgccggtgctgctattcctattaatagtaataaaacgtcaggtaatcttattagttttttcggacgtatcaattacatattggcaggcaagtacttggctactattagtgtaaggcatgaggcagattccaaatttgtaggttccgatcaggtttggggtacttttccggcggtaagtttggcatggcggattaatgaagagaattttatgaaaaatatcaagtggattaatagcttgaaacttcgtgccggctatggtgtgacaggtattgctccttccaatccttatttggcaacctatcgtctgggatatacttcaaatagtgatactttttattataatggccaatgggtgaataaattgactccgcagagtaatccgaatccggaatttacatgggaaaagaaaaaggaatttaatgtggggcttgatttttctattctgaaagaccgtatcagtggtagtgttgatgcttattacagaaaaactgtagatttgttatataattatcctgttcctgttccgcccaatgtatatggcactacactggcaaatgtgggtactatcagtaataagggactggagatattgctgaacggggttgtctttaataaaaaagattttgattggaataccacactgacttattctactaataagaataagcttgacaaactgaataatagtaaatatcagttggcaaacgattatttttatgtgggtgacgcacaagcgcctatgtcgggagttcctacccatcgtgtaaaagtaggggaacctatagggcagatttggggttggaaagtattggatatcacagaagatggtaaatggatttatgaagaccagaatggtaatgctgtagagtctaaggatgtgaagatagaggatagaaaagtgattggtaatggtttaccaaagcattatttaggatggaataatgagttccgttataagaattttgatttgagcgttaccatgagaggagccttcggattccaaaatatcaactttactcgtctgcattatgagaattatagagatcaggcaatgaataatttgaaagctgggtatgaaaaagtattcggtaaagcagtgctgacggactctaagcaatttaatagttactatgtagaggatggtgattattggaaaattgataatattgtattggggtataatttcaagaaagattttattaaagggattaaaggaatgcgtttgtatttctctgttcaaaacgctttgactattaccggatataaagggcttgatccggaagtaggcggttcgcttttaactccgggtacagatgatagaaataaatatcccactactcgttcatatacctttggcgttaacttgaatttttaaattattagattgaagaacatgaaaagaagaataagaatagcattgatgtgtcctgcactttgttgtctgatgggagcatcattgaatagctgtatggaactggatgatagtgtatatactacgatcgtatccgataagtatcattatacggagaaagacatggttgccatattgggtaatgcatataccccatggcgttcggttgttattggagctatgaatgaaacgcagaccatttctacggatgaaactatggttcctgtacatccttggggatggaacggaactaccattaatatgcatttgcatacttggacttcggaaacgggtgaagcaataaatcggtggggagatttgtacaccggtataaataatgccaatcaggttatttatcagattgagtccggactgttgcctgtaacggaaggtaaggataattatttggcggagctaaaagcggtaagggcttcttattattatatgctttgtgattattacggcaatgtaccttatctgacccgttttgatgtccctcaaggttttcttcccgaacaaatcagtcgtaaggccttgaatgactctatcattgtagaagtgacagccgcccttcctttattaccggagaatgttgatgaatcgacttacggacgttttaccaaatgggctgcttatgctttattggccaagatgtatatcaatgcggaggtatatacgggaaccccacaatggcaaaagtgcctggatgcttgtgaggaaattataaaatccggaaagttctcgttggcgggaaatcagaaagatgtattcaaggctgataatgaggattgtacggaagctgtttttgcagttccttttgatcaaagttacgctggtggattgaatatattcaattacgctctaaacggtcagttctctcaggtatattccactaagagttttggtggttggggaggttcggttgctgttccgcaatttataaatacatttgatccggatgacagtcgtctgaccgagaattatttgatgggacagcaagtgtatcccgatggttccaatgtgttgtgcgagataggcaacagtcaggggattcctatgaatattgtaaatgtggttccgggggttgattgggctgaggaattacatggatatcatttggcaaagtatgagtatgttgccggtatgtctcctgatgctatgagtaacgatgttttccccttccgctatacagacatattgatgatgaaagctgaatgtttgttaaggactggaaaagcggacgaagcggcacaaattgtaacagaaatcagacaacgtgcattcaggtctactccggaaaaagcggtaattactggtgcggaactgatgggagggagtacctatgattatggattgcgtgaaacggcctatttggacaaaattaaaagtcctagaacaactcatgaaggtggaacagatataaagtatggtcgctttttggatgaattgggttgggaatttaaccaagaaggaagaagaagacaggacttgattcgctttggagtatggacaactaaatcatggctttctcattctgctacaaatgatataaataagaacttgtatcctattccaagagctgaattggataagaatggtaagttaaagcagaatccgggatattagtggattggtaatgaacagactgtccgaaaatctgtttagcgcttttcgtcatatgcagttccggacagtctttttcttttggtatttattcgaagtgatggcatgaaaatatttgccggttggctgttgtcttttcatggaattcaaggttgggtgtacttctatgtaaaatttgaatagaaaacggtatgtttaagaaaaaaagaaatatagggaaattgttattaggttcctttttgaccgtggctgtactgacggcatgtatggaggagaaaagggaaataaagatagatgtgctttcacgtcctgatacaatagataaaaatgtcagttatcagggaaatcgtttgcctttgaaaccattgcattttataaaattgccagtaggagctattgaggcggaaagttggctgaaaaaatacttacagctacaaaaagatggattaactgggaagctaggtgaaattagtgcgtggttggataagaaggacaatgcgtggttgctgtctggtggagatcatggttgggaggaagtgccttattggttgaaaggatatggtgatttggcttatatcttgaaagattctgctatgattgctgaaacaaaagtttggattgaagcagctattcaaagtcggcaaccggatggctttttcggtccggtgaatgaacgtggagggaagagagaactttgggcgaatatggtaatgctttggtgcttacaatcttattatgaatattctggtgataagagagtgctgactttaatgactgattactttaaatggcaactgactgttcccgatgataaattcttggaagattattgggagaacagccgtggaggagataatctgtatagtgtttgttggctttataacatcacaggagaacagtttctgttggaacttgctaggaaactccatcgtaatacagcagactggacaaatcactctgctttgcctaactggcataatgtgaatattgcacagtgttttcgtgaaccggccacttactatatgcttagtggtgattcggcagatttgcaggcatcttatcgagtgcatcatctggtgagacgtattttcggacaggtgccgggaggcatgttcggagcggacgagaatgctcgtttggcttatattgatccacgacaaggtacagaaacttgtggatttgtagaacagatggcgtctgatgaaataatgcttcgtatgaccggtgatcctttttgggctgagcattgcgaagaggtcgctttcaattcttatccggcggcagtaatgcctgatttcaaagctttaagatatattacttgtcccaatcaggtggtgagtgattctaaagatcataaacccggaattgataatggtggtccttttttggctatgaatcctttcagcagtcgttgctgtcagcataaccatgcgcaaggctggccttactatattgaaaatttggtttatgcaactccggataacgggctcgccgccattatttacggtccgtgttgtgcacaggcgaaagtaggggtaaacggtactgaagttattctgagagaagaaacaaactatccatttgaagaaatgattcggtttacagtgcaagtttccggtaaagtggacttcccattatatcttcgtgtacctgcttggtgcaagggggctacattaatagttaacggagaaaaggtagctgctggtatggagccaggtaaatatgttcgtttggatagaacttggagtaacggagatgtgataatcttgcaattacctatgtctttatctgttcaaagatggcagaccaatcaaaacagtgccagcgtgaattacggtcctttgactttctctctgttgatagaggaagagtatagaaaagtaaatagtgcagaaaatgctatatgggattctaaatggcagaaaggtgctgatgtcaatgcttggcctacttatgaaatctatcctcaaagtgcttggaactatgctttgaaattggatgatagggttttggagcaatgcttgaaagtcgagaagagagaatggccttcagacaattatccttttactgctgataatgttcctctagtgataaaagcacaagggagaagagtaccttcttggggtatagatcaatatggcttatgtggtgtgttgccggaagaaggggctccgaaaagtgaaatattggaagatataaccttgataccgatgggagctgcccgtttgcgtatctcggcatttcctgtaacttatgaataattttatattactatgaaaagactgttatttgtgattctattgacaattatgggatgttgcggtgtatatgtgcaagccgttggctacaaaaaaattattaatccggtattgccgggtgatcgtcctgatcctactgtcattgaaataaatggagagtattgggctgctgcgacttctaatgaatggtcgccgttgttccctatttttaaatcaaaagatttagtgaactgggaattggtgaattatgtttttccggatggagcacctgattgggcattgaataatttttgggccccggaattatcgtatgatgagaaacaggggaaggtttatctgtattatacagcccgtgacaagaggacaaagagattatcgtgtgcggcggcggtagctgattctccgatggggaggttcaaagatttgggaccgttggttgctcaggaaccaggctctattgatgcttttgctgcaagagatgagaagggtaaactttatcttatatggaaagaagacggcaacagtatgggcttgcctacaaatatttgggcacaggagatgacggaggaccgcacccgtctgataggagaaatgacttctttgttctgtaatgacactccttgggaggaagggctggtagaaggggtatgtgtttttaaaaagcaggattatttttatatcttgtattcggcagctagctgttgtgataaaaaatgtaattataaaacaggggtagctcgttccaaatctttgctgggtaaatgggagaagtatgaaaaaaatcccatcttggtagacaatcaggattggcgttgtcccggacatggtactatagttcggaaagatggaaaggagttttatttgtatcatgcttataataggagtggttcggtatatgtcggacgtcagggcgtgttggaggaattgtgttggggagaggatggctggccttattttaggaacgatgccgtttataatcgtcctaatttgtctttggattatgtggattcctttaagggtaatacactagctcccatttggcaatggagggtaacccagaaaatagattatcagacaggaaaaaacggattacatctaggagcatctatggaaaacagggaattgggtactctgctggtacaacctgttaaggctttgaatttttcgttggctgctactgttgataaccggaaaagtatggctgcggctggtatcagtattattggtggagctcataatggatttggcgctcctttagctggtattggcatatcagttttgaaagataaggtggaagtatggaaaaatgtagatggtaaagttgatgtcttggctcaaagcactataacggtgtcagcaacggcacaggtcaggatgactgtgaaagatgggtattggctttgctttgagttccggaaagggcagaggtggatacctttggcaacggaaatagatgcttcgccgtatgttccgtggggaatgggcttccgcataggtttgtgtgctaaagggggagacggaacctttgctgatttccgtaagattgaattgattcattgattgtgttttttataaaatctgttaccatgaaaaaatataggttagtattcgttttaagtatattgtttttaggagtgatcaagttgactgcatcggaatatgagcgggtgcgcaaagcacctcgtgtacatgttccggtatggcagtcatttgcactgtcggaagtagagttaaccgatagctattttaagaaagcgatggatttacataaaggatatctgctgtcgctggatgtagacaggctcattccacacgtacgccgtagtgtcggtttgcaggggaaaggagataattacggaggatgggagaagcatggtggatgtacctatggtcattatatgtctgcttgtgccatgatgtatgcttctacaggcgagaaagccttgctggataatttgaattatatgctggatgaactgcaagaatgccaaaaacagaccccggatggttggtttattaccggtaaaagaggaaaggagggttatttgcagttgcttcaagggaatgtggtgcttaaccagccggatgaaaccggacaaccttggaattataaccagaatgggaactcgtggtattgtatccataagattttggcgggattgagggatgcatatgtctatgcaggttgtaggcaagccaaggatatattgatgcctttggcggattttatttctcatatagccttgaatagcaatagggatctttttcaaagtaccttgagtgtggaacagggggggatgaatgaagtttttgttgatatttatggtattaccggagataagaaatttttgcagacggcagaaaggttcaatcatatcaatgttatttatccgattgctaacggagaagatgtgttattcggtcgccatgctaacgatcaaatacccaaatttatgggagtagctagagagtatgagttctcacccaatgatatttattatcaggctgcccgtaacttttggaatattgtaattaaagatcacacattggctatcggtggaaatagttgttatgagcgttttggcgtaccgggtgaagaaagcaagcggctggactatacttcggcagaaacttgtaatacatataacatgttgaaattgtcaagacagttgttcatgttggatggtgattataaatatctgaattactatgaacatgctttatataaccatattcttgcttcacaagatcctgatatgccgggctgtgtgacttattatacttctttgttgccgggatcatttaagcaatatagtactccgtttgattctttctggtgttgtgtgggtacagggatggagaatcattctaagtatgccgaatccatttattttaaggataaccaagaattgctggtcaatctgtatattccttcacgtctccattggaaggaaaaaggtttgaagctgactttgaatactcgtttcccggagtcggatacggttacagtaaggatggatgaaataggaagctatacaggaacgcttctgttccgttatccggattgggtgagcggtgatgctgtagttcgtattaatggagagccggcacagacggaagcacataagggaagctatattcgcctgttggattctgttaagagcggagatgtgataacattggttttcacacgtaacttatatattgattatgcaaaggatgaacctcatttcggctctgtcatgtatggcccgatattgcttgtgggaggattggggacggatgatatgcccgaagatagggttattgataatcgtgcttgtcgtgaatcgcttccggcaaagaatattcctatgttagtgggtccattgaccgatctggatagctggatacaatgttcttcacaacatcctttacggtttacagtaaagaatggaggtggacaacaaggggtagggttggtcccttattttcaaatgcatcatcagcggcatactgtatattggaaactttattctccggatgaatttgtttatcgtactcgttctttaacggatgaagtgaagatcggtgatgagaaagatgaaaggaaacatgcgttgcaaggggagaatgattctatttattggcatgattatttttgggcaaagaatactcggttccgtatggcaaaagacggatggttttcttacacacttcatataaataaaacggaacaaaaaccttatcatctgatttgtcgtttctggggagacgagcctgatacttgtcagtttgatatattgattgacggcaactatctgcgtactgtcagtttgaatcgaaaactatatctgacctatgtggacgatgtgtattctattcctgcggactggactcgtggaaaggataaagtgaatgttactttccgtgctgctcaagggaagaatgccggaggattgtatgaattgaaaattacttcagatacgaattatagataaactttaaatatagattaccatgaaaaaaacgttggttatattattcgtcgccggggttcttgccgcgtgtaagtcgacggatagcaataaatctgattatcaatacaaggatgtaccttttaccaatgtacacttttctgataatttctgggcacctcgtattgaaaccattcgtagtgttaccgtgccttttgcttttcataaatgtgaggaaactcatcgtatagataattttgcagtagcggggaaactgatggaaggaaagttcaattccccttatccgtttgatgattcggatgtgtataagataatggaaggagctgcttacttgttggcggtgaaggaggataaagcgctggatatgtatatggacagtctgattcatctgataggagctgcgcaggaaccggatggttatctttatactacccgtactattggtggggattcgcaacatccgtgggctggcagtaaaagatgggaaaatgaacgtgacaacagccatgaattgtataatgtaggacacatgtatgaggcggctgtagctcattatctagctaccggaaaacgttcatttcttgatatagccattaagagtgcgaatttgttgtgtaatacctttggtcctgaagaagaaaagattactgtagcgccagggcatcaggaagtggagattgggctggtaaagctttatagggtgacaggagataaacgttatttggatttgtcacaattctttttggaggctcgtggaaagtatgacaaatatgatcggaatagtgaggatcagttccgtaacggatcttattggcaggatcataagccagtcattgctcaggatgaggctgtaggccatgcagtgcgggctacctacatgtatgctgctatgacagatatagccgctttgaaaaacgagcggcattttgaaaatgctgtgggtaaattatgggacaatgtagtagggaagaagatgtatattaccggagctattggttcaactcgtcatggagaagcgtttggtaaaaactatgagttgcctaatagtacagcttattgtgaaacatgtgcttctattgccaattgcatgtggaatttacgcatgttcatgctgcatggtgatgccaaatacattgatgtgctggaacgttctttgtataacggggtgttgagtggcattagtctggatggaaagaagtttttttatccaaatgtcctctcttgcgatgaaaatggctcagagcgtagcgaatggtttgattgttcttgctgcccttctaatctagctcgttttattccttcggtgccagggtatgtgtatgccacttcttccaaaggattttatgtgaatctgtatggtgccaaccatgctgatgtagttctaaagaatggaaagcatgtacaggtggaacaacaaacggattatccgtggaatggaacgataaagttgatattgactccggaaaccccggaagattttgctgttatgttgcgtattccgggatgggtaaatagtcagcctgtaccttccgatctttatacttataccaggcatgataaaggagccgtaaaaattacaatcaatggaaaaccccgggattttgtaatggagaaaggatatgccgttttatccggtagttggaaatggggggatacaattgaactaagtcttccgatggatgtccacaaggtttcagcaaatgataaggttgctgcggatgtgaatcatcttgccgtagagcgtggcccgatagtttattgtgcagagtttgctgacaatggagggactgtattgaattatgtgctgaaaccggaaacggcttttgaggctgctcctgcttctatgttgggaggtgtggagatattgaaaggaaccacagaacgcattattgccgagaatgattttaaggaaataaagtctgtgacagattctatcctgcttattccttattatgcacggtctcatagaggaaatggtgaaatggctgtgtggcttccttccgatgaaaatatattgaaagatcagctaaaagaacgtgcccgtattacggataaagtttttatcggtaaagaaagttcggaaactgcgcatcagttgaaaggtgagaatactcatacgggaggaccaaatacatggcgtgatgcctcggatggtggatggttttcatataccctgagggtagatccggttcaaccgatggaattggttttgacttatagcagtacagatggaggaaatcgtgaattcgagatatttgccgggcatgaaaagataggggagcaaaaattaagggtggaaacttttagtgcatggattgataaagtgtatcctattcctgttgatttaactcaggggaaaagtcatgtaactgttaagatacaggctttgcccggtatgattgctggaggcgtgtttggttgcagaatgcagaagcaaaaaaaataggcctatgaaacgctatattatgaccaccggattgatgtgtatatgcgtgttttgttctttagcccaaaaacaaatgatgtatggagatacaagccgtattggaatacctttttctaaagatcctcatgtagtggagttccaaggtaaatatctgatgtattattctattcctccaaagcagaatggaaacgcggaagcgcaaggttggggaataggcattgccgggagcaagaatctgaaagattggcatcgtattggagaaatcatacctcaaacagcttatgagtctaaagggttatgtgctccgggtgctttggtaagaaatgatacggttcatctattctatcagacgtatggtaatggtgctaaagatgctatttgtcatgcatggtctgaagatgggatccattttgtacgtaatgctacaaatcctattttttctccggaaggggagtggaactgcgggcgtgccatcgatgcggaggtcgtttttttaaaggatcggtattatttatattatgcaactcgtactcctgattattctacccaaattataggagttgcaatggcacctgcacatacggatttttcgaaacaggcatggaagagtccggtgaatcatccggtgcttgttcccgaatatccttgggaagagaagtgtgtcgaaggagcatctgttgtgcagatgggagatgagatgtttatgttttatgccggggcctataataatcgtcctcagcagattggagttgctaaaagtagtgatggtattcattggacaaaactttctaataaaccctttctgatgaatggtgatcctggaacatggaattgctgtgagtccggacatcctcatctctttaaaacaaggaaaggaaaaacatatttattttatcaagggaatgatgactttggtaaaacttggtttctttcgaatatggaggtcaaatggaagaatagacatccttttatcgctcattatataaatcaaaaagcacattaaatatgaagaaaatatttctttttctatataccttattggtcttttccggtgtatacgcacaagaaaacaaggtaaaggtggagccggtgaatggagataaaatttctttgttctctttaaaagaagtccgtttactggatagtgattttaaacatatcatggacctgaaccacgcctatatgctttctttggaacctgaccgtttgctgtcttggtttcggagagaagcaggtttgacacctaaggcacaaccctatcctttttgggaatctgagtatatgaacgggcatggacctttaccgggacatattatggggttttatctgtctggaatttctatgatgtatgattctacgggagatactgcaattctaagtagattaagctatatcttggaggagttatctctttgccagcaagctggaggtgatggatatttgttacctactatttgcggtagagctattttcgagaatgtgctggatggaaatttcaagacttctaatccttttattgagactccttatgacaaatgctgggaacctgtgtatgtcatgaacaagatcatgttggggctttatcaggtttatatgcgatgtgatttattacaggcaaaagaaatattggtaaagatggcagactggttcggctattcagttattgacaagttatcacatgatgatcttcaaaaattgttggtgtgcgagcatggctctatcaatgagtcttttatagatgtttatcagataacgggtgaggagaagtatcttaagtgggcacaaagactcaacgatgaggatatgtgggttcccatgtctgaaggaaaggatatattggagggttggcatgctaatacccagattcctaaatttacaggtttcgaatctgtttatcgttatgatagtaatgaacgttttaccacagctgcccgtttcttttgggatacagtagtgagaaaacatacttgggtgatgggaggtaacagtacaggagaacatttctttgctcctgaggaattcgagcatcgaatagaattgaacgggggacctgaatcttgtaattcggttaatatgcttcgtctgacagagagtttatattgtgattatgccgaggtggagaaagtggattattatgagaaagtcttatttaatcatattttggccaactatgatcctgatcagggtatgtgtgtgtattatacttccatgaaaccgggacactataaaatttatggaactaaatatgattctttttggtgttgtaccgggacggggtttgagcaaacagcaaagtttgggcaaatgatttatgctcatacagatgatgccttgtatgtaaatatgtttataccatcggtagttacatgggataaaggaatcagtattcatcaggaaactgcttttcctgatgaaggtgttactagtcttactgtttccggagaggctgtttttaatttaaagatacgttgtccttattgggtgggaagttcgtcactcaatgtaattgtaaatggtaagagagagaaaataaaggctggtgtggatggatatgtttcaataaacaggcagtggaaagatggagataaagtacggatagagctacctatgaaattggaaatagtgcctttgaatgaggcgactcattatcttgctttgaaatatgggcctattgttttggcagctagaattagtgacgagcatttatcgaaagatgatttcagatctgcacgttctactgttgctatgaaagattatccagtgatagatgtgccggcttttataggggatatccggaaaataccggctgctgttatccggaaaaaaggagagaagctggcttttttgtgtagtaaggataatgtagtatccaagcctgtagagctggttccttttaatactattcactggagccgctatgccgtatattttcggcattatgataagaaagagaactatttggccgagctgaagaaatcggagcaatttaagcaagaagaggataacttgaataaaagaactgtagacagggtcattattgcagatgctgaatctgagaaaatgcataaaatggaggcagtaaattctacagctggtgagaattggcgggatgcttctaaaggtggatattttatgtatgaaatgaaagttcggaaagagatggaacagtctgtttgcttacagcttttgggaagtgattcgggtaatcgtatttttgatgttttgattgatggtaaatggatagatactattgatttgtctaaaccttgtaaagaaggaaaaggactgtatagatgttatattcatattcctgctgaatatataaaagcaagaaaaaatgtaacagtgaaatttcaggcaaagaatggttgtatagctggggggatttttgatgtaaggattgtgtctgccatttcggttcaagacatgtaaataagagcagctttcgtttttaaaacattctccatagttcgactgttctaatgatagtacaaacagaaaaaataatgattatggaaaaatattttattcatagcaatgaactgcatttgattgatgtggataaaattcatcaggcagtggaaaggatcgtggactcattggatatggctgccggatcaacttgtcattttgatctttataaagtggtggaaacctattttaaagatttggataaaagaagggaaataaactgcttattgggtattgtggatacggaggaggaattggaggaaaagatggaaggcttttgaaatctattttttaatttgttttctattctttatctatttttactgggtgaagataagtcttcctttttcatactatttctgtttataagacagagatggttttaaagtttgtaaaggcagttggttcatactgaaccgactgcctttttatctgagttctattggtggttcttgggaaattatatattaggagtaatctcatagtatagggttatacatgattctttattctgaaaactttatttaattcttaggtttttgtaagtttgctaaatgaaatctaatagaaaatagaatgaaaacatttagactagtattcatgattctgataatgagtggattaatatttcaggggagagctcatgtctgttgggacgatctagagttcaaacagttttccactcctgaaggattaccgaatagcatggttcaccaagtgtatcaggaccgtgacggatatatttggattcctactttctatggattgtttcgttatgatggttacgaggtacgtacctataaatcaaatctttatacccctggtcttctggttaataataatgtgctttgtgtggaagaagattattctcaccggctttggattgggactcacgagggactctgtatgcttgataaacggacagggaagatgaaaaaattgcaactggatggagtcagcaaacaacggctgaatgaaattcatgtaacaaaagagaaccgggtttatctggggtacatccgtggaatggcttattatgatgaaatgcaggatacattggctttgatgactcggaagaattgtagaggggacgtacccgaatctgtgaatattcaaactttgtttgaggatgtaaatggtgatttgttgataggtacctggaaggatgggctttatcgttattgcataaaggaaaatatatttttgcactatccgcctttagatgaagagaactctgttttggctttgtttcaggactctagaggggtgatgtggataggaactagtgggtccgggctgtataaggcccatttttcatccgataggaaaacggtttcttttgaaggttatagacatgatgcccgaaatgtttcttctttgccgtctgattatatttattcgattcatgaagatttacagacacgttcgttatggttgggtactagagagggtgttagtgtgatggaactggctgatgagggaaagtttatcaattatcaagaatctggctctacacattatcttcctgtccgcgaggtgaacacagtctttagggatcgaagcggattaatgtggatcggtactaaaggggctggtgtctttcatgtcgatactaggaaacgttcctttaatgtaatttatcctcgtggcaacgataaatcttttacagatttgatttctacattgtatgtggaagaaaatggagctctttggataggtatgggctatggattggattatcagcatggagatgaaaaagtgacattgtttccttcgaaacgtccttatcatatttcttatagcccgttaacccgtgaggtgttgcttgctgtgcatgacgaggggatgatagtttgtcgtgatggacaaataatacatcagtataagacctcgaattgcggttttgttcctcatgatttagtgtatttagttcacgaggaccgtaagggaaaccgctggttgtgtacctataaaggacttggagtgcgttaccgggacgggcgtgagtattgtttcaatcgtttgtccagagcagacgaattgcttggccgggagatgaccacgatggttgaggataatgacggctcattatggttggcaaccaacaataatggtattgttcatgttacaggggatatggaacgtccggaatcgttgcagtgtaagaactattgtatggagaatggtttgctgtcggttaatactcctctttgttttttgttggatagaagcggacggatttgggtcgggacagagggcagcggactttgtttatatgatgtgcaaaatgattgtttcaagtctgttcataaggagtttaatttgcccggagatatggttggcagtatgcaggaagataatagtggtaatctgtggttgggcaccaatcaagggctggcaaagctaaccatatccggaaaggaaaagggcagggtacgtatctttacagttgccgatgggttggcggataatttctttaatcaaaatgcttctttctatcgtgatggtaccttctattttggatgcagcaggggaattgtgactttcaactcggaagtggtggaagagaaacatgctgatatttctttatgcataactgatatcttggtggatggaagaccattggaacagatgtcggataagaaaagaaaggagataactccttttacttccgattttacagacagattagttattcctgcctcatattcccattttaccatttgttttgcatcgctgacttataatcgtccccagcaaaataaatatgcgtacaggttgcaaggctttgatgctgattggcattatgtggacgcttccagccggactgcctattattccaaattgcctgcaggggagtacgtgtttcagctacgggcaacgaatgagaatggtgattggggtgacgtgagagaaatggaaattattattgaaccacctttctgggctacttggtgggcttattttatttatgtattattggctatactgtttatggtattgatatggtgggagattcgtcggaggctgttattgcgtaatcgtaggtttttgcaggaaggtgagacggacaaggtgcatcatctaaaattgcagttctttacgaacataccttcggatgaagaaaagtttttgcaggatgctgtcgcctgtgtgaaccgtcatttggatgatcccgattttgatgttccgcagtttgtagatgagatggcaaccagtcgtacaacgttgcataagaaattgaaatctttgacgggattgaatacaactggctttgtacgtagtatccgtctgaaggcggcttgcaggatgatggatgaaaatccgaatttccgcatttccgaactggcttataaggtcgggtttaatgatcccaagtatttttctatctgttttaagaaggaatttggtatgcagcctacagaatattcgatgaaatcgggcaaaaacgcttgaacatgccaaggtggacaaggttgaaatatgttcctaaaaggtggagaaaacatgcttcaaccttatcgggagatgcttcatctctgtaaaatgaatagctgattacttttgtggcattaaaactttaatgtctaatttaaaaaggttggctaatgaaatctaatttttatggaaacagaaaatcgcttcttgcggtttttatttgtgcagcttttctttcaggaagtcatgttgcttatgcggtaaatgaatcgttattggtttctgcgtaccagcagcctagtaagattaaaggaaccgtaatagatgcaaatggtgaggttgttattggtgccagtgtggtggtgaaaggaaccgctaatgggactataacagatattgatgggaactttattctttctgatgtccctaccaatgggacgattcaggtaagttttgttggatacaagactttggaaatcccagttaaagggcagacttctttcagtctgactttaatggatgataccgaagtattggatgaagtagtggtggtaggttatggtaccatgaagaaatcagatttgacaggttctgtaggttctatatcttctgaaaaactcgctgctagaggtactacccgtttggaagatgcattacaaggtgcggttccgggagtaaatatcactcaatccaatagccgtgcgggtggcggatttaatattcagatacgtggacaggcatctataaataaacaggctgctcctctttatgtaattgatggtattgtgtgctcgtctatggattttttgaatcccgaggatattgagcgggtagacgtcttgaaagatgcctcgtctactgctatctatggctcacgtgcttctgctggtgtgattatgattacaaccaaaggtgcgaagggggcaggaaaacctcaacatgtttctatttcgtatgatggatattatgggatacgtaaggttgcccgtatgcctgattttatgaatgctcaagaatttatagattatcgttttgcacgtcatactcttttaacatcagatgtctttgatggttctagtcgtaaaggagtagatgcgaacggtattcctcattatgaaattaaacaatctgatttggaaactacgtttctgaaacgtgatggtggtacaaactaccgtgattcccaaatttatgagatgatgatgtcgggaacagatggttatgactggacagacctcgtaactcggacaggtaatcagcagaatcattatatcagtgccaacggagccacagaaaaaattaattatcggttaggagttggttatcaaggggaagaaaatgtgttcaaacataatgattattcccgtttcaatatcaaaggtgcttttgatggaaaaatttccaaagtatttgaagctggattatctgtgaatatggcttatacggtgcaagatgattttagtaccgatggaacttattgtccgtatgaaaacgctttttatttcaatccttttgttgcaccttatgatgaaaatggtaacattatcaataatccagggtcaaaggatgcttttgggtctaccggacaattcacttctactgttagcccactgaatgatttagaggatgaaaactatactaatcaaactcgcaaatttcatgtctttggcaatgtatatttgcgtactaatataatggatggattaaaatttgcgactactttttcacctaacttttatcatgggcgtcaaggaaagtttaatgctactggagtgaatgaccgtaatccgctaggttccaattattatcaggtgaacggaacgaactctgcagaggttgagacgacagaccgtatggactggacttgggataatcagcttgattttaataaaacaataggtgatcatacgtttggcgcgatgggtttattctccatatatcgttctgataaagaaatttatagattgaaaggctttggtatttcggatgatatgctttcttttcatgccttggataaggcttccggtgataaggagatagcttcttcctatacagcatctactttggtctcaggagctcttcgtttgaattattcatataaaggtaagtatatggcgacagctacagcacgtgctgatggttcttcacgctttgcagaaggtaaccgttggggatggtttccttccgttgctttggcatggcgtatgtcagaagaaagttttttaaaaggtactcattggttggataatttgaaattgcgtttgtcttatggagttactggtaacaacaatgtggatgattatgtgacaatagctacagcttcaggacctagttatgtggtattgggaggatcggaaatacaaggatattaccctaatgggcttgttaatacgggactcatttgggaaaaggtaaaagagtttgatttaggattggattttagtgcattgagtaatcgtattaatctgacagccgatttttatcatcgtttgtctgatgggcagattatggataggattgttcctgttgaaacaggtgaaacaaaagctacttttaatgtcggttcagttcgtaataccggaattgaattaggaatgcagtttggcattattcggagtaaagattttatatgggatttaagtgtgaattattctcgtaactggaataaaatattggaacttagtaatgggaaagtggatgaaattgcatccaatcgctttattggtgagccgttaaatgtattgcgtgactatattcatactgatgtgataactgataaaggggtaacgatgcacactaaagatggggatattcattatactttgcaagaattgtatgcaaagtatggttcgaaatataagtggtatgaaggtcagatagctgtgaatgattggaataatgatggcaagattacggatgaagataagcaaatatatggttgtacagatcctaaatgggtgggaagtttaagttcaaatatgtattataaaggtttcgatttctcagtaatgatttatactaaacaaggacaatgggctcgtagttatttccatgataaatatatgaaatggtctgatcgtggtaaccaacatatggcaatggatttttatattcctaaaggggcgcctgttattgaccatactaccggtgatattgtatatgccactgaaactcattacggtgaatatccttatccgaataattccgatacttcggcaggtggatatttttctgataaaggtagcgcgaagggagaaggctttcagtatcagaagacttcttttgtaaaggtaaaaaatatctgtttgggatatactttccctaagaagtggattactaaagcaggattacagcatttgcgtctttatatcaatgtgcttaatccattttgttttacggattatgatggatttgatcctgaatgggcaaatgctaaattaactgatggtggtcctgcatcggtaacttatcagataggtgcgaatattaagttttaatttcaaaggaaaggtaaatggtatgaaaaaatatatatatacggcagtcatattggttggctttgttttgactacaagttgtgaagattttctgactacagataataagtcaaatgtaacggacaaagaatatttctcgactaagacaggttttgaatctttggtatcaaatgcttatagtactttacgagatgtttatgcagtatccagttatactacttattttaatgcaggtacggatatgtatgctgatgggcgtaattatatcaatgatgagttgcatgaatatgaaactttaaatcctgaaaacagtgtgatgaaagagctttatacggcatgttataaaggtatccgtgcggcttatgctataaaacattatgcggcggatgcagttattgatgagaatttgcgtagcaggcgtgtggatgaggcacgagtattggcggcgaattattactatatattggtaaatactttcgggggggtacctttgatgaaagattatgtggctgatgttcaaaccggatatcctaaatcttcggtggttgatgtttacacttatattattgaggaattggagaatgtaatagctgccggagctatggaaaagtctaccgctttggatggtggtggtcgtataagtattgaatcggctcgtgcgttattagctaaaacttatttagcagcagcttgggatttagataaaaaagattactttgccaaagcagcccaagtagcagatgacgtgatagctaatcgtgctttggttactcctttcgaggatctttggagagcggattgtagtggagatgataacgaagaatttatttgggatgtggaatatgactatgctacggctgctaatacagtcagtggtgggcatccgtggagttccttttattgtaatcatatgggggggcaagaagatcatggaaaggggagtacttctgcttttattgcgactttacatgctttgcagtgttttgaaaaaggcgatatacgctatggggtaacgtttatgaaggagttacctgatattgttactgcatccgcttattggtattgggattggtataagaatggtggaacttttataggaattcctttgaaacgttactatccggcatggtatgaaacagaagaagatatcgatgcatggaaagctcttgatcctgaaaatcgtaaaaatacatggatactaccgatgtctgatcatacacgggatcctcaagaatatatgcctggagaaattgattatgaggaattcgtaacctattcttatgggggcgctccttgtcgtaaatttgatgattctaatactgctagttattctaataaaacagattatcgtgatgtacatattattacgcttcctgagatttatttggtagcagcagaggcttatttaaaagctggtgataagggaaatgctttgcttcgtttgaatgaagtgcgccgacgtgcacggcttgatgcggtaactgaaataaatgtggatgttattttaaaagaacgtgcttgtgagttatttggacagggatctcgatggattgatttaagacgtacacagaaattggtggagtataatgatttatataatcctcagataaaagggcgggccgcacaaatgattggaaagaaattacttcgtcctattcctcaggcggcgattgatgcgaatgagttgatgagtgctgaagatcagaatccagggtattagtaaggtgattagatagtattgagatgtgtttaggacggggatgttatgatatatggcatcctcgttattaaaaaaatcaattaaagtagaataactgatgaatgtgaaattaaaaagggaaagtcgattattgattatggctataaccagtgtagctttgtttgtgcatattgtagtgatttgtgcagctagtacaagagaggttgttgccaataaagaatttgtttggtataatggtaaacgtcctattacttattccttgcctggatctgtttctccagtagtgacggtagcactggatatgtttaagggtgacatgcaacaggtgacgggggtattacctcaaaaaactcttttcggaacggcggttattaatattattcagttggataaaaacaagtctatcctaagagatctccgtaaagacggaatcccggtggatagtattgttgccagaaaagacgctttttttataaagataagagaaaatcagttgttggttgtaggaagtgacggtcggggaactgcttacggcatacttgaactttcccgcttggcaggagtgtctccatgggtatggtggggagatgtaacaccgatgagaaaagagcgattgacccttccggctgattattctacttttcagagtccatcggtagagtatcgtggaatctttttaaatgatgaagactggagcttgcagccttggagctggaaaaactttgaaccgtctgatataaaaggacgtattggtgcacgtacttataaagaaatcttcaaattgctgatgcgccttcgtgccaatgctatttggccgggaatgcatggaattacgactccgttctactttgtgccgggagctaaagaagcagctgacagttgcggcattctcatcggtacttcgcattgcgagccaatgatgcgcaataatgtaggtgaatggaaagtcaatgaacggggtgactataattacataacaaaccgtgaaggggtacaatcctattggatagaacggctgaaagaggctggaccttatgaaaatttctacaccatgggtatgagaggtattcacgacagtggaatggaaggggtcaagacccttcaggaaaagaccgatgcactgcaacaggttattgacgaccagcgcaagttattatcgaagtatgtagataaagatgtggagaaaattccccaggcttttgtcccctataaagaagtgcttcaaataatggagaatggcttgcaactgccggaagacatcactttgatatggtgtgatgacaactatggctatatgacccgtttaagtgacaaggaacagcaaaagcgtaacggaggtgccggagtgtattatcatctcagttattgggggcgtccgcatgactatatgtggttatgcactacccagccgggattgatttatagtgaaatgaaacaggcatacgattgcaatgcccgccgtttgtgggtggttaatgtgcacgatttgaaacccgcggcatacgatttggaactctttctggatatggcatggaatatcaattccgtatctccatctactcttgtggagcatcagaagagctggctttgccgcgaatttggcaaagaagcaggagaaaaattattgcctgccatgttagagttttatcgcctgtgcggcatccgtaaaccggaatttatgggttggaaccaagtggagctggacaagaaaaaatataccaaaggctggtctccggttaaaaatacggactttagcttaaccgaattcggcggcgaactggatcgttatctggaatcctatgaagccattaaagagattttatcggaagtggaaccaatgattcctcaggaacgcaaagatgctttctttgcccaaattaagtatcctgtatttggcgctgctgccatgagcacaaagatgctggaggcacaaagagcacgttgcatctctccgggaagctgcgacacgactttatggacccgcgaaagtcaattaatggctgcctgtgccaaaagcattaaagcttaccaggaaatccgcgatttgacagattactataacaatgaactggcagatggcaaatggaaatactccatgtgccataatccgcgggatttatatgtgttctatccgcctaaaattcccatatggctgacagataaggaaatagagaaatatgcttcttttagaagaccaaaatcgttacctttggaggaagtggctaaggatcattgtattgtttctaatgcttgcgattatacaagcgcatccaaaggggtcgtgacgattcaatcattgggacatagtatgaatgctgtttccgtaccaaagggaaagtcaattacttttgagtttgattgtttatgggatggagaggcgatactgcgcactgccgtaatcccgacacaacctaatgataaaggagatattcgtttcagtgttagtatagatggtgaaaagcctcggatatgttctattaaagagccgtttcgttcggaaggatggaaacagaatgtactccgtggacaggctgttcgtgaaactggtcatcaattgacgaaaggaaagcatactttatccatcactgctttggatgatcatgtcctgatagatcaatggatgattgatttcaaaccagacagaatgttctatgtatttccagttcaaccaacctattaatgtagcatgaattgtatgaagaaaattattggactgttcattattttattatgcttttgcacgacaaaagctcaacagacagaagtgaggtatctttccggtacaggaccggatcatactgtgaagtggaatttctggtgctcttcaggtatgaactctcaaaagtggagcaagatagatgttccgtcttgctgggaacagcaaggttttggaggctatacctacgggcgctattatatttataaggaacacgagaaagaaaagcaatatgatgcctacagggaacatgatttttgcgatgaatacggcatctatcgtcattgttttgatgttccggacacttggaaaggcaaacagataagtattgtatttgaaggtgttatgactgatgctgaagtgaaaatcaacgatgtcatcgctggccctgttcatcagggatcattctatcgtttttcttatgatatcacggacagactgaaattcgggaaaacgaatttgatggaagtgacggtgaagaagcagtcggctgataaatcagttaatgcagcggagcgccgggctgactggtggcttttcggaggtatctatcgtcctgtatatctgacggcaaagcctcgcacgcaaatagaacatatagcggtggatgcccgtgctgacggtacgttgcacacagatgtatatttgaaaaatatttccaaaggacaacaattggaactgtcgctcatttcctgtgattcacagcttcctatagggcggcaggtatgcgggctttcgacggaagagaaacagatacttaccacacattggaacaatatcaggacatgggatcctgaacatcccaacctttaccgactcacgatgcgtcttctttccacaacaggagatgttgtgcacgagattacggagcgcataggattccgtaccattgaattccgtcctgaagatggcgtatatctgaacggtactcgtcttttagtgaaggggattaaccgtcattgctttgatccggaaacaggtaggacaatcagccgggaactcagtctgaaggatgctttgctcattaagcagatgaatatgaatgccgtgcgttcacattatccaccagatactcattttttagaggcgtgtgattccataggtcttctttatctcaatgaattatgtggttggcagaatagctatagcactgaaatagcagaaaagttactgcctgagatgatatttcgtgatgtgaatcacccgtgtatctttgtttgggcaaatggtaacgaaggaggatggaatactgctgttgacaatcgttttgccgactatgatccgcagaaacgtcacgtcattcatccgtgggcggatttcaatggcttggatacacgtcattaccctaatggtacggataacatgtatcggttggaacgcgggcataaggtttttatgatgacggagttcctgcatggcctctatgaccgtggacagggtgcaggcctcaaaggactatggtcaaagtttaaggcaaatccactttttgccggtggcttcctttgggcatatgtggatgaagctgtccgccgtacagataccggacaaatggacacttacggtcctaatgctcccgatggtattgtgggggcaaatcgcgaaaaagaaggcagtttttatactgttcgggaggtatggtcacccattcaaatacatccattaaaaataacttcttctttcaaaggagatttttatgtaactaacgattacttattcagcaacttaagcgaatgccggatgaagtggaaggtaatgcgtttacctattccacaggtgtccgacagccccatctgcttagcggagggcggcgtactgttacctgcgattcagcctggcgagaaggggatagcccactttgatttgcctgagaaattcttcaatggagacatcttggaattggaagcctacaatgtagcgggagatatgatatgtaattggacgtttcctatcaagaataaccgtaagtactttatagaatacaggtatttacaaccgacaacaactgctactgccagatatcagacagacgacaatagtgttacactgatagcgaatggagttacagcaacattcaacaaagcgaatggtaatttggtagaagtgaagaacggtagcaagatcataccattgtctgatggtcctctcccggtcgggatgaagatgcttttctgttctgctaacctaaagatgcaaggtgatactgccatttataccgtaaaatataaaggtgcggccgactccattgtctggagaatggcacctgacggattgcttggaatggatgcattagtgctgaattacagagcaaagaacaagtttgacggtgtatactttgaccgtccggttcttaatttcggtttttcattctcttttcctgaaaagaacatcagtgggatgcgttggttaggcaaaggtccttaccgggtatggaagaaccgtatcgaaggaacgaattatggtatttggcagaaggactacaacaatacggtgacgggagaatattatcatcagcttatttatccggaattcaaagggtatcatgcagatctctattgggcaacactccaatcaaagacaacaccgatgacagtttattcggaaactgacggtattttctttcgcgtcttcactccggaggagcagcgtgaccgtgaaagccgtggaatatcagtaaaggaatatcctgctggagacctttcgttcttatttgaaattccggctgtcaactctcaggggacaggaggagaggcttcttatattaaaattaataaaggggatgatggctttagaatgaagctatggtttgatttccggaactagacccgatagcgtgtttattgcataaatacctataaagagctattgcgtagtatatatattctgtaaaatgggggaaaagattaccgatatcaggtgattgtttccccctttctttttatagaactttgcattcccaaaaattaagaatttagaattataggcattcatggtaagaagacagttacaaaggattagtttaggatccctttttttaataatcggagcgatatctatctttgcacaacctaagataatggtatccggtaaagtgatatccaaagaaaaacaggaagtcgtagattttgcgaccgtatatttgaagggtacaacttatggctgtacaacgaatgaagaaggtatttatcatcttcatgcaccggcagggaaatatacactggttgtttcggctataggatatgagactatagaaaagcccataactttagttcatggagaaaggattaagatgaatgtaatgattgccccgtcagtgacagaattggatgaagttgtagtggtatctaacggggtttcccgtgtgaaacgttccgcattcaatgcgatagctgtagatacaaaagagttccagaattctaccaaaaatctgagtgatgctttggctaaagctccgggaatgaaactccgtgagtcaggtggggtaggttcggatatgcaattgatgttggatggtttcagtggcaaacatgtgaagatatttattgacggtgtacctcaggagggagtagggagttcttttggcttaaataatattcctgtgaattttgcagataggattgaagtgtataaaggggtggttcctgtaggatttggcacggatgctataggtggtgttatcaatattgtaaccaataagaagagacgtaattggtttttggatggctcctattcatacgggtcgttcaatacgcataaatcgtatgtgaatttcggacaaactttcaaaaatggctttacttatgaaataaatgctttccaaaactattcggataatgattatcatgtggatgcaccggtagaggactttgaaaccggaagaattgataaagataaaagggtacgtgtcaagcgctttaatgatacctatcataatgaggcggttataggtaagattggcattgtggataagaaatgggcagacagattgatgttgggctttacttattcacatatgtataaggagatacagaccggagtacgtcaggaaatagtttatggggaaaaacatcgtaaaggacattcgttgatgccgtcattggagtataataagcgtgacttattaatcaaaggtctgaatgtggcattgactgccaattataataaaaatgcaacggcaaatatagatacagcttcatataagtacaattggttgggtgataggaaattaatgaactcacccggtgaacaatccaatcaatattcacgggcggataataacaattggaatggaacattaactgttaattaccgtctggcgaaaatacacatgctgacctttaatcatgtgttgaatacttttcgccgttctaatacttctttattggctaaggtggaatcggaggatgccatcgctaaagaaacccataagaatatctccggattatcctatcggttgatgccgtctgataattggaacctctcagtgtttggaaaatattatagtttgtatgtagcaggtcctatggctacgactacgaatcaggatgattatgtccgtactacccgaaacatgaattccatagggtatggagctgcgggaacttatttcattctatccggtttgcaggcaaaattgtcatacgaaaaagcatatcgtctgcctactattgaagaaatgtttggagatgaggatttggaaatgggagatatcagtataaaacctgagagtagtgataatttgaattttaatttgagctataacagaacatttggcaggcattctgtatatatggaaggtggagtgatttatcggaatacgaaagattatattcagcgtaatattgcggatttgagtggtggtaaatatgctgcgaaatatattaattacggtaaagtattgacgaaaggatatactgtttctgctcgttacggttttggcaattgggtgagtataggaggtaattttactaaaatggatgtacgcgacaatatgaaaacatctatttccagcagtgcggaaaatttggcttataaagaacggatgccgaacctgccttatatgtttgctgattcggatgttactttttattggcgggatttaggaaggaaaggcaatatgttgacagtgtcttatgataatcaatatctgcatagctttacttattattcttcccgaataggctcaaataagggggactatgtggtacctgatcaattctcacacaatatatccctttcttatagtttgcaaaaaggacgatataacgtatcattggaatgtcgtaacttcacagatgagaagttatatgataattttagtcttcagaaggccggtcgggctttttatggtaaactgcgtgtttgtttcggtaattaaagaattggaaaaagtttataattaattggattttaaattaaatagaagaataaaatgaagaaagttttctttttgaatggatttgttgctattgccatagtaggaatggtgttgagtgcatgtacggataatgagccggattacggttcgggtaccgaggctaaaggtgagtatgttattgcatcttcggtcacagcgtctggaaatacaacgaatgtactgcttacttctgaaacgttggataaaggcactgtttctacagtgaataatggtcttgtgaatgatggcgcaactcaatgggtgttttacaagaatcaatatctttatgcactgacttataatcaagggaatgcaggtacgacccgttcttatatcatggattcaaataatgaagtaaaggctcgttcgggggagtttgccataaagagatttactacttacggtatttatgataaatatatcatgacctcgtctaccggtgacggacccactgcgtatgctgatgagaatggatatttaccaaaaatgtttttgctttcttatttggatgtatctgctgaaacatttacaacgaatgatactcaaaataaggcttatatgtccgagaacttcttgggaaatggagaatatgtaacattggccggcatattggaacaaaataataagctgtatagcgctgctattccaatggggttaagtcaatatggatcggccactgacgggggaaaatggatacttcctggcaatgatgatttggtaaagacagaagacggtggttccaacagcagcagttataaaaaaggcgaattgcaatggacgcaatatcccaacaaatgctgggtcgctatttttgataatgaaacgctgactactaaaaagattattgagactgataaaatcagctatgcttgtgggcgaatgaagtctcaatattaccaaactatttgggcggcagataatggtgatatttatgtattttctcctagttatgccaaaacaatggctgataaacggcaacagactaccttggatgctggagtcgtacgtataaaggctggaacagaagagtttgatcctgattattattatagtatcgaagcgcagaccggaggtaaatctttcattcgttgttggcatattacgggagattatttcttgttgttgatgtatgatcgtcccttgactgaaactggtttcacagctaatcagttagcgatatataaaggagaaaccggaaaacttacttatgtaaccggcttgccttctgccgatttgatctctggctttggtaatactccgtatgtggagaatggatatgcctatatggctgtaactacaacagaaggatatccgtctatttataaaatagatccggttggtgcggtagcgacaaagggtgtttctatagaagcgacacaaatcagtggcgtcggtaaactgcaacctcagaactgagtattgtaataatatagtgggagtctgcgggcagtatgtgcttatgcagactctttttatgaattgtattgaagattttatgaagaaaatatttcgccaaatacatctttggctttctgttcctttcgggttaatcattaccttgatttgcttctcgggagctatgctggtttttgaaaatgaagtgatggaactggctaggcatgaactctattatgtaaaaaaggtagagacagttccacttcctgttgatcgattattagaagaggtagaactcacgttacccgacagtgtgtttgtgataggaatcagtgttttttctgacccggaacgcgcttggcaggtgaatctgtccaagcctcgtcgtgcttctatgtatgtggatcaatatactggtgagattaaaggtaaatatgaacgtcctgcattttttgtgactatgttcaggctgcatcgctggctgttggacagtatgaaagcggatggcggagtcttttggggaaaaatgattgtaggtgtcagcaccctgttgtttgtcgtggttttgatatcgggtatcgttatctggtggcctcgtacacgaaaagccttgaaaaatagtttaagaatatctgtcggcaggggctttagaagattttggtatgacctgcatgttgcaggtggaatgtatgcgctgttttttttattggctatggcccttaccgggttaacatggtcttttggatggtatcggacaggtttctataaagtgtttggcgtggaagtacaacagggaggtacacatagtggggtgactctgcgtggtggtagaggtagtgatcaacctggaaagaatgtttctcattcttcgtcctatgtttgttggcaacaagtttatgaacaattagccctaaataatcccggttacaaacagataaccttatcagatggggtagcaaatgtttctttcaatacctttggtaatcaacgtgcttccgaccgttataaattcaatcctcatagtggtgagattgatgaggtagttttatataaagatgctgagaaggctggaaagattcgcggatggatctattctgtacatgttggtagttggggcggtatgcttactcgtttactgacgtttatagcagctttgataggagccaccttgccattaacaggatactatttatggataaaacgtatttggagaaagaaatcaagagtaaattgaatctctttgtcataagattagggggcgaaaagagttttatcagttttatcatatgacctgttgtcgtgaatgacaggtcatatgatattgttacaggattttttagaaccactttatcttcctgaaaataacaaaggccaacgcagacaatgtgatggacgccaaaataataaaactaaaagcatgtggtaatgcatctacatgtacatctacgttcattccatagaaactagctattaatgtgggtaccatcagaatgatggaaatactggtcatgcgtttcatgatggtgttcacattattggatatgatggaagcaaatgcgtccatggttccggttaagatatcactgtagatatttaccgtgttatatgcttgttttaattcaatgactacatcttctaccaaatcgcggttttgataatctttttcctggaagatactttgcaatttacctaccatcacctcatttccacgaatggacgtattgaaataaaccaatgttttttgtagtttcatcaatcttagcaggtcctcattacgtatgctcctttccaattctttttctgcggcagctacatcattgtttatttgtttcagatatttcaagaaccatacggcagatgagtaaattaaccgtaaaatcagttcaaatttattaggcacaatgattcctttacgtcgggtgtggtcaatgaaatcaggaatcatttcagtggagtgataacacacggtaacaatgatttcattatttgtaatgataccgatagggatagtgatataagggatgcttccctgttgttgcagggggattcggataatggtcagtagccagttgtcttccgtatccgttcgtggacgttcatccatatcggcgatgtcctctaaaaaagcttcggggacttttaattctttagtcagaaactcaaaatcactttggtcggggcattctacattcacccagcagtttggcatccattgtggcttttctacaaagccattttcacaataaagatattttctcatcttattgcctcctttcgttcatttatatccgttcagaggcattcagagtagtgattgccctgtcggatcagttaatactattgcacgttcgtggtattgaatcgtccatttttattgattgttttttgtttaaagcggtacaaaagtacataaaacctttaaaggacagacagaagacaggaggcttttatattttttttaagaatgtcatcggaaagcaatatccaaaaaaaatagcgccttttctcaaagacgctatccgattacataaatgtacaaaagatccaattatttgattcgtttgtaaccatatacggccaaattacccagttcctcttcaatacggagtaactggttgtattttgccatgcggtcgctccggctcaatgagcctgttttgatttgtccactattggtagctaaggcaatgtctgcaatggttgcgtcttccgtttctcctgagcggtgggaagtaacagtggtatatccatgacgatgagccatttcaatagcatccagtgtttcacttaaagaacctatttgattgactttgatcaggatagagttggcgcatccttgtgcaataccttttgaaaggaattctacattggttacgaacaagtcatcacctaccagttggcaacggttgcctatacgttcggtcagcttcttccacccttcccagtcattttcactcataccgtcctcaatagaatcgataggatacttattaatcaattcttccagataattaatttgctcgtcagtcgtacgttttttgcctgtttctccttcaaaaatcgtatagtcataaacgccattcttatagaattcagaagaagcacagtccataccaatcatgacatctttacccggttcataacctgcattcttgatggctgccagaatagactcaatggcatcctcggttccgttcaaggcaggagcaaaaccaccttcatcgcctacggcagtgctcagaccgcggtcatgcaatacttttttcagcgcatggaatacttcggctcccatgcgtaaaccttcgtggaaagatggagcacctacaggacgaatcataaattcttgaaaagcaatgggagcatcactatgtgaaccgccattgatgatattcatcattggaatcggcattacgtatgtattcgtcccacctatgtatctatataaaggtatatccagatagtttgcggctgcttttgctactgctagcgatacgcctaaaatggcattggccccgagtttggatttagtgggagtaccatctaatgctaacatttttttatcaatggcacgttgttccagtgctgagcaaccaattagcgccggggcaatgattgtgtttacattggctacagcttttaaggttccttttccattatagcgagttttgtcaccatcgcgtagttctaatgcttcgtgttctccggttgatgctcctgacggaaccgatgcacgacctgtgattcctgattctaatgtaacatcgacttctactgtgggattaccacgtgagtctaatatctcgcgggctataattttttctattttcatactacatgtacttttaaataattattctaatataaactattgttgttaaaatatttagcatccttttaactccatgcaaaattcgattaaaaaaatcgtttatccaatacctatttatggtgaatcttgttctatacaatcctaataattaggtattgtggaaggtgctgaagtcggttatctttgcaaatgtaataattacaatttaaaaatcagttttaatttaaaaataaaaagagtatggaaccaattattaattcacaagttcctgaatttaaagttcaggcattccataatggagagtttaaaaccgtaactaataaagatattgaaggtaaatgggctattttcttcttctatcctgctgactttacgtttgtatgccctaccgaacttgtagatattgctgaaaagtataatcagttcaaagcaatgggagtggaagtatattctgtaagcaccgattcacatttcgttcataaagcatggcatgatgcgtctgaaagcatccgcaaaatcacttatccgatgttggcagatcctacaggtgctttgtcgcgtgcatttggtgtgatgattgaagaagacggtatggcttatcgtggtacttttgtagtgaatcccgaaggcaagatcaaattagctgaaattcaggacaacagtatcgggcgtaatgctgatgaacttcttcgtaaggtagaagctgcccagtttgtagccactcatgatggtgaggtttgtcctgctaaatggaagaaaggtgctgagaccttgaaaccgagtattgatttggtaggtaaaatttaaagtatagaactcatgttagatagtgcgataaaagatcagttaaaaggtctttttgcccaattggaagcgcactatacttttgacatctttgtccaccctcagcacgaaagtcgtgccgagttggtggacttgttggaagaagtggcttcctgttcggataaactttcctgtcggttgcaggatagtgaagggctgaagtttatccttttaaaagaaggaaaggatacgggaatcacatttcgtgccgtacctggtggtcatgaatttacttctttgttgatggctgttctgaatgctgacggcaaaggaaagaattttccggacgagtttattaccagacgtatcaaggcattgcgggggcccattaatctgaccacctatttgtctctgacctgtaccaattgtcccgatgtggtccagactctgaatgtgatggtggttctgaatcatcagatacgtcatgaggcagtggatggggctatcaatgaggatgaagtgaaccgtatgaaggtgcaggccgttcctactgtgtttgctgatggtgaacaaattcatgtaggccgtggcagcatcggcgatttattggagaagctggaagcccgttacggctctgtggaattggaagctgctgagacaaaagaatatgatgttctggtggccggtggtggtccttccggaacaacagctgccatctattcggcccgaaaaggattgaaagtagcggtgatagccgaacgtatcggtggacaggtaaatgagaccatgggaatcgagaacttgatatctattcctcaaaccaccggtaaacagctggctcaagacttgaaaaaacatttggcggaatataatattgatattttggaaaaccgccggatagaaaaggtggaagtggccgaagggatgaaagtactttcggtaaaaggtggagaaacctataaggctcccgtactgattattgctacaggggcgaactggagaaaattgaatgttcccggtgaagaaaaatacattggtcatggagtggctttctgtcctcattgtgacgggccgttctataaaggcaaggaagtggcagtcatcggtggtgggaactccggagtggaagccgctattgatttggcgggtatctgttccaaagtaaccgtctttgagttcatggatgccttgaaagccgatactgttttacaagagaaggccaggagcctgcctaatgtggatatcttcactaatacccagacggtagaggtattaggagatggtgacaaagtggtgggactcataaagaaagatcgttcattggaaaaagaagagatttttgctttggatggtatttttgtccagattggtctgactgccaatagtgctttgttcaaagaactggtggaaacgaaccgcatgggtgaaatcctgaccgacaagaacggacgaacctctgtgaaaggtatctatgctgctggcgatgtgaccgatgtttcctataagcagatcgtcatagccatgggtgagggtgccaaagctgctttagctgcattcgaagaccggatgcgggaagcgatttattagtgataagtggctagtggtgaataagctgcgcagtgtcgcttggcaggtgattcatcactaaccactaaaaaaagccgatctttgtatggatattgacgggaatgtgctttctttgtaaagtaaatcaattaccgttatagtatttatatggcagaatcgagacgtacttcattgaaagatttggcgcagatattaggtgtatctattcctacagtgtctcgtgccttgaaaaacagtcccgaaatcagtcgggaactttgtgctaaagtccagaaattagcgaaagagatgaattatcatcccaatccctttgccatgagtcttcggaaaaatacccctcgtaccattggagtgattgtgcccgatattgtcactcacttctttgcatctatcttgagtggcatagaagatacagccatagcaaacggttattttgtcattatcacgacctcccatgagtcatacgagcacgagaaaagaaatattgagaatctggtcaatatgcatgtagaaggtgtgatagggtgtttgtctcaggaaacaacggattatgaccattggctgagtttggatgatatgaatatgccactcgtgctgtttgaccgtgtctgtatgccggaacgtttctctacggtggtggcagatggagtacattctgcccaaatggctacacagcacttgctggatcatggaagcaagcgaattgcttttatcggtggcgccaaccacctggatatagtgaaaaacagaaaacacggttaccttgaagcgttgagggaaaataaaatatctattgagaaggacttggtagtatgccggaagatagatttcgaggaagggaaaatagctacagagactttattgtcacttcctgagcctcctgatgccattctcgccatgaatgataccttggcgtttgccgctatggaagtaatcagaaatcatggacttcgtattccccaggatatagcactgatcggatatacggacgaacaacatgccaattatgtagttccccggctttcggctgtctcgcatcagacttacaagatgggggaagctgcatgtcagatgctgattgataagattaaaggggataaaaaaatcaagcaaatcattattcctacttgtttgcaggtgagggaaagtagtatgaaaagatagattaagaaccggaatgtattttaaagagaaaatgaaggtgtgtgttgacacaccttctttgggctttagacagaagccatttgatttttaaatattaacaatagccttatattcaggtataacatccacacttctgaccaagcaatcggcatccttttgtgagaaatctggaatagcttccacaggaagatcaccaatgaaaggggcgtctttacgtaaaggacggaaatagaagctcaagtattcattcttcaattcatttttgaatcgtctcaaaccgattgtccatggtatcccatagtaataatgatcaagcaccaaataaccaccaatgaaagccattgccacatctgctacatagttcacacgtaggaagtaatcgtttacctgtggcacatcgggctgatctatctttacggtcattcggcgggtacccactttcttccaatcagctttcacatctaccggttgtacctctatggtttcctctttccatcctttattagcagtataaagggcatagctgatttgggtcttccctaaacttagcaaagtacattgttctttctcaggcaatactgtggcttcagtaataaggatatgattattcactttggtagtgttcaatgcctgttgacgtgttaaggttgtaatcttcaacgtctttccatttttaactgtaatggagaaagtacttttcaaaccaggtttcggtgtatagaactccttacccgagctcaacgttgatttgtcaaaactatattctgtacgtagtccttccggagcaaaaaagaagtagtgtacggcattcttttcctctactttagccaagagttgagtagtagaatactttaagagtgccccttccatagagagattaaagggtaaaatcacactttggtcttttttcaaagtaaacgttttactagaaggaatgatcaatgtctgtttttttagctttagttttaactgcaaatctgtctggtcaaagcgtgctgtatcatgatcctgaaagttggtcatgaagatgaaaccggcatcttctttcatacgggcagcataacgcaacgtttcccgattatccggtgttattttctcatatccttcgggcagtaccgtttccatgggtgccaatatagaaccgaaatcttttaagaatgtatgaagaatgcgcaaattctgatacgaatcacgtaccaaaccaaattcaccaatcggagcctgatagtcgtaggaaatcttaggcatacccataccgtcatcgctaaaaaatcctacgccattgttttgtttcggggtagagccaccgtggtacatgtagtaacctataccgtttgcaccactgcccaatgtacgtaccatcaacgcttcggctgcttcagccttcacaatagggcgactgcgatacaccatctgaatacctacacccatctccgcacagaacgacggatacttgtcggtatcatagcgcaccggcgaataatctggtacccgctgaatgtctttaaacagacagaaaggagacatagagggctttgcccaaaacggataggtgtaagcagcagttacaggtagtgcctcattacctatcacagcagccattccccaaccggtagcggtatacaaaggagtaatgatacccgctttctctgccatctgttttagtgtacgcatgtgtagatcgcccaattcagacatcgtaatattctgatgctgttcacttactccaatcattgtaatggacgaatcgtaggtggcagccgtcatatccctttgttcaccgggatattgaatggcccatggcgcagccgaatgttggtgttcattctctatctgcacaccaatgatgggacctccatccttataatacaatttcttcaactgaactgcaatctcattatagagacgttctacatacttcaaatagtttacatcattggagcgtacctctactggacgcgcaaaaagccaatccggtaaacctccattacgtatttctccgtgacagaaaggaccaatacgtacaatcacgtccatgtcatgttttttacatagctccacaaagcgacgcaaatctctattaccgttccaatcgaacacgccctccttttcctcgtggatattccagaacacataagtaggaatgatggtcagtccaccagccttcatcttcaagatagcctgttcccactgttctgcaggatagcggctgtagtggaactcacctgtaacgggcagcatgggctttccgttccgtaacatataaaaactattcacttctatgcttccaccatcaggagccgttccacccagtttcagatgtttggtataaattatcttctccacctttggtgctgtcagttcatacacattctgcgcttccacaggaagtgcaaccatacctaatccgagaagtatgcctaatccaatatttttgttcatattacttatctatcaaatcattaattgtttcaattttcacgatatgtctcggagagaaatcgctgctctgcatatagtttaacaagctggaaagtagttggcgagcagcaggacgcatttgcatgtcgcggtgaaaatcaatgccggacaccaacaatttacctttgcctatcttcacttcaaacaacaatgccaacggatgattggagaaccagtcatcaatcactctcacaatgggctgggcttctttggacaccttatttatacgtatgggtgcagaatgggtcatcgcatcccaccattggtaattgctgtgatactctgttgggaaagcagccaatgccggatgtttcggattacatagaatacctaatgtatgaggtgcttgtccattagtccacgatgtattccaaaagatactggaaaaaccaatggctagatttccaccgtactcatctttcaacgtacctttctttaatgacaataataccttaccaccgttatttaaacgtttaatggcagtcttgtccaaataatcagtcagtaagatatcattactatttacaatctccttttctgtaggatatacccaaaaattccaattgtttgcataattgtctatcaatacttccaaggtcaactgagcgggcttttctatatctttcaagttgaattctatggagcctaacgactgtctgttgccgatggcaatttggcttatagagaattttccctgtctcactatcttattggtaccatctctcactatccaacagacttttgggttttgcatctcttcattataatttgcagcctctatctgagcaacaaacttttcatcattctcaaatactaatctgggaatacgcgctaacggcaccacgctgttgcagaatcgccgatactcctcgggagtaacatatcctttctcctcccaaaaagcatccaatgtacctaccaatgctgtaccttgtccggtaaagtcgctcaatcccaaaagttggaatccgccgaaattagacgtacgcaaagcagcttcgatatctgctttatagcaaattgtctgcaatttacctgaagccaacagaaagctatctgccaacgcttccattccgctttcccgcaaactctcttgaaatatctcaaagttttttgccttatatacacctgtgtattttgctatttccttgaaattggggtatacgcaccattgccctatctcatggctgatgaaaggttgattgaatttatctgtataatcgctccaatcgtatgctgtagaaggttctttagaattaatgatactgcccaatccttcctcccaatgttgaatacgaggttgggaatcactcaggaaatcactttcctgaatattaggccaacctgccgctgtggtgtacaaccgtcggttgtcacgtgctttccagtaggaaacaaagttggtgagatactgcttatgatttcctccgggctcattgccaagagccaacatgcagaacgaaggatgattaccgtatactttcacaatatactctgcttctgtctgtaggaaagcgtctatgggtttgccatccccgatgctactcgactgattgggccaagaagagcattccacctgacaatatatgcctaactcatctgctgcctcgaaagcagcttcaggcggacaccaagagtgaaaacgaatatgattgagaccatgctccttacaaatacgaaactcacgcaaccattcttccttgtcagtagaggggtaaccggtcaatgggaaggaagcgcaatgcagcgtacctcgcatgaaggcgggatgcccgttcaaatagagcaccccttctctgacttcccattccctacaaccaaaagtgagttgacggtcatctgtaatagttccgaatccctgtagcccacaatgcagcgtatagagattaggatggaattcatcccaataagtcatatttctcgacaaggggattttaaactccaacttgttatcacccggcttcatcacctgtttatattctattcttttcttttctaacatgaagaaaaagttcacttcctgctgtttgcccgtaacattgcgcacattggttttaacggttaactcgcttttgctcaaagtggggaaaagagtaatatcctcgtaatagacgggcgacttagcttcgataaacatttctcctgttacaccgttccagtttccttgcgtatggtcagaaatactatgcgaattttcccccggatcaatttctcgtatcatattatctacacgaacagtaatcacatgttttccgggagtaagcaaacctgtcagatcgtattcctgaggagcactcaatgtgtttctcatccccacttccacactatctatccatacacgactttcccaatggcacctttcgaaaaacagacgaatggctttctcttgccacccggcagggatgtcgatatcacgctgataccatgccacccccgtataatatttttccggctgtaaccagaaaggtaccttaaagttgtccgattggcgataacgattaaacttcttttcagtaaaaaaggatttgtcgaacaggcttcctgtccaaggagttcccaagttgacagcatctccctttccattactcagcatagatcctggtagttgtacgtagtctggcaatttctgcaaataccattgttccgatatccctacctcctgccggtctatcgcaaatcgccacgtaccttccaaattaattcgttcattggattggtgaatgctgcaccggcaaaagagcatgatacagagcagaagcaaaaaatctgtagacggatattttcttgcttgccttttattcttccttacactcatattattttgtatcattattgacatttttatttatttcttaaacaataaaggtaagaactccttcaaacaacgacgccaggtgagccactcgtgggctgtacccggagattcgtaaaaggtgtttttaatgccaagagcggttaatgtatcactcatcttctgtgcgccgaagttttcttcgctgccaatgccgatgaatagtgtgcggacctttttgttgaatgccttgctgtcggcaaacacaccgttataggctgttttataatccccatcacgcaaaaatatggcaccactgaacgagccgatataagcaaacttgtcgaggttgtacaatgtagtcataaaggtctgatgcccaccccatgaaagaccagccatagcccggttctctctatcagtcagcgtacggaactgcttttctatattcggaataatatcttgcaacaggatggatggaaaaatggagccgaatgcatctcttgccttgtttatatcttctcctttcttgggcttgaaaggaatgctgcaattgcccttatccattacgaccagcattggttcgcactctccagcagcaatcaggttatcaagaataaagttcaccttaccttgcatcggccagcttgtctcgtcttcgcacataccatgttgcaggtaaagcaccggataacgtttctttttcgaagtctcgtattctgctggtgtatagacatgacaccgacgatattgtttctccacggtagaataatagaccaccgaacgaatttgtccatgcgccatctcctgtggacggtagtagtccccttccgtcccttcgggtatttcgatggcactggagcgtccatagctgccaccatacgtataagtctctatgtctgtcaccgtcatgccatctaccatatagtgataaaaatgaagcccaacgaccaaaggagaagtggtgacataccaccatccgtcgttatcctttgtcatgtcatatcgttttccgcataccaggtatacctcctgcgccttgggagcatagaggcggaagtaacctcgcttctgtttgtcaacacgaggatattctctcttaaaaagggccgtttccgaaaccattgtattttcaggtatcggcctttgtgcatacatgctggaagcaatcaacaaagttgtcaaaagcgtccataaaaattttatcttcatattatttataggattattaattatcagcaaatgccttcaaaaactcaggataaatacttatatactcagttgtccttccattcttgtcaaacagctcgccccacatcggtgaagtagcttcccaaatgaaagttcctaaacccaatccgtgagggatacgtgagactatttcattcacttcttttcgaaattcctgatattctaccactacaataggttttctgtagcggatggccaaatcgttcaagttgctttccaactctttcaacgtaccatgatgctttggatagtaagactgcccgatgatgtcaaacttaacatcacgactgatgattttatcgaagaacttcaccgatttttcattttgtccgccacaagcaatgtgaatcataatcttaatatcaggattagcggcgcgtacaccggccgtagcacatcgcaacagaacggcaaagggttcatacgtctccgttatcttaccctgtggccacatcatgccattatttatttcattacccacttgcaccatgtcaggacagacgccttcggccatgaaacgtttgatgacttcgtttgaatagctataaacctttccttccagtgcagagccatggatgttactccatgatgcgggtgttgcctgttggccaggatcggcccatgtatcgctgtagtggaaatcgagcaggaatttcatgccaacagcctttatacgcttggccatggatagagtggattccaacccacaaaaaccatctttggaatatcccttttctgtcgtagggtccacaaaaagacgcagacgaatccagttgaacccgttctctttcaggattttcaatgcatccttctgcacaccgttgtgagagaagacaatgccacgttgttcctgattgggaagccaagagatatccgcaccgataatgggtttctgaatggtatccgtatttacataaggaggttcataaacgggttggacatcactctttatgtattgtttgtacaaggcatcatatatgccgaacagatccttatcagcattcccttccttatcgaacaagaccctcgtcggttcccatgccatagttccataacccaatccgttgggcagggagcgtacaatatcattgatcatcttaatgtttttcttattggcaccatactcgcaaacacatatcggcttccgataccgttcggtcagatcatagagattggactttaaatcattgtaagtctcgtgccattgttcgtaataggagagtccgataatatcaaattcggcttccatctgaatcatacgatccaggaactcacggcaaagccggttctgcccgcccaaggcgagatgtacttgcagttttgattccggtaatacctcacgaaccgcacgctggcctgctttgtaaagttccatcaacgaccgccagttttcttctgtagcattgtcatccaacttgccctctggccataccatgccgtgatttatctcattacctatctgcactatctccggagctacctctgcctgctttaaagcaatcatcacatctttggtataggagtagagtttttcttctaactccgcaccagttgttccttcccaagcggaaggcttgaactgcttgtctggatcggcccatgtatcgctatagtgtaggtcgagagcaaacttcatgcctgctttcttgatacgacgggccatggcaagagtatgcttcaaatcacaatatcctttttcgggagcgtatccttctttggcctccggattgacaaagacgcgcaaacgaatggtgttgaagtgatgggcggccatgatctggcaaatatccgtttctttcccatctacatttttatatacaactccccccttttcactttggggaacgaacgaaatgtctgccccgatgcaataaggctgctgtttacttgtgcaaccagtcagcagaagaatagtatagcagagcatactaaccaaataatgtgtaattttcttcatggttctataatttaaaagattaataaatgcaaggacatgttttctaactgacaaaattagatagaacatactcttttgttcagaccagatagaacattctataacacaaaaaggacaatgctgaagtttacccgtcggacatttttctcatccgggaaaaatgtgttaatttgctcttagtaaacaaataaccttatgaagattttaactttaatactacttacctgctccattacctgccatctgtgggcagacaatctgtccaatttgaatggaggtttcaataatctgggttcaaaaaccaagacactatcagtaagatgttttacgcaagactccacaggcatggtctggttcggtacttcacgcgggttgtatagttacgatggctatgacatacgtcattatgtttcagatacacttccctcacatcaactcgtcaaatgcaattttatccatcacaaagttatgcttttaggcggagaaaatggcattactttatttaatttacaaaacggacagttcagcaagcctaatattcggttaaacgagtcgataagttctttctgcgaatataagggtgaaatctggattggagcagaatcggggctctatatttataatgtagaacaagatgaactgcggcccgccctcatccgcggaaaggattttccacgcaacatccaatcgcttgccaccgaccaaaagaatctgtacatcggcatgaaggacgaagtggggtgttactcatttgccaccagcgattaccaagttatctcccaccctgagtttttctacatttctaccttgatgttggatagctctgaaagcacattgtggataggtaatgcccatcatttgcatcgcatgaacctaaataccaaggaaatcgaacgcgtcagagatttttatgttgtgaagagtattgctaaagatgataataatctgcttataggaacagacaacggactctacgtatgcgacagacagggcacttggcatctgatttcacacgatgcacgaaacagtcaatccctgtccagcaacgtagtcaatatgttcttcaaggatgctaatggtaatatttggataggaaccgacaatggcatctccttagccgcacacaatccttctatccgatcccgttcgttgttcgacatcactggttccgatgaaggttgccagatatccagcatacagcgcacggtcgacagtactctttggctgggtggaagccgagggctgataaaattaaaaacagacatgcagggcaacaatatccgtcggtggtaccaaatgagttccaaagaatcttcccttccgcacaaccgtatacgtgcactctatgaagacagccgccaatacctatgggtagcctcagacggaggattactacgctataatccgatgaacgaacagttcatctcttacttcttcgatgacctcaaaaattgggtgtacgatatattagaaacgcccaatggtgacttgtggttggctactttttgcggtgtttatggcatctctagcgaacaatcccctgaagggggcattctgaaggtcaaataccactttacccatgatcaagggctttacagcaacgatatctaccaattagcattggacagagaaaacaatctgtgggtattatccaataatcatcatatcgaccgcatcaacttgacaaccggtactatactccccatagagaagataactgacattccccacattgactcctacgctgtcatcagcgattcggaaggaaatatctggataagcacttcagacaatctgctgaaactatcggtaaacaaaggaaacatcagcacacaaagtatcccattgagccgtgtgctgtctaccgaagtattcgccatggatgagggggagaatgagatatggctcactacctccgaaggactctttatagtggagaaggaaagtttgaaagtacaccgtatccgcatttcggaaaaatacattgacatcttctacgaccgaattgatcacaaggtatggttgggaacgagcaataagataactcagatagatcccatactgctgaggcaagagatacaacaatcccagaaagtaaagattaccgatattgaaattaatagcaatgaggaactaagctataccgaccggcaaagcaagcacatccggcttactgcgaaacagaacaacctgagaatttctttctccgactatcagtataaaggtgaaagtttgacaaactatgctttcaaactcgatggatatcattcacaatggatagaactgaataggaacgaaaactccattacactccctaatctttcacctggagactataccttatacataggttccttggaaaacatctcagataataagcagacagaagctattctgtacatcaccatcacaccaccttggtatctttcttggtatgcctatctcttttacctcttggtagttattggccttgtttggtggatattgcgtttcatcattatcagacagcaactgcgcaaagaacgggaattgaaaaattatttcatggaacaagccaagtcaaaaatagattttttcacgaacattgcccatgaattcaagtctcccctaagtctcatcattgctccttccagcaaactgctgagtgaagagaccgaacaagaaaagaaagcattgttggaattaatatacgaaaatgccaaaaagctgggttcgcttatccatttcactattgaagcttatcaagacagagaaaagataaagcaaaccttcattccgaccgaaatagagttcgtagaattcgcgcgctgcattttcaattcttatcgagagaatataaagagcaagcagctggattttgttttcgatactaatcgagagaacatttatactcgtatggatatctttaaaatggaatccatcctgaacaacctgctggccaatgcatgcaagtttaccccaaagcatggcagcatcatgttctctctggagtataatgaacaggccaaacatctctatgttaaggtggcagatacgggagtgggcatcccagaagaggagattcccctcgtgttccaacgttactaccaatcctcgcgcactatcaaaaatgacaaagagggcaccggcatagggcttgccatcgtaaaggaatatgtagagatgcataacggcaccgtgcttctcacatccgattccaacggaaccactgtccaattaacatttcccatcaacatagacattcaggagcaagaggaaatcattgaaaagcctaccacaacagaaaacaaagaagatacacgtccgctgattgccatcgtagaggacaacacctctatttccggttttataagcaatctgctaagtacggattatggatgcgttacagctcaaaatgggaaaaatggtctgaaactttgcattaatctcttgcccgatcttattattgctgatgtgatgatgcctgtaatggatggtatagaaatgtgccgcaacatccgcagacacatgccgcttgccactgttcccatcattcttctgacagccaagaatgactctggtattgaatatcaaagtgcccaattaggcatagatgcttttattgcaaagccattcgatagctcgcttcttgtggcacgcatcaagcaattgcttggaaacaaaaaaaaattggagcaacagatgcgcattgaacatatcaaacaacccgaactaaagggcgaaatatccattgatgaaaggctgttattccgaattaccacaatcatcgaagagcatatagacaattccgacctctcggtagagatgctaagccgactcatgggcatatcccagaaacagctttacaggaagttaaagtctctcaccggcatgtctacagtggaatatattcgttccattcgtctgaaaaaagccgccttactgttccaaaatggaaacttttccgtggcggaagttatgtatatggtaggtttttccaatgcttcttacttcacccgttgcttcgtggcagaatttggcaagacaccgatggagtacttagggatgaaacaagaataggactttattcctatattcatacctggaacatcattagttgcttggcgtgtttagcgtacatgttgagattgccaggtttacattgtcttagcatgtctcgggctacacatagtaatgtttcagcttatgcattagtacgtgttggcttacactatcgtaggcattgaactataccaaagcacgtgtgtggccctgcctgtgaagcagtatacatcttacacgtgaagctgtatactgcttacaaaacaccctctatctgttagaacccacgctctcctatcatcctttcattttatttcagacccttggatttaaagtcacattccgggaaatttttcttgcgccagccggcatcaagaaagaatctggatgcttctttcttacctttcagctgccaatcgagccacatcaatgctactttgcccaatacaccaccttcgggttgtttgtaggttccggcatgccccacagggaagttcaccgaaaccactggtacatgattgatggattcgaaatcgatattggcattgctgtaagctatatccttaggccctccgatgaggtaaatcaccggcttatgatactgcttcaggctattggcattagcatgtgccatttcaatattgcccataccggcattaagtaccatcgtagtggaaacacgcggatcgtaagaaacggaaatggcctgtgcgcccccacaagagtgtccgcccacagcaatcttgaaacggtcaatcatctgatagaaatcactgccggaagtggaagactgcctgcaaacccaatcgacagcatccagcaggttatcatccatatcgctgactgtgatatctccgtctaccgcacctaccgagataaccacatagccgttcttcaccatctcgacaaacatcggttgataatcgcctgaatagtgcgtacaggcaccattgccatgaatgtataccggcaaccgtccctgcttggccaccatctccttcagattggtaggatagaaaacactgaatccaggaagagtgctggcatcaatcataatgccgggatacttctcactctctttcttgtctttaaacaatttcttataagtttcggccagacaataacgggcatgcatccaagtgtgtgctccctcacggtcgtctatctcataatgaatacccttttcattgaaatacttcgtattgctgataacttccttgtagagaatatcatctttgcctacacaaaaccacagcatgttcaggctattggccttttcttttaggttgggaaaatatttttccatcacctgtggagtgaggtaagcgctatatgatcccatccaaccaatccggtcggaatgcttcaaagcagtaaacatggattgtccgccaccacgtgaaaagccggcaatggcacgatggtcgcggtcgtttatcgtacggaagttctgttccacataaggtatgacgcactccgtcaattcgcgggcaaaggtgttgtacatctcaccggcctccatggtgtgaggacggggtgtaccgccgttcatataaccataaggcattaccacaatcataggctcagcttgtccgcgagcaatgaggttgtccaaaatcgtgttggcgcgtcccgtcttgtaccatgactcttccgaatcggtcgttccgctcactaaatagaataccggatattttttgccggcagaaaggtcatattcggcaggagtataaattactaccgtgcgatactgctgcaacacgtgcgaacgataagtacaatagtgcactttgccgtgaggcaccggattgatagtatacaaagcatcgggatcgggcatttccagcaagctggatttgaaagcatcggtgggcgaaagcagtttattacccgggtcgttcagacgcgttccgtccacaataaagttataaggataaatatccgccttttcgggtttcactgtcacactccatacacctttgtcatcctttatcaagggaatatctcccaccataaactgtccgttcaccaatacacttttggcataaggagcatagtagcgaaatgttacagagtcgtcattgcccacaatgggcgaagtaagcgtgccatactgggcactcaaagtagcgcagcagcacaaaatgcacaaccacataatcagttttttcttattcatagtaaatcagttttgaaattatcaataaacttggagacaaatgtaacagttctctaatcataagcgatgaagattttggacagacgatgacactaaacagacttctgtttataatccgttgtttttgcttgattttgtgttatctatattgtattttcgcaccataaaagaacagttattatgatgaaacgaatacttcttggattattgtgcgcttcaatgagcctatgtgctgttgcacaaaacagagtgacaaaagtcttgatacccggtgcgagaggtctgcttgctgcagaagttcaaatgcccgaaaataagggaacaggaaaatgccctataaccattcttgcccacgggttcggaggagacaaaaactggcaattaatgaaattggtatcagactctcttcagatgcacggcattgcctccatccggttcgactttaacgggcatggggagagtgaaggcgactttaaggatatgacagttcccaacgagatagaagatcttaaacgtgtcgtacgttatgctctgcaattagatgggtgcaacggcaagataggactgctcggccattcgcaaggaggcgtagtcgtaagtatgacagcaggtgaaatgaacgacaccatttcggcggtcactcttttggcacctgcagctgtgttgcgtgaagatgccatacgaggaaatacattcggggtgttatacaaccccattaatccgcccgaatatgtcgagcttcccggaggccgcaaattaggtagggagtatattctgacagctttccgtctgcccatttatgaaacagccattcgctaccaaggagcagcctttctaattcacggcacaggagaccgtgtggctccctattcttatagtgagcgttacaaaaacatctggaagaacagcgagttgcatctcatggaagaatacgaccatggattctcccgacatatcgaagaaattgccgatttagcctcgaattttcttataaagcatttgctatgaaagagatattgacactgatcatttttataagtaatatctttcaggtcgagaatgattctgttcttgtcaatatggtcagtttctctggttatgcagaaggtgaatattttaaaggaaacatcctgccgggaactgtggatacgcagactgtcctgcccgatggaagtacccatctctctgcacgctacatgctgaaaggtattgatcaaaatgaagacagctgccgcatttatataaacaatgaagtgacaagcgatactcccaaaggatacaccagacctaccattgttacagacagtagactgttatcttcattgattaccggcaaacttgtcggcaagatagatacaacaggaggcagttttaagattcggatttttgtatcagaaaaatagccgtacatgtccggtatagaactataaaaggggttgtccatttgccggacagcccctttcccataaaacaatctttaccactgacctgtcggactttatcctgctttatctttgaggcccgtcgtaatcgggtctcgtgaagtattgcgttaaagtatatcccatatcagtagcctgatctactgcgtagttgggaatagggaagtactgtgatgtcggtgtgcagccaatcgcatccatgatagtatagtacttgttgaatcggatgaggtctatacggcgatggccttcgtagtagaactcatgacctctttcctccaacagggcatctaagaaatcattgactgatgcagttttctctgccggaaggtctgccaaccctgcacggtggcgtacctgattgacacaatcgatagcagaagtggaaaccgttttattcagacggacatcggcctcggcatacatcagcaacacgtccgcccaacgggccaacggataatcggtaccctggaaagctgtttccgtttcaatgggatacttgttcaaaatgtaaccgtcccatttcacaccgatatcttcctttgtcacccagccataccaagcactgtaataagaagtaaggataccctctttacgcatgtcgttttcttcgaatgtttcataaaactgaggatctacattgtaatattgtccccagcctccaccttgattgacaaacggggtgggattccctttatcgtcatacttggatacatcgtagggaagcaagtaccaagataaggggttaaagtttcctcgcttaccgctgccgtcggcatccgaaccgcaagacacggccataatggtttcacagttaaactcattggctatcttgaactggtccaagtaaggattcttacctgaggtgaaaagcgagtaagagccggtaaactgatggtaaatgttgtaggctttctgataatatccatccatgtgtgcaccttcgcacaggtaatggcgcatcagacagaaacgagcataatcggccgtgtagcgtcccacttccgattgtgtctctaccatgtgctcagcagcatactccaaatcggctgtgatatatttggtcatctcgtccaacgtagggcgtaccatattcttctctgcttcaagattgcctaccagcgttggatcaaggataaccggcacaggaccgtagaagtgaagcagataaaacatcgtcatgccacgcagaagacgagattcagccatcaactcctgttttttcttatcagaaagaagggtactttcttccaaggtgcctataatctttgtcatacgggtaatatcacgtaccttgtcaaagtgagaaggcaaaatattactataagtactggcatacttcatgtcctcaaactgtccttgtgccatatagatgcaaggaccaccccatgaaccgcccaaggtccaaggtgcacatatatcggagggcgtgtcaagcatacggttaatgccgccttcggccacgtagaagttgtgctggttgctgctaccccaattataagcccaagtcaaggtgaaagggatgtagcaatccatcatgtagctttcatagtctgcttcggactgaggaaaatttgttgtagaaagtgaaccatatatcttggcatcaaaatcattttcacacccgaacactgtgagtatgcaggtaaggatcgagagataaatatatttcttcataatagtatgttattaaagttagaatgataatttggcacccaaagagaatgtacgtgtctgcggatattcagctttaccgcccttgtaattgccacccgtattcacttcgggatcgagaccagtgtagccggtgaaagtaaacggattttgaacatctacataaactctaatgccgctgagaagcttactcaatgcgcccaattggttcggtttaaagttatatcccagtgtgatgttgcgcacacgaacaaatgaggaattttcgtaaccgatatctgttccggcaccaccgggcaaagatacagaagccatctcatacgcaatacccggaatggtaccgttcggattcagctcagagtgccatacatccttgatgtagacggacatgttgttcgtctgattgcccaatcctctaccgcttgtccaggaatagacatcgttgtacttgtcaacacccagttgcgagtaaatgaaaacatccagatcccagtttttgtaagtgaacgtgttgccgaatccccagtagagagaaggaatcacgtttttcatatccacgtcttccacggtaatcagtccatcaccgttcaaatctacgataataggacaacctggcttctggtatgcttccggttgataagaaggcatgttgctcttgtctaagttcacaagaccgttcgtacgatagtagtatctggcgtttacaggctcgtccttacgtatttggtattcgttgtaggtatgattaggcatacgttccttccagatagcgttggtatgggacaaggttagtacggaagtccacttgaagtcctttgttgtgacattgaccgtattcaaagtggcatcccaaccatagcggcggatgtgtgcaccgttgatgggataagaaccaaacatggaaaggccgtttgaattggcataccccagcatatccgtaatgtcgttccagaagtagtcaaagctaccgtttaccctatcgttcagcagagaaaagtccaatccgatgttcttcattactgtcttttcccaagttacgtcagggtaatcctgacttttcaggtaatagggaatgtattttacagagttttcgttaaacataacatgagtgccaaaggcatcgtacgaaccatggagcgaggaccccagattgtcattacctgtcactccataagaggctctcaattttagcaagttcacccattctacccttttcatgaactcttcgttgaaaatcttccacgctacagatacagaagggaaccagcaatatttcttgcctttgaaaaatttgtcagtgccgtcgcgacgcagagttcctgctatcacatacctgtcgaacaggtcgaagctggcgcgtgcaaattgcgaacgtttttcgtcctctctatgataagaggtgggcgtaaatgttccagctgctgcaccaatgttgtcattagccaaaatgtcgttattgtccgtatagcttacggccatacctgtatatttattcaagtagcggcccatacccacaacggcatccatacggaaattttcgccaaatgccttgttaaagctgatggtaccctctatggtagtgttgtaacgttcgttacggtttacggcacctctcgacttatacatctggtcaaagtatatatccgaaggaatgtagacgttgcgctctgaattttcgttattatagccgaacaggaacttggcggccaacatatttttaataatatttatatcaacagtgaagttcacgttatatccattgttcttggactcgttctgtatatcttccatagccacggggttaggaataaccttgaaaagcgtatagttgccattttcatcacgtaccggcatgttgggcaggtaggacatggcagcagccaaagcaccggaagcctgttcgccacgactgttggaagcgccacccaccgtaccgttttgatagatgttacggttaatattgaaagccgtagtcaacttcaagaagctggtaagttgtgcggaaacattggagcgcaaagtgaaacgttccatttcagaattagagacagacccaatctgctgaatgtagttgccggagaggtagtagttcaatgtttttgttcctccttgtactgtgatattgtgtctggatatactgccgtctttcagtacaaggtcacgccaattcgtggttttcgctgaagcaatattgctgtctgagaaaacatcaggaaaaccgttgtcataggcagcagagccgtaagctcccatgttatggtcgtgcatatactgttcacgaccgaaagcgttcacatatttcatataggaaggagcatcgagcatatccaggtatggatagttctttaccaacgatatgttaccgtcgtaagtcactttcactttaccttctttaccctttttcgttgtaattaataccacaccattggccgcgccgataccatagatagaggcagaagcatctttcaaaacttcaatggattcaatgtcttcggggttcagaccagccaaaccagaacggtttacactggagggcattacagtggtacttccgccgctgtcaccttccaacgcagatcctggcataaccataccgtctaccacgtagataggcgcacccgcaccacgaatggaaatattgataccaccacccggctgagcactggccaccgttgcctgcaaaccggctgcacgtcccaacaacatttgcgacatgttgctggtagcggccttattcacctcatcggcctttactttagcaatagaagtcgtcagatttttcttagatacggcaccataaccggttacaatcacttcgtcgagcaatttcgcatcttcttttaatatgatcgcataagccttgctctctgtaacttgtatccgcttgggtgcatagcccacataagagacctcaatggtggctcccttaggcgtatccaatacgaagttgccatcataatcgctgatagtcccgattgtgctatccactaccttgatagcagctccgataatggcttcctctgcttcatcggttactctaccggttacttttacattctgtgcgaatgcattgatcacacagaacaggcaaagggccattaatgaataggtccttcttaaagaagattgttttgcatcatgcaaaagccgaaaatattgaattcttcttttgccaagcattctttgtttgttcatagcttaaattaatttggttaataattaatatttgatgaatgcaaatgtaattatccagagagtattgcaaatggagatttaggacagatgctaacacaaaaaagacagcattaaagaaatctaaaagccgaaaaaagatggaaattatgtgctataaattgtctattggatatgatcccaatgtagaaaaaacaagtatgtttgtgaacgtatcaaaaacttatctgttatgaaaaaaatatctgttttagtattatttgcatggagtctacttattgtacttcaagcgcaagagttggtctttcaagataaagacggcatagttcgctggaaaaaaaataatcaggaagtggcattgttcggtgccaattactgtctgccctcatcatgcgactaccgtgcggcaggctatgtaaacgccgaccgcaaagcgatggttcgcgaagacatggatcattttaaacgcatgggatgggatgccttgcgcatctgcttttggggagactttcagaattctgatcctgacgggcatctgatagacaacgaccacttgaatatgatggattatctaattgccgaagccagcagacgaggtatctacatgcttttctcgcctattgtgacgtacgattcacagtttcccgaaatgaatgacaactccaataccggctatgctaaactttttgccaaaaacacattgatacacgatgaaaaggcaattaagtgtcagataaactatatgacggacatcttaaaccatgtcaaccgttatacaggacgctgtattaaggacgaacccaatatcatctatgtagaaattattaacgaacccacacagtttcctaatgatattccaggcatggtgaaatacatcaattgcatgtgtaaagctatcaaaagcactggatgtaaaaagctgatatactacaatctgagtcagaatttcgatgtagcgccagccattcagaaatctatggtagacggagctacctacgcctggtatccacaagcactgaataacggacatcgtttcatagacaacggattgcactttgtagacagatatgagcctctggtaaaagatgggctgaaaggcaagagccgccttgtgtacgaatttgatgcaacggacacggaaaacggctacttattgcctgccatgacacgagagtataggcgcggaggcatacagtttgcaaccatgttctcctacgatgaacatcaaacagcttcacgcaatttaagctggcaaacacattttctaaatatggtatataccccatccaaagctatcggcggtatgatttcggctcaagtgatgaaacgcatacccagagggaagcattatggatactatccacaaaataacaatttcggagactttaaggtagacttttaccaagatttgggacagctgaatgccgaggacatgttctactattctaacaataccaccgaccaacccaaaaatgtgaaagccctgaaacatattgctggtgtggggtcatctcccgttgtacaatatgaaggtaccggaatctatttcattgacaaggtagccgataacgaatggaaattagaggtttatcccgacattatgaacgttgacgatcctttcaaggcaggaagcgtgaaccgggttgcccgtcaggccgtttgtctcaatcgtaacatccacattcaattgcctggtttacaaacagcactttgcatatatcccggtaaatatacattcaagaacaacctgttagtaaactacgaagcacttcccaatcaggaatactataataaggaagccatgaaagattggaaagtaaacaactccacgttgacagaaatgccgcaaagtcgcccaggcgttttcgcatgtgaggtgtatggtcccacactgcccaaacaagtcaatctttacattctgtcaggttggagaggtggaaagcgcatccccatggcgcacaagagtggtttccgttatgagacagaagtagacctaagcaagtatccattaggtgaaattggctatcatttcggcatagaatatactgatggcaaattactatttcccgccaagatcatcggcgcagccgacgagtttggctactatgaacaggagcaatacaatctgcgcatcgtgaataataatactaccctcacccttttggacaagaatgacaatataagaaaactgaggcgaagcagaccacacaatagccccgacaaccaagtttcacaggtctatgtaggcgatgagatggtcaaagccttccggatcaccactcccgacctagagcgtaaggatacttacaaattaccttgcgatgtcaccctatccaaatacatatctccccttatcgacagtcgcgattggaagacatctacacccaagtacatccgaatcgaagcacaaggactgactaatacagacaaagctatcatcaattttattgatacggaaggccgtggctatggaaataccttctctatcaagcccgacatgcagcagattcttattcccgtttcagctctaaggccaaccaagggagttattctacctcaagaatatcctggaggtattactccatattattatcccgcatctacccgagacaatgacaatgtgccgctgaagtgggaaaatatagattttgtacaaatatccttgcgtgatgaaatctatcctgtggaacagctgaaagacaaaggaataattataaagaaaattcaattggtattttgatactatttagaaactcagttctaatcttatataagaacatgggaaagcatcctatcggggaactctcccatgcttttttaatttttcccgtttttattccagatatacgttatgtttgaccggagtcaggatgaaggggaactcataatcaccgcaaggcaacatgtactgttcgagtggcggtctgtcccagctgttcacatacctcaagcccatctgtgccttatctatgattggtgagatcggccttctttactttgggtgagtggctttatcctttgacctctcgtctagtgaatagatgatgtgtgcaggggggaagctgagaacggagcaacggctatcacttccagcctttgcttgtggcattcaactgcttccattagcggatataggtcttggtctctgtttcctgcggacggatgtaggaatagaacagctcgtctacgctctgacaatagatgaccaaatcggtactgtggttacggccgttgtaattctctatcagaccgtaagtataatattcgatagtctcgaatgtctgagtcatttgcataccgaagtgggacatgagcgataacagtacagtctatttccgtcagtgttttaaagatgaatttggtatggctccttctgattatctgaaaaagataaaaccggaatagggcggttatgtaagccgtttcttccatatagttaagccctttcttacggctacctactacagactccgccagtggactgtaaggtccgcttgggtggaccatacagtctccctcaatggactatagagtccattgagggagactgtagtaggtaaccgtaagaaagggcttaattgtaggcaagaaaagccttagctaataggaagattgactctttgaaggaaagttgctgtttctcaatttgtatgtctataaatgattgtagaatgcttttaccgcttcccattgatagtaaggggcgatagggctgtcaataggtagctttacctcattctcattatgtagcaattttacaataacttctccttgtccgttcttgaaaaagatcaattgaaggttggctcccatgggtgagatgcggaaatcctgccaggccaggtaataccggtcggggtctgtctcttgattggagcatccttctacttgcatgagtgccaacagacgaatcaggttggtgtcgtgcccgaaacggagggtggcgcacggagttcctttgcgaatggcgtggtcggcactttctataatgttcttcaataaagattttgcactttcgggagctacacctccattgagcggagcattggcgttacagatatacatccggtaattgatggactgccaaatgttgaacagctcttctttttcaaacaaatcgtagaaggaaagcggtaactctacatcttgcatatccgatgcaatccagtagagtcccatcataagtccgcgagggtctttcacttcttggggattcgtaaagagcgtggcggtcaatcgttccggacgaatatggctttcttcgtagcatcggaagccggtcctccatgcagcactgtccgaactgaactcttcaagttccggtgaagtgtaggctatgtagtccatgtatctccggttggcttcacgggtaatccggagggaggggttgagctctttcagctgttccgagaatgcggacatactcatgatgcaacgcacggaggtgctggaacgtgccgatatgcaggcactgtcccggaatatttgggggtattgttgatacagtcgtctggctatggctttatgttgtcgttctcctaatgaagttaagtctccgccacgtccgcgggcgttttcccatactttctgaagtctgagccggacatcctcacctaaagcggtaagtcctgatttctcgtgaaacgtatcaaagacacgaatgacttccagatagcgttcgtccgaagtcatccagcgggaaccgtggcgtccgtaatggctgacgtagaaagggctgtaaccttcgggtgccggagtccgtatgccgtctggcgtgggataagcataatagatactgcccatcttttccgggctttgcatgatctcttcttttttcagatggtgtgcagggagagttacggggactgccttccaattgatgccgagcggattgttttgtatctcccatatcagagggaaatccggattgtccataatccacatttcgcatccgtctactgagtcgtttacatgcagcagggggtaccccatggcttgtgacttcgtatcagccagccggtattctgtttgattatagtgaaattccttttgacttttcagttcttgataggcggttgctgaaagcagggcgaaggtctcttgagcggggagacagatatgccgtccgtcttccggttgtaagaagcttagtccggcagccgtttttaaagcttcttggggcatggcgtaactgcctgattgccatcgggtgtttctttcaattccccaatgcagataaagggtgtcattggactggctgaaagtaaactggtactttcgggtttgtccatgcagtttgaatacgaataacagagggtgggtaatgataccttgtgccattacgcttcccatcaggctgccgataagcagaaagcatataaaaagttttttcttcatcatacgttactctttagattcgggaaatagcttgctccccccagttgccgggacggggacccatttttaaaaccaacttgcctcctctgatgatatcatgatggcggatggtggaatatggataattctttccattcaatagcaccgactggatatacctgttcttttcggaaagcccttcggctttgatcgtgaatgttttgccttcctgtaaatggaaacgactctctgtcagtagaggggtatggattaaataatagtcttgtccggcattggggtacaaccccatcatgtggaataccaaccacgatgacatggctccggagtcatcatttccgggaagaccggcagaaccgtcattatagttcttctggataatttcatggatgcggtcgccgcttttatccggacgccctacccagtggtataggcagggagtgaggaaggagggttcattattcacattgaagaaacccttgtcaaagaaaatatccagccgttcgtcaaacttctcttttccgccacattgttcaatgagtccgggtacgtcatgcggaatgctgagtgaatattcccaggaggaggcttcataaaagaacatgttccaccaaggagtataccaaggaccttcaaaggtaacgggagtatatgtgaaggtgggtttctggatatgggagtttccgaaaggtattttgtctaaccagtttccttctttatcccggggaagtatgaatcctttgactcctgcatgttcataatcggcccgccacaagttcttccagttggaagattgtttcaagtattgctggtacaagtctgtcttgcctagtccttttgctactaaggctatggtataatcacaataggagtattctattgtgcggtttccggctcggggaataccgtatggaatatatcccaattccagataaggaatcagtccgcctcttccctccgcttcttcgttacctccgggcggtatggtcgcatctttcagcatagcttccaaagccagatggtaatctatgtttggtagtccttttacaaatgcatcggctataacaatttcggcgttggagccgccttgtgtccgtccgttacaatttccgcttcgtgcatcaggcatgtagccgtcccgtttatagatattgatcagtgaacgtacaatgtctgtttctctttgagggtcaatcagtgtgataagtggagttgaggtgcggtaggtgtcccagatagcataaaaatcatcataataaggttccggatcactccataatggattttcaccggtacggtctacaggcattaacatggtatgatagataccggtataaaacatacgcttatatttttcgggtgtatttgaggctatatcaatgcgttgcaataagttttcccattgtgccaataaggcttgccgggtgtcctcaaatgaccaatgaggtatttcgttccatacattctctctggctttgagagaactgataaatgaaattccgactttcagttgaatggtatttgcagaagaagggaaacgcaacaaagctccggttttttgttgggagtctggctggtatcgttcattgctgatctggcttcctttccatgtggccgtttgtacaaagggatggtcggttactgcataaaaataaacggtgtaggcacgtccgttattccaacctccgcgaatacgggtatatcccattacttcgtgatcggatatgatttgaatttccgaacctacaaattgttgtgcttcgcgggcatcgggggtcggttgttcacccaggaagaagccggcgtcaaccaacagggattttaaggaatcttcgggataggtgaatcggtagaatgaggcacgtggagcagttgttatttcagtatatatgcctgttctctggaattcggtagcataatagcccaagcggattgtttcatctttgcgatagtctatatgattgagctgatccatacctttgccaaaaggcatgacaagtatgttgccatatttaggacctcctcctgtcccgctgacgtgtacttgggagaacccgttaacttgttcgggcataggcagccaaccactattgggatggacagtgcaatcgggcgatggtttcaccataccataagggcaggaggggccgataaatacccgtcccagtccttccgaaccgattctgggatctacgtaatcagaaagtctggcttcctgtgccgcgaccgtcacgggcagcagcaggaagaccagtcttaacaaagaaactttgaatggaatgtgggtcataattatttcttgtttatttttacacgtattgtattcttctctttgatatctcctccggcttgtgtcaattgagggaaggcccaataaatgttacagccggtaatccgaatatccgaagcggtgtccagatagaaagcataagtcttgtcatatacaaaaccatctccgttacaaggacgtttgtcatacacaccgccttcataaccggtacgttttaacaacttgacatctatttcatcaaaatagatatggtgcaccttctccggagtgtctccccctacgaaaatgccgttttcactagtgcatttaatctgattgaagaaaatgttgctgacttctcccgagtgtcctttcgttgcacctttggggaaacgccagcctgcatctttatgattgcctacggcacgagggtatgaggtgacatagataggttccgctttaccccaccatacatcagaatagaacatacagtctactaatatattggagaaaatgacattgctcacagtaccttcatcccggttttgtatgccgatgccccggttgctgtttttgataatgcaattattgaataatacattctcaattttatccatattttccgagccaatcttgatggcgcatgagcgtgaagtcatgacacaattagtcactacaatatcttcgcaagagccatattcttcaaattcccgacgattcttcaggcaaatgcagtcatcgcccgattcaatgaagcagttcgctatacgtacttttttggagtgatccacatcaataccgtcaccgttgcgtatttttagattattcaataaagagatgccgtcaatcaaggcatcgtaacagcctattaggtgtattgtccaataggcgctgttccggatcgtgatgtcacggataacggtcttctctacattgataagggtaagcacatgtgggcgtgggtcaaaatcagtgacgggcttcagctcgtaggaatcatccagctctttgcccatgaaggcgattccgtttccgtctatttctcctgtaccggtaatggatatttgttttaagtcttttccactgatccacatcattccttcgccacggttttcgcggaatgcgctttctgtatagatgctttcatcggggttggccagcaatcgggagttgggttccagatgaaggttcacataggatttcaaatatagcgggccgcatagaaaggtgtgtccggcaggaatgattacggttccgccaccggcagcggaacaggcattgatggcgcgttgtatagcggcggcatcatctgtttgtccgtctcctttggctccataggtcatgatgtcgtacgtgttcccttgatgggaaatactgcatcctgtcacaaacaacaggaggcagcataagaggctgatgatagtttgattcttcatatggattgttttttattttttgtacttatttcatattgtcgggaggcaggctgagggcggatgctccccagtttgtattagggttcgggcccatctggaactctaatgttcctccctgtattatatcttggtgtgtaaagtaattcttgtcatattcttttccgtttagttttgctgactggatatatatattttttttgttggcgttgtgggctaatatggtgaatgtctttccgttttccaagcggatactcatccggggaaaagaaggacttcctattatataataaggtgtaccgggacataccggatagaatcccatagcagaaaatacataccaggcagacatttgccctgcatcatcattacctgacagtccaccgggagcattcagatattctgtttccataatatgacgcacctcgcgttgggttttccaaggctgtccggcatagttgaagaggtaggctatctggtggcaaggttcgttgccgtgccagtagcggtgttcgctgaacatggaatccagtttggcgatgtatttttcttttccacccatacattccatcagtccgtatacatcatggggagcataccaagtatagtggcagggagctccttcggtgatgaagcgagtgaaggaaaaaacgttaccggtatcgctgaggaaactgccgtcagcgtatctgccttgggcatatccggtgccagggtttattacgttacggtaatatcgtgcacgtatcattagtgtatcataaagttctgttttttgtggatcaggaaagttatcatctgatgtttccaacttttgcagaacttgggccaatacgaaatcatcgtatgcatattctaaagtacgtgatacttgttcgcaggtgtgaaaggcttccggtacgctgtcttccaaaggaatgtatccatatttcagataagaattcaaggcgcgtcgtcccattccgtttttgtattcttcataggtggagggggtcttgaatgcgttctggagcattccttcgcaagctttgttgatatcaaaattacggattcctttgatataggcatctcccagtgcggagatgcaatgatcgcctatcatggctgcggtataactgttccaacaaggaaatataggcagccagccgccttgttcatatttgtccaccaatgattgcatcatgtctccggctttctttggggtcaggatattgattaacggatggagagcacggtaagtatcccacatactgtaatcttcatagtaatttctaccgttggctgattgtctgaacgggtgtcctgtggagaaagaagggtagcgcccgtctacatcattgaatgtacgtggcaggaatgaggcacggtagagtgctccgtaaaatttctctttatcgtttcggttgtttgtctgtactgtaacttgtgaaagcctttgttcccagatggagttcagttcctgccgggtgcggtcaaaatcccaatgaggtatctcggtgtccagattcttttgagcgccttccatgtcagtaaaagaggaagcggctttgattaatacgggttcttctgggtgtattttgaaccggagatatgcacctatacctgttccatcggctatctgtcgttgtccggcgaagagactgtcataccggaatgtaccatattcctctatttcattttgatattcaatgacaaagtacccgttgtatccggcgggggctccccagccttgatagatacggtgtacgggattgtatccgcgtatctgtttttttatagtatcgatttcaatatatccttctccttcatcgctgttaggattgactatgagataagcatcttccggttggttataagtgaatcggaaaatggctgaacgggaacgtccggtcatttctgcaaaaatggaataatctttgagaaggacggagtaataggcaggcgttgctgtttcttcttggtgagagaacaggcttcctcggtcttgggggagatatttcagtgtacccgatacaggcatcaaggtcatggaaccgtaatcttgtgtacaccctccgataatccaatgtgaattgcggaacccctgtatcttcttatctttgtaataatagggagccttgcattttatttctgtatcttgtgtctggggagtccaaaagttcattccgttgggctctaggacggcaggcagcgtctgtccgtactcttcggtatttttgccgaaaagtcctgcggtatgggttatgctcggtgcagttcccgtacgggtatctacataggacaatagggattcttcctgatgtccggtgcaagacatgaacaggctacatagaatcagcagataagatagggtacttttcatggctcttcttggaaaagggttattttttaatctcctgacggagcatttttacaaagagttccggccggtccagattgactaaatcgggatgggcttcaatcgcttttttatattctttttcactcgcattctgaatagcagccattatcttgatatgattgcttttgcagaattctttgaattgaggggtgatattgaggatatctgtttctacataggccggggtgcatattttcatccatttcttcagagctgctatattggaggcatttactttaatcttcatttccggagcgattctgataaattctttcagcatttcagagtctgcaaaccagaagaagcttttattttcatatcctttttggcgtactaatataaccaaatcttttatcggagttcctcgttttacatcaaaaaaaatgtgtgcctttccttgtagggtgtctagcatttcggctatacggggtacgtgaatgccggtaaattgagaactgaaccaactgccggcgtctaatttttcaatatctttggatagcatatcttgaatgggacctttaccgttggtagtacggtccaaagtttcatcgtgcagattataaagtatattgtctttacttttgcgcacatccacttctatccagccggctccatgttccaatgcagctagagctgatggaatggtgttttccggcgctatatggttcgctcctctgtgtactacgatttcgatagagtcctggtacatcattttttgggcatatataggagatgggaataatgccaagatagatgtcgcaatatgaagcaataagatttgatgaagtttcatgaattattttttgctttaaagttttttataagagcttgctgtaacaagcccttataaaaacttatttaatttattaataaccgtaattttgcttccagttggtgtttgaattcatcaagccgacagatacaggaaagatcctacgccatttttcggtttgagcttccggatgatattgatttttatatccccagtcgtcttcgaactttccaaaacggattagatcattacgtcgccatgtctctgcataaaattcacggccacgctcttcaagtaactcgtttaatgaaggagtatgctctaataatggagcgttacaatagctgcgtatttggttgaatagggattgtggcgtgtcgccgttagtggctgttgcccctcgtagaatagcttctgctttcatcagcagaatatctgcataacggaagataggtacatcattgctttgattgcggttatagaggttataatcgtctgcttgaatagcccatttgatgcatcggtatccctggcaccatgcgttcaagtcatttccaagatccatttggtcattcaagatggtgatgttcttggtgaggacaacttgttgtccgttgtatatataaggttctgttcccattgtatgtgtgctgatgtcataatagttgatcgcacctttcatgatgatctcattgcgttcatctccttccaggcaaaaacggtctgccgcctcgggagtaacgatgaaaatgcctccggcattttgggatagtgttatgccgaacagtcctttaccgtccgcaccatcattgttgaatttaggccagaattggaaacgggcgtaagtattggctctggttgatgtttcattattttggtatggcattgcatagatgaaatccttaatctgatagccgttgtctggcatgaatttcttgcgataaccatcactgagatcgaaatgaccggaggcgatgatatcatcgcaatattttatgacatcattcaatttggaattagtcatgcttggatcataagtagctacatcatcacaggtataaacagcccagtttatatagagtttggcaaggagagcctcagccatccatttggttggtttgccataagtggaagcatcaacatcttcttttaaaccgccagaagccaaagcacggagcaggtcgctttcgataaattttgtaatttcggaacggggagaacggtcgatagcttcagaatcgccgatcaagtggtctaatttgggagttgctccgaatgtatccataaaaataaaatgatagaaagcacgcatggcaagtgccggagcaatcaaggcttcctgttcggcattgttttcatcttctccacccaagtcaaaaattgcttggttgcattttgtgattgcagccggaatatcaccagcccagtccacgtgtgcgtcgcctggaaggctggcgtgaagagaggaatggatatagttgccgccatcataccagttaccaccaaatgttactgccatgaactcatcggaagacagcagggcagcttccatataacgacgtcctaatgctccgccgaatccataatacaaacctgccattttagcttccttggcaatttcggaatccgggtattcggtataagtggacttaagatccacatttagatctgtgcaggcggagaaggtaagcagactacctaccagccaggttgttaattttatgttatttttcatatcagttttcaattatatggttagaagttcacgtttagaccgatcataaatgaacgggtacgcggatagtaattggtacgtctgtccatgcccggttccaagcctccaaggttgatttccggatcacggccggagtaaccggtaatggtgaatacattattacaagtggcgtatagcttgagcgagtttatccagttaccaattttgccgaaagtatatcccaatgagactgaggacagacggaaataactaccgttctctatccagcgattggatggtgcttgagattgtgtgtcagtagcacggtgttcggtagctacgctttttaatacattgcggccttctttcacaaaagaaacattagagtattgttctgcagtggcgttgtagatatcttgtccaaaaacaccagtaaagaataaatcgagattccagttcttgtattggaagttattgctccagcctaaatttaaatcaggttgtgcgcagccggtaatagtacggtctctatcagtttcaggatctgtggtcgtttcgcctgtacgttcacccgtttcaggatcgtgtacataaaagatggatactccttggttattgtagccggcccattcgtaggtgtagaaggtgccgataggatgtccttccatgatgcgctgtacgtctgcatttgaagaataacctgcgatttcaggatcggctgcacggatataatctacggaatattcactgttggatatactttctacgttatttttattatgagataagttcaaactggtttgccaagagaaattttttgtttgtataggagtggcatttatggtaaattcaatacctttattgctgatatctcccacattggccggcatggttccgaaaggatagcggtttgtggaaacctcgtaagtgtatatcaggtcgctggtacgcttgtcatagtattcgatggttcctcctaatctgcccccaaagaagctgaagtccagcccgatgttcaacatggctgtacgttcccattttaggtctggattggcatttgaggcggctgctagggtatggtaactgttctgtgtgccattggcgtttgtatagttgaaccaacctgaagtactgtaagtctgaatagccgaataagctccgaatccgagtgagttaccactaacaccataaccaacacggaacttcaagtcatcgaaaacatttaaatctttgatgaacttttcttcgctcatgcgccatgccaacgatgcggatgggaaagttccccaacggttgttctttccaaaggcagaggagccgtcacggcgaattgttgcttgaagcaggtatttgctgttgaaggagtagttgatacgtccataaaatgagatcatacgtaaagtttccaaatgaccgttattattgctggtgataccgccattctgccaatccattttattggcaaggttcagattataaaaagtggtgttatcattgtaaaagtcgtagacatccagaccgaaactgtcattgtcatcattctgttcccatgaataaccggccatcaggcccagtttgtggatattggcgaatgtatgatcatagtttatgtatgtttcaagaatttttttcttgttttctgttgcaatacgtttagcttcgccatttcgggtgttatattgggatttgctggtatggtattcgttccatatatattgttcgtcttgataggaaagacttaagttccattttaagtccttagtgatatctaaagtacctttggctgttccttgaaggagtttcttgttgttttcaaaagtatcttcattgatcatggatacaggattgaagttttgggagatagttttgtcgctataccaagaaccgtctgcgttggtgacaggaactagtggagaataataattcatggcgtcgaatacggattggccatctttggcggaatcaacggtggtaccttttgattgtgcggcattcacgttaaaggctaaggtgagccgatcattcagtgctttggtttgcaaaaatgcgcggccgccgaaacgctcgaaatctgtaccacgtacgataccttgtttgttttgataactcatgctggcactgtattgagtcttttctgaaccgccattgatagaaacgttatggttatgactgattgctgtgcgcagtacttcatcgttccaattggtgtttgctcctttgtcattcggaagagtgatgttattttccttggcataggtgcggagttcgtcggcagtcatcatatctaaacgcttggcaatgttgtcaaatgcaagatatgcgctgtagtttacagaagtgtgctcacttttactaccttttttggtggtaatcaagattacaccgttagcagccttggagccataaatagccgttgcagaagcgtcacgaagtacgtcaatgctttcaatatcttcgggagcaatcagacttaatgacataccgggaataccgtcaataacataataaggttccattgccgcaccggtacgcagagaagaagccccacgtaaagagatagaagcagtaccagaagtcggatcgctgctttgtactaccgtcaaaccagggactttaccttgcagcaactgtccagggtcagaataaactcctacattcagtttgtctgctttcacagtggtaatggagctggttacatccttacgactcatgctgccataacctactaccacaacttcatctaatgttttagaatcttcttccataataatcttcaaagaagatccttttactgtaatttcctgggtagtgtaacccacgtaagagaatacgagtgtctttccttgtgctacattcagtgtaaactgtccgttaaagtcagtgataacaccgttggtagtacctttttcgactacattcactccgataaggggttctccggttttgtctgtgacaataccgttaacttgattttgagcaaatgccagtgtactgtttaataggagtaatgcaaagactactatctgtgcaaatgtcctttgggttagagattgtacgtttagcatagaatttaattttggttttgattaatatgttcttgtttaatactgtatagttctctatatattgtgaatctgttgttacagtttgatgtatattttcttaagatatagtggataaccgataccccccaaaaacagagtgaaaacgagggcgtagacggctgaggcaaggtaggcgtcggttattcctgaatgaatggctgcataggctgccgctttccatccggtacttcccatcataatggcaagtacttcgctcaatacatagaggaatagggggttgacgccgaagatgatgaagaagcggcaccatttttgtttattccttatgtctatataatacattagtgtggcaagtgacatggaagccgctccgcaggtcaccaaaacaaaagtaggagaccatattcttttatttaaaggcagcgcatctgccaataaatagccgatacttatcagaatgaatccggtcaagaacaaacggagtactttgttttctgtctgatggctttgtattatccattttccatatgaaaaaccgatacaagtgtgggcgatagcagagagagtgcttacaaatccttccggatcaatcgggctcttttgatagagatgcgcttcgccgaaaagttgcctgtcaataatggataaaatattgctttcatcgcaggcataaccgttccccatgcataatatgacagtgtaacttactagtaagataaaggttaatgcggggatgaacttatgattcataaatagggctgtaaaagaaataacacagtaacataaagcaatgcgttgcagtaccccgggaatgcgcagatggacaaaaggcaggaagtcaccttcacatacatggtcaaaccaaccgattgcccatccgatgcatagaataagaaatgtgcgtttcaatatcttggttaccacttgtagggaaacgttgaaattgaatttgtttaatgaaatatatgttgaaatacccatgatgaacagaaagaaaggaaaaaccaagtcacaaagtgtcagtccgttccatgcagaatgttgcaaaggtgcatacgacactttgcctcctgcattgttgaccagaatcatccctgctacagtgatgcccctgagtgcatcgagtgacaaaagcctctttttaatgggcggtgcctgctgtgcggtttctgtattgagctcttcctttttcatcttactatcaattgtttatcaatgttatagcctctttcgctacttctatacaatcaccttcggcagatgccgcatagatgttctttgccagtgtccatggttcttccagggcataccaatctatggtcatggctggattatcggcagtgggggttgatgaattacctactggcagtacaggaagtttgccatccagttggtcttgcagtacttgccagtatttttcccaacgtttgtaataaaagtcgcgcagcagcccgttccactccttatgggcataatctcgtaatttgccgatgtcggcgcagtagcggtttccccatgtggtgatttgtacgcgggcgttccattcgtagaggtctttctcttcagatgtgattcccagattgcgcgcttgttgaatccagtttccgactttgaattccttgcgtgtgcccagcagcttgtcttgcatcattaacagttccaggaactgtcgggtgtgtgtggcataattttttttgtcgaagcttttaaagtcggcaacagcgtaattgtacactattcgggcacggtcggcaatggcttgtcgggtgatgtccaccaggtcatattcaaagttgttattaccgcgatatttgtctgccacgctcaccatcaaccgtgcggcttctgttgtggtagtgggatcgtaatagttgcacattttgctccagctggatgcttggaaattattcagcgatggacgcccacaaaagatactttcgtgaggaccttgttggttgttgcctgccggacagttatagataccgtttgccaggatctgccaagcttgccggatagattcatcgtctgtgccatagcgtgcgcggatgtattgtttgatccattcttctttggtaaacttttctgcacgccaaggaagttcgcacatcagttcgaacataacgggattattttcaatgccttccatcgtcagaccgatgccttttagctgagcggccagtggattgttcttggtcaggtagaaattgtgaagaagctggtccatccttccatgcaagcccacgttccccccgaaattctccaacaggcagaacaaccagttgtgttcttcgtatcctttgtctcgtttccatatagagggaatgccccacatgggacgacattcgctaaataaatcaaggataagcagatcgccgggattcagcgctttcatcatttccggacgtgggttttctgtccatccttgtaccacccacacagctttggggttagccttcttcattgcatccataatagccctgccggctttgccgaagtctagtccggcaggcaagcttttggcttcatgaaaaggatcgatggagtagtagtcacttgttccatacagcttttcggtctcttcgtaaaaaaggttggcaatctgggtaaacttgggatcgtcgggcagtaagattcccggtcggtcgaatccgttccatttgttgagggtgctttgggcggattccgaggaagtgtcgcttgctgttttcttttcttttccactatcaatacgctttcccaaatccagcttggaggggatcatacctgaataaccgggcagtacggggtgcattccccattctttcattcgttgcaatatctttttttgcaaggcttcttgttgttcataccaactgtcgggattagggcctccccatccttccagattgttcatttcccaccaggcaaggaatgccggaccggcaataaaattattgatttgctgtttggaaaaccccaaccggagtaataggttacgccatacacattcatgtcctacggcagcgagcggcaggttgattccgtgtagtgccatccagtccagttccttttcccaacgtttccagtcccagaatgccatggagtaagagtaggtgcagtaattgaagtcataacgcagggctaggtttgtttcgtggcgttccttacggaggacgggaggaagaacatcgggtagtgaggcatgcataccgttccatgacagatggattccggcatgatactttaagtaccagttgatgccggttgctatattaatataggtgttacctcgtatcactaccttgtcgcctttccggtctaactcgaaaaagtcgttagagcttttgtgtagttcgactacgaacttgttcgatgctcccttgtctatcctttccagcattcccttgatagggtttgccagtataccggaggggagtagtatcagccagctcaataataagaatatgtttttcatatacatttgcatttctgttttttacaaatgtaagggaaacaaagctttctataggagaatatggtgcacaaatggagtaaaatagtaaagtgaactattttcttccaaaatattcgcttggaagtactccaaacagctctttgaagcattttgtgaaatatttggggtcgttaaaacctacagcatatgcgatttctgcaatagaaatgttgcattcgactttggttaaagtctcttttgccacatttaatcggtagtttctcataaattggccaatggattgccctgttaaggattgtaatttctgattgactaatgttttgctgtatcccatatcgcggataaagcgctctaagttataatccgagtcggcataatgttctttcattaaattgattgccgatgtcataaatgtgttgtctttggaactagcgtttatattcaatgtttcacaattcatactagtggagaacatggatttgtatttctggcgtaaggcaagtatatttcggatacgtaattttagaataacctcatcaaatggtttgcacagatattcatctactcctatttcgtagctgattctttcttgggcttcggaccggagggcagtgagcatgagaaaggggatgtgggaagtagccagattagcttttacctggcgggataattcattcccgtccatgacgggcatcatcaggtcgctgacaatcaaatcaatcgtttctctttgaatcaagtaaagagcttctgcaccgttctgtgcttcttttaattgataattgtttttgagaatggaacaaatataagtacgcatatctgcattatcttcaacaatgaggatggtttcctttttctcgtttccattggcaggaatggaaagtgggtgttcattctgctcatatttttctttttctgattcggcttgggggatacctttttccaaaggtaatagtattctgaagaaagctccttgcttgggattgtttcctgcatagatgttgcctccgtgtagagaaatgattttcttacataagaatagtccgattcctgtgctgctttgtccataaacgggatatttgatgctctttttggattggtagaagcgttcgaaaatacgttctatatcttcgggtacgataccattacctgtatcttttatatctatgaacagccaggtatggttgtctttgtcggtaagggaagccacatacaaacttatttttccataatcgggagtgaatttaacagcattggatatcagattaataatggctttgcgcatatattcaacatcaaatatccaaaacggggtacagagccggaagtaggtgatgatgtttatgttccgttcatgggcaaatacttcgaaaggcattaatatattttgtataaggcggataaagttttcgtttgtcttatttaatacaactttgtctgcatctaactttctgaagtccattaattcattgactagtgatagcagataattggaattccgttcagctatttgtagctgtttctttacttccggctcatggctttcgtcaagggcgcgttggatgggaccgttgattaaagtgactggtgtccggaattcatgagtgatattggtgaagaaagcaattttttcttccgttacctcctcgacgtgtcgtgccattatttctagtcgtttattttgtaactctagctcatgggtgcgttgggctacttctttttccagttgttttttctgttgacggtacagacttattttccattgataaaaataatagctgcctacggtgatcagaatggcaagcaataaatagaaccaccaggatttatagaaataaggagtgatggttactttgacttccgttattttatcagaccaatgtcctttctcgtctgtggcacggacttggaacacatattttccggagggaatgaaattgtatctagcagtatgttcgccaggaagggtttctgtccattcattctcataatttttcaagcggtaggcatatttcactcggttacagtttccatagtttaaggtggaaaactcgatggaaaaaccatgatctttttcgtgcagacggatggtatgtaaatttgttaccgcgcagggagtttttccgtctgctggaggatagaccatggtaccggcgacactgattgaggtcagtttgactttggcatcctgcttttttatcttggctatatcgggggtgaaagcgactaatccgtttatagtaccgaaatataacagattattttggggagaataataagatgcgttccaataaaactgattattgggcagtccgtcttcttttgtataattggtgaaagtcatggtttgtgtatccagttgggcgatgccgtggttggtggacatccacagatgtcccgttttatcttccacaatacctataatggtattattgggtaacccatccttgcgggtgtagttatgaaatgtgaactgtgttccattttcttccgttagttgatatagtccgttcccatttgctcccagccagatggtaccattatgatcttctatgatacagtttattttttctaattgcaatgaagtgggttccgtcagtttatgttttaaataggtatagctgaattgtgtggaggaaatggagaacgagtataaatccataatgaaaactccttcagatgttcccatccaaagacgtttcttgcggtcgataatgatggaccctaccgcatcgaattcattgtcggaacggtcaaacaagacccgggtgaaacgcttggtctttttatggtagaaatgaagccctctggtagtaccaaaccataaaccattgttcatggtgtcttcacaggcgctgcttagaaaatctccctccaatcctatggagtcttcccggatatggcgttggaaagtttggttatggggtatatttagatttagttcattgattccgaccccccaagtatatgcccataaatgattttcggaatcaatgagaatgccacggatggagttgttactaatggaagtgggattattctggtcaaaagtataatggatgaactcatcgctgcctttgctctttttgttgagtcctccctctactgttcctacccatagatttccgtctttgtcttcgctgatggcattgaccggattgggggaaagagaggtttctcgcagatagttgtattgccacacatacgtttgcagacaattgggagtcaataaattgattcctcctatctcagtccctacccagatattctcattgtcggtcagcaggcagttgatgaaattacagttcaacgacttgtcaggcatttcattgttttggcggatataagtaaaagtatcggtatcccgattgtatacattgagtccgttcagagtggaaacgatgacatctcctttgctagtcagtttaactccggttatataggcttgacttagcattccggggcgatgattggagtaacggtaccggttcaaactctgctgggtatggttatacttgaagagtccgcgattggttcctatccataacaattccccgtcagtttccatgcagagaattctccagtcttctgaaaagggtttcagcagctccgataccatgctggttttcagtaagtggttgctccctttttcaatacggcatacatgattatctatgcctgcacagatgtattcttgcaggtcaataacagcgtggatgggggattctgtatcttttttcagtttatagtaatcttttatttgcccgtctacgcctagttccagataccatagattcttgtctgtcgatatccacaaattattctgcttgtcccgatagatggatgcaatgtagttacttgctagaaatttcaattcggcaggcagttctttgtccgtgtctatctgtgtataatgtttcaagtcaatgaggtctattccttcttccgaccctatccagagtcgttgaaacttatcctcacagactttatgcacgtagtcgtttttcaagcgaatggagtgggactgggaattataatgaataaattgatagccgttataccgtcctattccattattagtagctacccagatatatccttgagtgtctttgtaaatatcattgataaagttatggggtaacccagtatcttctgtaataaagctgaaattatatcggttgaaaaagttatgtaagttttctccaaataaattcaatgctcctcctataagtagaaaaagtgctatgatgtgcgttttcatatcagtacttgtttcccaacaaatgtaaataatagtaagatagttccaaaacatttgaatggaaatcttgtttttgagggtaatataagtaaaatggcgggtggagattacaatggaattacaaaagaatgtgatgaaggcttttattatatatagtaataaaaaaggctcgctatctgcgaacctttgtgctcttcgtcttggacttgaaccaaggaccctctgattaacagtcagatgctctaaccgactgagctaacgaagaaaattgcatttgactttaaaagtgctcttcgtcttggacttgaaccaaggaccctctgattaacagtcagatgctctaaccgactgagctaacgaagaaggtttttctctcaaatgcggtgcaaagataataggtttttccgaaatatgcaatatctttgcagaaaaattttagataaatggataaaataattggaatgggcaatgcattggttgacgttcttgttactttgcaagatgattcgctactagatgagatgagtttgcccaaaggaagtatgcaacttataaatgaagataaatttctgaaaatcagtggtaaattctctgatatgaaaacgcataaagctacagggggaagtgtgggaaatacagtcttggcattagctaatctaggggcacatccgggatttatcggaaagataggaaacgatgattttgggcaatattttaaaaaaaatggtttgaagcagggaattgacatgaaattacttgccggtgatttacctacaggagtggcttctactttcatttcaccggatggagaacgtacttttggcacttatttgggagctgctgccactatgaaagccgaaaatctgacgttggatatgtttaaggggtatgcatatctatatatagaaggatacttggtacaggatcatgaattgattcttcgtgctatgcaattaggaaaagaggctggattgcaaatctgcttggatatggccagttataatattgtggaaggagatttggaattcttcgatattttgataactaaatacgtggatattgtttttgctaatgaggaagaggcaaaggcttatacaggcaaggatgcatggggggctatcaatgaaattgcttctaaatgcagtgttgtaatagtaaaactaggtgcccaaggttcatgtataaagaaaggtacggaatgcatcaaactagaggtacctccggtaaaaaaagtcgtggataccactggcgcgggagattattatgcagcaggttttctgtatggactgacttgtggttattctttggagaagtgttccattataggttctattttagcatccaatgtgatacaagtggtgggtacaaccttatcaaagaaaaaatgggacgaaataaagttaaatatagaggcccttctacaggcttgaatagaataatgtattaatttgcggttcacaaatacataaagtgatgaagtggaatagtaagaaaatattgttaatgatttgcgtgggcctgacaggtagcgctttgtttagttttaataaaggtgatgaccgtaatttccagatagcaaaaaacttggatatcttcaatgcgatattcaaggaattggatatgttttatgttgatactattgatcctgagaaagtgataaaatatggtattgatgctatgttggcgcagaccgacccttacacggagtattatcctgaagaagataatacactaaaggaaatgactagcggaaagtttggcggtatcggatcggtaatacgttattatactccccgaaagcgtgtggctattattgaaccttccgaaggaagccctgctgccgaaataggactgaaagccggtgatatcatcatggagatcaatggaaaagatatggcccagggagacagaattcccaatgatctgacctcgtatgtcagtgataatttgcgtggtgagccgggaacaacttgtgtgttgaaagttgagagacctacttctgatagtacttatgtgccaatggaatttaaaataacccgttctaccatccgtacgaaccctgtaccttattatggaatcgtaggcaataatgtgggatatatcgttatcagtacttttgctatagagaactgttcaaaagatataaagaaggcattgatagaattgaaacagcaaggtgctaaatctattgttctcgatttgcgtggcaatggtggcggtttgttgggggaagcagtgaatgtagtgaatttctttgtgccgaaagggaaagagattgtggtaacaaaaggtaagattaaacaagctggtaccacttataaaacaatgaatgaaccggtagatacagagattccgctggctgtgctagtggacggttctacagcttcggcatccgagattgtttcaggttccttgcaggaccttgatcgggctattgtggtaggaagccgtacgtatggtaaagggttggtacaggttcctcgtgaattgccttataacagtagcatgaaagtaactactgcaaaatattatattcccagcggacgatgcattcaagctattgattatgctaaacgtaatgctgacgggtctgtggcccgtactccggacagcctgaccaatgtattccatacagcagccggacgtgaagtgcgtgatggtggcggtattcgtccggatgtggaggtgaaagttgaaaatttcccaaacattatgttttatctgcttaatgatgatatgatttttgattatgctacccaatattgtatcaagcattctcaggtaggggaagtgaaagactttacaataacagatgctgactatgttgattttaagaagatgttacataagcgtaagtttacttatgatcggcaaagtgagaagatgctgaagaacttgaaagaaatagcagagtttgaaggatatatggatggggcaaaagaagagtttgccgctttggaaacgaaattgacgcataatttggatcatgagttggacaggttctcgaaagagataaaagatgctattgctcaggagattttgaaacgttactatttccaacgtggcgcgatactgcaacgcttgaaagatgatcctgatctgaaaaaagctattgagatattgaataatcagtctgaatatagtaagatactttctgttatgaaataatcgaatgaggggcggatgtacgaatctgccccttattactgtgtcatgatactattgatgatgctttatttgaatcgggaagtgtctattggtttatgctgtttttctttatagcctccgaacttgtaagtaaaggataaagttacgttgcgtgaataactgttgatgtgcatgtccatatactgccctttattgcgcagtgttacatctatatctccttgcattgaattgaacagatcagtggctttcagttgaagactcgccttttggttggcaaaattccatcgcaacccggcatggatggcccatacattgcttaaatcataatttccctgaatggatgggcttaaataaagtccggtcagttccatgcgtatgtccggttgggtagacagcgttaggttattctgtaacattcccaatccaatccatttgctgtggttgaaagaaaggtcgaagaatttatcacatttcgcctgcctgtattctgcttgtagtgtggcacggctgtccagccaatggcctattttgaagggaatgatggcagtggctgaaaaactttgctgataatcccagttcagggtcttgtaaatcaatgtcaggcgttccgtactctgataagccagttgctgaaataaatcgggctcatagtcataagctaggctgaagatatacttgttctttaaaatataattcagatttacggaatagtcggtggatggctttaacattggattgccttgtacttcttcataaccacttatatagccggtactttcgctcagatcccagtagctgggataggttttatctgaagtgaatgcaagttgtaaaatatgcgctggggtcattacgtatgttaattcggctgtaggataagccgcccatgcatgataacgggccgttttgtagtattctccggttatggatgcgctgaaagacaaacgttctcccatatttttgctgaatccgacatagaagtcatatgtatattcgttataacgattgtctgtgttaagttcgctcatatctgttccgttttgggtatgatagaactgagtattatggtcactggcataagtcaaagaggtgccataattcaaggtccactctcgtggtagtgtgtgtgactggtctacgtatattttccagcggtctattatttgtccgctagtcgtatgaaattcgcttgtttgttttttgttgtctttgttggtgaattgctgatgactttcggaatggtaggaggtataatttattccagctttcataccgaagccagagagataatctaaagcgagattgtgcatttgagcctccttttttgtccgattgtctgcggttgtgatgttcccgtcggaatacgaatgattatcgttgttagggttgaagataccggtataggccaaattgatatgagcactaccattgaatttatattcagcgcctgtccgtacataatgtgttattccttttctgtcaatgttattgtgttgacagatatcatatacattattttttaaggtgtggtgtgagtacgtatctgtagtttgtctgttttgttcataatgggtattatatagcaagtctatattccatttaggagtggtgtaaagtaggctgattcctccttgtgtgccatttctgtaattgtatagatatccggcattaacttctccttgcaacccgctttcttccggacgataaactttcaaaagtaagttgatggcagcacctcttatatgatattgcggcggtgtgctatacataacttctaccttttctacacgtgaagccggagtgttttttaataaaatggctaactgttcgtgactcattgttgtgggtcttccgtttagaataatgctcagattgtgtgcgcctgccaatgaaaggttgccatttatttcttgtacaccgggtaattgctgaaggatttcataagcattgttcacgattctatgtgtggtgagttgtgacagatcgtacgataattttccttcttccacttttacaagagggcgttcccctttgacgataacttcgtccagggcataatctttacttttcagggtaatcgtgcctgtgtcttctcctgtagttgtcaataagagggtttcgtacatgatgtgttggaaaatcagccgataagatgctggttgccggttgaacctaaagcaaccggtggtatctgtgattacggcgtccacgaaagtagaatcaatgatttgtaggatgacggttgcaccgtcaatggcttgtgcatggatgtttataacctttccggtaatggtttgtgcagcggttgttcctataatccaaaataaaaatagcgatgtgatgataaaattttgctttttcatatctatttgtttttaatattttctttaactttgacgaaacaaaagtagggagacttttttccttacctggttaatagcaggttaacattacgttaacaaagtatggataggatataagtgtatgacaatcaaacatattcgttgggtggcttgtattggactgttggcaatcatcagtttgcagtacgtttggcttgtaaatacttataagctaactaaggaaagtatacagttcagaagcaatgaagtatttagagatgcaacgatgcgtgaggtgttttatcgcatggaagtatatcaagattctttgcaaaagaagtataaggacagagatacttccattatggttagaataagcttggatgaagattatgatctttttaaggatgacagggttgatgaaaatgtgaaccaatggttgatgtccaatatgcaggtttccatgcaagagattgtcaagagggattataaattgtctgtttctttgtcaagtttagattctatttatcggacaggtcttgctgccgaaggattggatgcagaggtaataacctgtgtgacagattcgctggggaatattcttagaagctcccgttccatacaggtgggggattatggtttgttgaaaaccggattacaacctatcaattataaacgcacggagaatcttcaggcttttattgttaatccttattggattattttccaacagatgaccttgcttctcattgctactgtcttgatgatggcaatgattgtctattgtcttgtttatcagattcgtattattgcccatcagaataaaatagctagaatgcgtgaggatttctcatacgccatgattcatgagatgaagactcctcttgcctgtatcttgatggggacccgaatgttgaaatcaggaaagttggatatttatccggataaacgtgagaagcattttcagatattggaggacgagagtgaacatttattgtcactgaccaacaaggtgctgacgctgtcaaaattggaaaatgctcaattgaggctttggaaagaggaggtacaactccgtccgatgttagaggacctcattgagaaatatactgctaaggcagataaacctgtacatttctctcttcgtttggaatcagaatgggtatatgctgatgaagaattcttgaaagaagctattggtaatttggtagacaattctataaaatattcaggtgaagaggtggaaatacagatttcatccttgcgccaggaccataacttttatttgataaaggtaagagataacggcatgggtattccgttgaaggatcagagccgtatcttcgagaaatacgaacgtgcttcggctgccgaccgcagccgtaaaggtggtgcgtcaggtttcggactgggtttgaattatgttttccgcgtggctgaggcgcatggtggaaaagtgtgtgtggaaagcattgaaggggagtatagtgaatttcttctttttttgccgagtgaggagagggtataaatgttttttaaagaaggaagatgatatgataaaactgttgttggtagaagatgatactaatctttgttacattatccgtggtggattggaggatatgataggtggatacgaggtgatgactgcttccaatggcgaggaagggctgaggatatggaaggagcaacatcccgatatcattatttcagacattgagatgcctgttatggatggttatgaaatggtacgtcgtatccgggaaacggatggatttattcccattgtttttacctcgggtagagtttcgcctaaagatgtggtgaaaggttatgaactgggagtgaataattatattaagaaaccttttttggcggaagaactggatgcgcatattggtgccttgttgaaaatgaagcagggaatgggagctgctaatgaaagtgaggtttatcagattggtgaaaattatacatttgatgctgttcatgcagtattaaagtgttcgtcgtgtgtacaaaagacaatgacggaacgcgaagcgaaactgcttcagatgctttgtaaaaagaaaaatgaactagtaagacgggatgttattctttcaagactatgggatacggaggatgatttttttgcatcacgtagtctcgatgtttttgttactcgacttagaaaactgtttgctgatgatgaacggatacagataaagactgtgaaaggagtggggttatgtctttcggacaaaggatgaatatgtgtaatataacattcattgtaagttcttttggcattttttgaacattaagtgtttttaagcaactcgaaaagatgggcattggtgaaatgaccattcttgaaaatggattttgtcattatcccgactttgttgaagccggtcttttctaatactcgcatggaaggaaagttgtgctcaaagacaagtgcgaatatacgtattgtattcgtataagtgaagtaatggtagatggcttcttgtaatgcgtcggttacaataccttggttccaatatttttctccgataacataccctacttcggcattgaagcattccacatctgtgccgggtataaatccgatattacctacggcttttccattgacttcaatacaaaaatcatgaataccttcttttttcttgatgaggtcaataaaggtttctgcatgttccagcctgtaagggtgggggaatacattgcggcaattgtcccaaatctttttgttattcagttcttgaactaatgaatgagcgtcttctgtttgccaggtacgtagtgtgtacttttgcttttgtacaaatacagcatgatagcgtctcatgggggtgctgcagagtccgtggtaattttgtttttctcctacgacagcaaatcccagactctggtagaaaggaatggcgtaagtagaagaattaaccgtggtttcaatggaaggatgaagggcgaagacgtagtggaaaagggttttccctaatccttgcctgtgatattcaggcttgataaaaaataaggagatatgtttaccattattttttatacctaaaatgcctgttaggactttattgttaaaactaccgtaaaatgtgatttcgtctatatatttttcgttataaataaagcttttgaaaaattctaatccctcatcgttgaaatcttctttgctggtaatggtgaaaacttgccaggatagttcgatagcttttgggagctcatcttttgtgagtagtcgtattttattcatagtgtgccatatttgtaagttagtgtaaaaataggtagagcaggtttgttctttgtaaggtgaagaaggataaaggtgcatttaaaagcacttttatccttctctggttattaattagaaattataggctacgccaagattgaatactgcttgatctaaatcgctaattaattggtatttaatgtcgaggtttagactccagcttttatctaaggtaaactccatgcctgcccctaaattaactccgaattttccatcacttccactgacatcgtaatcgcctacttttcctaaatccaaatgccagttagtgtatgtaaatcctgctaatggatataaacttacattgcttgctatgggaaaaaggtagtggatatttgcattgatgtcaaacatgctaagtccgtcatttttaaaaaagtaattcatagatggctcgattctgatttgatcagtaatattatattgatatttcagaccaagaccaatactctctatttcagttccataacttagattaccaccaatagcttgctttcctttttgtgcaaaaacagaactaaaacttaaaagcgtcatgcatgctgcaataataatttttttcataatcaatcattttaaatgaatactaacttttctttatatgtagaattatttttcttcctccttaaaccaggaagcatacattaaatatccattggcaattttctgattgagctctttgctctgtgcctcgggaatttttttgacgaatttggctggaactcctgcccataggcttccaggttcgatgacggtgttactgagtactagtgctcccgcagctacaatagctccttcacctacgacagcgtggtctagtacggtagagcccattccaatcagagcgccgtcttttatagtcgcgccatgtatggttacattatgtcctacagaaacatcattcccgatttctacaactgatttttgatatagtgtgtgtactacactgccatcctggatatttacgcggttgcctatgcggatagcattaacatcgccgcgtaatacggcgttaaaccaaatgctgcaatcttttccgattacaacatcaccaataatagtggcattatcggctaaataacagttttcgccgatttttggagtgaatcctcttactgattttataagtgccataattaatttctaccgttttaaaggagatgttacttcttttaaccactcgcgttcctcgttgttcaattccgggctcaaacaattgtaaactttttcatgatattggttgaaccatgttatttcttcatcgctcagcatatctgttaggatggcttctttgtcaatagggcagagggtaagtggttcgaatttatagtaagtaccgaattctgtctcttgtgacggaacaattaacatggtattttccgtacgtactccatgacggccggctttatatataccgggctcgttggttactgtcatgcctggaacaagtaaggctggcatgtggttcatgcggaattggtgaggaccttcgtgtacattcaggaaacaacctacaccgtggcctgttccatgcaggtagttgattccggctttccacatagggaggcgggccagcgcatctagttgtgttccgcaagttccatgtggaaattgagccattgagagttggataaatccttttaagactaatgtgtaatccgttttttcttctttcgtgagcgctcctaaaacgatggtacgggtaatatcagttgttccgtccaaatattgtgctccactgtccagcagcagcataccttcaggttttaaggggatatcggtttcggggcttgcttcatagtgaacaatagcgccatgagctttatatccggcaatggtgtcaaaactgataccattgaagtagtcttgtccggcacggaattcgtataatttcttatctatacttatttcggtttcatttccagtagaaacagctgttttcagccagcggagaaatttaaccatggctattccgtcgcgtttcatagcgcgatggaagccttctatttccgtctcattctttaccgcttttaaaaaaagtacaggtgaaggagctatttctattaaagaatgggtgcaggctgctgcatgaatggctgcattgatactagctgacaacaggagtttgccggtaaaatcttttaaatctttttcaattgttgaataaggtttcactgtaactccgttttctgctagatagtcttttacttcatctgacagtttattctctattatatataaggtggaactatattccgtgatgagaaggtaactcacaaaaaccggattgcagtgtacgtcacttccccgcaagtttagagtccatgccacttcatccagtgcagaaattagaatgcctgtgcaactgttacgacgggtggcttcttgtatttgagtgattttatccttgcaactgagaccggcatatttcaattcatgtataaaaactttgttgtcgggcaatgcaggccggtctgtccataattcattgaatggatcgggagtaagggttaagtgtatctggtttttttctaattctttctgtaagttgcttgtttcttgatagctgttaacccaaccgtctatacccacattatcttctgaattcaatacacagcccaaccactctacaatggaaggagtttccggtaatcgttctttgaataaagtaatgcctgtgttttccaattgtgcggtcgcttgaagaaaatagcgtgaatctgtccaaagtccggctttatccagcgttacgacaactgtacctgccgaacctgtgaaacctgatatccatttacgtgcttcccaatgtttggggatatactctcccgagtgggggtccgtactggggataataaaggctgaaagcttgtgtttacgcatgaaattgcgcagactaactattctatttataatttccgatttcattttaataggtttataatggtttgtactggaaagcaaagatacgatttctagattattttaaataaataattgcggaaagttttgtaaataaagaaagtatgtgtaattttgcgccgcaatttgactatctgaaaatattaataacaacatatttaataattaaaaacaatgattgtagtaccagtaaaagaaggcgaaaacattgaaaaagcgctgaagaagttcaaaagaaaatttgagaaaacaggtgttgtaaaagaactaagagctagacagcagtttgacaagccgtctgtattgaacaggctgaaaagagaacgtgctatctatgttcagaaacttcagcaagtagaagaataattaaaaactcgcacattctttgaataattgaattctttttcatatattcgttgctgaattgataagcgacgtttcttatgatgacagactcttttttggattatcttcggtttgaaagaaactattctgagaaaacaatagttagttatggaatagatctgatcaagtttgaagaatacatcaggggaaaagatgagaatgtcgattttacaacggtagatgctgatttggttcgtggttgggtgatgaacctgatagaggacggatatacatctgcttctgtaaatcggaaattgagttcactccgatcgttttatcgtttccttctaaagaaaggtgtgataggggaggatccgatgttgaaaatcattggtccgaaaaacaagaagcctcttcctgtatttctgaaagaacgtgaaatggaccgacttttggatgatgttccttttaaggaggattttacaggttgtcgggatagaatggtattggaaatgttttatgctacaggcatgcggctttccgagttaatagggctgaatgacgtggatgtcgatttctctgcatctctgataaaagtgacagggaagagaaataaacagcggttgattcctttcggtgaagaactgcgaagggcgatgtttgtttatttgaagataaggaatgaagtgttacctggaaaggctggggcgttctttgttttaaagaacggaaaacggatgtatcctggaaaggtatatcttttagtgaaacggaacctttcaaaagtggtatcgctgaaaaaaagaagtccgcatgtgttgaggcatacttttgcaactgctatgttgaataatgaggcagagttgggcgcggtaaaagaattactgggtcatagtagtctgactacaacggaaatctatacgcatacgacttttgaggaacttaaaaaagtttatgaacaagctcatccaagagcgtaaaaaaaggaggtatttatggaagttagaattcaagctattcatttcgatgcaacagaaagacttcaggattttatccagaagaagactgctaagttagaaaagtattgtgacgatataaataaagtggaggtgtcattaaaagttgtaaagcctgaaactgcaatgaataaggaggctagtatgaaagtgttggtgcctaatggagaattttttgcagaaaaggtgagtgatacatttgaagagtcggttgatgtgtgcgtagatgcgctttccaagcaattgacaaaatataaagaaaaactgcgcggtaaataaaaaaaatcgctgaaagtttttgagatttaaaataaatatctaactttgcagccgcttaaccatccaaggtggaatggttgtgaagttaggtatgacaagcctctttagctcagttggccagagcacgtgatttgtaatctcggggtcgttggttcgaatccgacaagaggctcaagaaaaggtgctgagaagctagttgttctttgaaaaataagttgggcaaataccagagtggccaaatggggcagactgtaaatctgctgtctttcgacttcggtggttcgaatccatctttgcccacactttttgagacttgaaaggtctttggtctttgcggaagtagctcagttgatagagcattagccttccaagctgagggtcgcgggtttgagccccgtcttccgctctttttttgctgttatagctcagtggtagagcacttccttggtaaggaagaggtcacgagttcaagtctcgttaacagctctttaataacgtaattgctgattattaatcaaataaataacaagtaaagctatggctaaagagaaatttgaacgttcgaaaccgcacgttaacattggtactatcggtcacgttgaccacggtaaaaccactttgactgctgctatcactactgtgttggctaaaaaaggtctttcagaattgcgttctttcgattctatcgacaacgctcctgaagaaaaagaaagaggtattactatcaatacttctcacgtagaatatcaaactgcaaatcgtcactatgctcacgttgactgtccgggtcacgccgactatgtgaaaaacatggttacgggtgctgctcagatggatggtgcaattattgtttgtgctgcaactgatggtccgatgcctcaaactcgtgagcatattctgttggctcgtcaggtaaatgtacctcgtttggtcgttttcttgaataagtgtgatatggttgatgacgaggaaatgttggaattggtggagatggaaatgcgtgaattgctttcattctatgatttcgatggcgataatactcctatcattcgcggttctgcattaggtgctttgaatggtgttcctcaatgggaagagaaagtaatggaattgatggatgcagttgatacgtggattccattgcctccgcgtgatattgataaacctttcttgatgcctgttgaagacgtgttctctattactggtcgtggtactgttgctacaggtcgtatcgaagctggtgttatccatgtaggtgacgaagttgaaatccttggtttgggtgaagataagaaatctgttgttactggtgttgaaatgttccgtaaattgttggatcaaggtgaagctggtgataatgttggtttgttgttgcgtggtatcgacaaaaacgaaatcaaacgcggtatgattttgtgtaagccgggtcaggttaaggctcactctaagtttaaagctgaggtttatatcttgaagaaagaagaaggtggccgtcatactccgttccacaataaataccgtcctcagttctacttgcgtacaatggactgtacaggtgaaatcactttgccggaaggaactgaaatggtaatgcctggtgataacgtaactattacagttgagttgatttacccggttgcattgaatgtaggtttgcgtttcgctatccgcgaaggtggacgtactgtaggtgctggacagataacagaacttcttgactaacacttggataaatatatatgatcagttctcggtcgtaaggcttcgggaactgatttttacgggagtagctcagttggtagagcaccggtctccaaaaccgggtgtcgggagttcgaacctctcctcccgtgctaaacttgaaagaatatgtttcagaaagtagcaaattattgtaaagaatcttacgacgaattagtccataaagtatcatggccgactcgtaaagaactttctagtagcgcagtggttgttttatatgcttccctactcattgcgttagtcgtttttcttatggattcagtcttccagtttgtaatggaggatattatctatccgcactaattaattgaataaaatgtctgagattgaaaaaaagtggtacgtattacgtgctgttagtggaaaagaaagcaaggttaaagaatatcttgatgctgacattaagaacagtgaccttagcgagtatgtgtctcaggtgttgattcctaccgagaaagtgtatcaggttcgcaatggtaagaaaattgtgaaagaaagaagttatcttcccggatacgttttagtcgaggccgctttggtcggtgaagttgctcatcatttgagaaacactccgaatgtaatcggcttcttgggaggttccgaaaatccggttcctttgagacaatcggaagtgaatcgtatacttggtacggtggatgaacttcaggaaagtggtgaggaacttaatgtaccttataccgtaggcgaaacagtgaaagttaccgttggaccgttcagtggcttcagtggtctcattgaagaagtgaacaccgaaaaacggaagttgaaggttatggttaagatcttcggacgtaaaactccgctggaacttggctttatggatgtcgagaaagaataatgcattctgttacgtgcattggactttcgctataattaatatataaaaattagaaacaaaatggctaaagaagttgctggactaatcaaattacagattaaaggaggcgctgcaaatccatcacctcccgttggacctgctttgggttctaagggtattaatatcatggaattttgcaagcaattcaatgccagaacccaggacaaagcaggtaaaattttacctgtaatcattacctactacgcagataagtcttttgattttgttatcaagactcctcccgtagctattcaattgcttgaattggctaagattaagagtggttctgctgagcctaatcgtaagaaagttgccgaaattacatgggaacaagttcgtacgattgctcaggacaaaatggttgacttgaactgcttcactatcgagtctgctatgactatggtagctggtacagctagaagtatgggtatcgctgtaaaaggggaattcccgggtaataactaataaacttcaattataatgggtaaactgacaaaaaatcaaaagttggctgcagaaaaaattgaagcagggaaagcatactcactgaaagaagctgcacagttagttaaagatattactttttctaaatttgatgcttcattagatattgacgtacgtttaggtgtagaccctcgtaaagctaaccagatggttcgtggtgtagtttcgctgcctcacggaacaggtaagcaagtacgtgttttggttctgtgtacacctgatgctgaagctgctgcaaaagaagctggcgctgactatgttggtcttgatgaatatattgaaaagatcaaaggtggatggactgatattgatgtaatcattacaatgccgtctatcatgggtaagatcggtgctttaggtcgtgttcttggtcctcgtggattaatgccgaatcctaagagtggtactgtaactatggatgtagctaaggctgttaaggaagttaagcaaggtaagattgactttaaggttgataagagcggtattgttcatacttcaattggtaaggtgtctttcactgcagatcagattcgtgataatgcgaaagaatttatcgctactatcatcaaattgaaaccaagctcagctaagggtacctatattaagagtatttatctttcaagtactatgagtaagggtgtcaagattgatcccaaaactgtagaagaaaactaataataaggaggaatcatgagaaaggaagataaaggcgttattattggtcagttggctgaaaccgttaagcaatacggacatttttacttggttgacacaactgctatggacgcagctaagacaagtgaactgagaagaaaatgtttcaaagccggtattaagctggttgttgtgaagaattctttgcttcacaaagctctgatgagcatggaagatgttgatttctctccgttgttcaattctttgaaaggtacaacttctgtaatgtttagcgaagtagctaacgctcctgcaaagttgttgaaagaatacaaagaggacattcctgcattgaaggcagcttatgctgaagaaggtttctatgtaggtgcagatcaactggatgctctctgcaatatcaagagtaagaatgaggttatcgctgacattattgcattgttgcaatcaccggcgaagaatgttatttcagctcttcaatcaggtggtaacaccattcatggagtacttaaaactctgggcgaacgcgccgaataatcaattttataatcaattagtaacaaacaattaaaatcatacaaaaatggcagatttgaaagcttttgcagaacaattagttaacttgacagtaaaagaagttaatgaacttgcaactatccttaaagaagaatacggtattgaacctgctgctgcagctgtagctgttgctgctggtcctgctgctggtgcagctgctgctgaagaaaaaacatcttttgatgtagttttgaagagcgctggtgctgcaaaattgcaggttgttaaagccgttaaagaagcatgtggtcttggcttgaaagaagctaaagacatggtagacggtgctcctagcacagtaaaagaaggcttggctaaagacgaagctgaatcactgaagaaaactttggaagaagctggagctgaagttgagcttaaataatattaacctgagtatcaggtaatacggttaggaatcctctggtagaggattcttaacctttttgtgtctatattattattaagttctacaaaatattaacaaatgtcttcaaatactgaaaatcaaagagttaattttgcttccattaagaatccgatgaagtatccggatttcttggaagtgcaattgaagtcattccaagactttttacagttggataccccgcccgaaaaacgtaagaatgacgggctgtacaaggtatttgctgaaaacttccctatcgctgacactcgtaataactttgtccttgaattcttggactattacattgacccgcctcactattcaatagacgagtgtctggagcgtggtctcacatacagcgtgcccttgaaggcgaaattgaagctgtattgtactgatcctgatcatgaagattttgacacagtcattcaggatgtttatctgggtcctattccgtatatgactccgaaaggaacttttgtaattaatggtgcagaacgtgtagtcgtttctcagttgcatcgttctccgggggtattctttggtcagagcgtacatgctaacggtacgaaattgtattctgcccgtattatcccgttcaaaggttcatggatcgaattcgcaacagatatcaataatgtgatgtatgcgtatatcgaccgtaaaaagaaattgcctgttactactctgctgagagctgtaggctttgaaaatgataaagatatcctcgaaatctttaacttggctgaagacgttaaagttaacaagactaatttgaagaaagtcgtaggaagaaaactcgctgctcgtgttttgaaaacatggacagaagatttcgtagatgaagacactggtgaagtagtttctattgaacgtaatgaggttatcatcgaccgtgaaactgtaattgaagaggagcatatcgatgaaattattgattcaggcgttcagaatatccttgttcacaaggaagaggcgaattcatccgactattctattatatttaatactcttcagaaagacccgagtaactctgaaaaagaggctgtgctttatatctaccgccagttgcgtaatgcagacccggctgatgatgccagtgcccgtgaggttatcaacaacctgttcttctctgaaaaaagatatgaccttggtgaagtaggccgctatagaatcaacaaaaagttgggtctgactacggatatggatgtgaaggtattgacaaaacaagatattattgaaatcatcaagtatctgattgagttgattaattctaaagcggatgttgatgatattgaccacttgagcaaccgccgtgtacgtacggtaggcgagcagttgtctaaccagtttgcgattggtttggcacgtatgtctcgtactatacgtgaacgtatgaacgtacgtgacaatgaagtgtttacaccgattgatttgattaatgcaaagacaatttcttctgttatcaattcattctttggtacaaatgctttgtctcagttcatggatcagactaatccgttggctgaaatcactcacaagcgtcgtttgtcagcgttaggtcctggtggtttgtcacgtgagcgtgccggtttcgaggttcgtgacgtacactatactcactatggtcgtttatgtccgatcgaaactcctgaaggtccgaatatcggtttgatttcttctttgtgtgtgtatgctaagattaatgagcttggctttatttcaactccttatcgtaaagtagctgatggtaaggtggatatatctgatgaaggtattgaatatctgacagccgaagaagaagaggataagattatcgctcagggtaatgccccgttggatgatgaaggtaaatttgttcgtgagaaagtaaaagcccgccgtgatgctgattatccggttgttactcctgaccaagtagagttaatggatgtttctccacagcagatcgcttctattgctgcttctttgattccgttcttggaacatgacgatgctaaccgtgcattgatgggatcgaacatgatgcgccaggcagttcctttgttgcgtacagaagctcctatcgtaggcacaggtattgaaaaacaattggttgaagactctcgtactcagattgctgcagaaggtgatggtgttgtagaatatgtagatgcaacgactatccgtatcctgtacgatagaaatgaagatgaggaattcgtaagcttcgaacctgctttgaaagaatatagaattcctaaattccgtaaaaccaaccaaagcatgactattgaccttcgtcctacttgtgataagggccaacgtgtgaagaagggtgatatcctgactgaaggatattcaactcagggtggtgagcttgcattgggtaaaaacctgttggtggcttatatgccttggaaaggttataattacgaggatgctattgtattgaatgaacgcgttgtacgtgaggacttgctgacttctgtacacgttgatgaatatattttggaggtccgcgaaacgaaacgcggtatggaagaattaacttctgatattcctaatgtgagtgaagaagctaccaaagatttggatgaaaacggtattgtacgtgtaggtgcacgtatcgaaccgggtgatatcttgattggtaagattactccgaaaggtgaatcagatccttctccggaagaaaaattgcttcgtgctattttcggtgataaggcaggtgatgtgaaggatgcttcattgaaagcttctccgtcattacgtggtgtcgttattgacaagaagttgttctcacgtgttatcaagagtagaagtgagaagaatgccgataaggctattctgcctaaactgaatgatgaattcgaagaaaaggcagcaaaactgaaagatattttgattgagaaactattggttttgactaatggtaaggtttcccaaggagtgaaagattatttgggaacggaagttattgccaagggggcgaagttcaccaaacgcgatttggaatcattggattatactattatccagttgagcaagtggacagctgatgctcataagaatgatatgattcgcgacttggtgatgaattatttgaagaaatataaagaattggatgctgaattaaagcgtaagaagtttgctatcactatcggtgatgaacttcctgcgggcattattcagatggctaaggtttatattgccaagaagcgtaagattggtgtaggtgataagatggcgggacgtcacggtaacaagggtattgtttctcgtgtggttcgtcaggaagatatgccgttcttagcagatggtactccagtagatatcgtattgaatccgttgggtgtgccttctcgtatgaatattggtcagattttcgaagccgtattaggtcgtgccggaaaagagttgggtgtgaaatttgctactcctatttttgatggtgcttctatggatgatttaaatgaatggacagataaagctggattgcctcgttattgtaagacttatctttgtgatggtggtacaggtgaacgctttgaccaacctgcaacagtgggtgtaacttatatgttgaaactagggcacatggttgaagataagatgcatgcccgttctatcggtccgtactcccttattactcagcagccgcttggtggtaaggcacagttcggtggtcagcgtttcggagaaatggaagtttgggcgcttgaagcattcggcgcagcacatatcttacaggaaattctgaccattaagtctgatgacgttgtaggacgctcaaaggcttacgaagctattgtgaaaggtgaacctatgccaactccgggtatccccgaatctctgaatgtattgttacacgaactgagaggtcttggcttgagtatcaaccttgaataataaaaaaatataactctttacattataaataaggaagtatggcttttagaaaagaaactaagataaagagtaatttctcgaaaatctcaattggcttggcttcacccgaagaaatccttgagaattcgagcggtgaggtgttgaagcctgaaacgatcaactaccgtacttacaaaccggaacgtgatggtttgttctgcgagcgtattttcggtccggtgaaagattacgaatgtcattgcggtaagtacaaacgtatccgttataaaggtattgtttgtgaccgatgtggcgttgaagtgactgaaaagaaggtccgtcgtgaacgtatgggacatattcagttagttgtgcctgtagcgcatatttggtattttcgttcattgccgaacaagatcggttatttgttggggctgcctacaaagaaactagacgctattgtatattatgaacgttatgtggttattcagccgggtgtgaaggctgaagatggcattaataaatatgatttgctttctgaagaagagtatttggatatcttggatacacttcctaaagaaaaccaatatttggaagatacagatccgaataagtttattgctaagatgggggcagaagctatttatgatctgctctcaactttggatttggatgctttatcttatgaattacgtcataaagcaagtaatgattcttcgcagcaacgtaagaatgaggctttgaagcgtctgcaggtagttgaatcgttccgtgcatctcgcggacgtaataaacctgaatggatgattgtacgtattgtgccggttattcctcctgaactgcgtccattggttccgttggatggtggccgttttgctacctctgacttgaatgacttgtatcgtcgtgtgattatccgtaacaaccgtttgaagagactgattgaaatcaaggctcccgaagtgattttgcgtaacgaaaaacgtatgttgcaggaggctgtcgattccttgttcgataactcacgtaaatcaagtgcagtgaagactgacgctaatcgtccattgaaatcactgtccgatagcttgaagggtaagcaaggacgtttccgtcagaacttgctgggtaagcgtgttgactactctgctcgttcggtaatcgttgttggtcctgaattgaagatgggtgaatgtggtattcctaaactgatggctgcagagctttacaagccgtttatcatccgtaagttgattgaacgtggtattgtgaagactgtaaaatctgcaaagaagattgtagaccgcaaggagcctgtgatctgggatatcttggaacatgtcatgaaaggtcatcctgtattgctgaaccgtgcgccgactctgcaccgtttgggtattcaggctttccaaccgcatatgattgaaggtaaagctattcagttgcacccattggcttgtacagcgttcaatgccgacttcgatggtgaccagatggcggttcacttgcctttgagtaatgatgcgattctggaagcacagatgttgatgcttcaggctcataacattctgaaccctgctaatggtgctcctattactgtgcctgcacaggatatggtacttggtttgtattatattaccaagttgagaaaaggggctaaaggtgaaggcttgactttctacggtccggaagaggctttgattgcttataatgaaggtaaagtggatattcatgctatcgtcaacgtagtggtgaaggacttggacaaagatggcaaaatcgtagatgtgatgatgaaagaaacctccgtagggcgtgtgattgtaaatgaaatcgttccggcggaagtggggtacttgaataccattatttccaaaaagtctttgcgagatatcattagtgatgttatcaaagctgtcggtgttgcacgtgcttgtgaattcttggatggtattaagaacttaggttactatatggcgttcaagggtggtctgtcatttaacttgggtgatattattatcccgaaagaaaaagaagaactggtaaaacgtggtaatgaggaagtggaacagattatgatgaactataacatgggtttcattactgacaatgaacgttataaccaggttatcgatacatggactcacgtgaacagtgacctgtctgatatactttacaagacgattaagaatgatgaccaaggcttcaattcagtatttatgatgcttgactccggagcccgtggttctaaagagcagattcgtcagttgtctggtatgcgtggtttgatggcgaaaccgcagaaagccggtgctgaaggcgcacagattattgaaaaccctattctttcaaactttaaagaaggtttgtctgtgttagagtattttatttctacccacggtgctcgtaaaggtttggcggatactgcgttgaagactgctgatgcgggatacttgacccgccgtctggtagacgtgtcgcatgatgtgattatcaatgaagaagactgtggaacacttcgtggtttggtttgtacggccttgaagaataacgatgaagttattgctactttgtacgaacgtattctaggacgtgtttctgtacatgatatcgtccatcctactactggtaaactgattgtagccggtggagaggagattacagaggatattgcgcaggaaatcgaggattctccgattgaaagcgttgaaatccgttcggtattaacttgtgaatctaaaaaaggggtatgcgctaagtgttatggacgtaacttggcatccagtcgtatggttcagaaaggtgaagcagtcggtgtaatcgctgcccaatctattggtgagccgggtacacagttgacattgcgtacattccacgccggtggtatcgcaggtaatatggctgctaatgcaagcattgtcgccaagaataatgcacgtttggaattcgaagaattacgtacggtagatacggttgatgaaatgggtgaggctgtgaaagtggtagtcggtcgtttggctgaagtccgctttatcgatgtgaatacaggaattatcctgtcaactcataacgtgccttatggttcaaaattatatgctgcggacggtgatattgttgagaaaggaaaactgattgctaagtgggatccgttcaacgctgttattatcacagaggctactggtaagattgaattcgagagtgtggttgaaaacgtaacttataaggtagagtctgatgaagctaccggtctgcgtgaaattatcattatcgagtctaaggataagaccaaagtaccttctgcccatattgtaaccgaggatggtaatttgatccgtacttataacttacccgtgggggggcatgttgtggttgaaaacggtcaggcagtgaaagctggtgacattattgtgaagattcctcgtgctgtaggcaaggctggtgatatcaccggtggtcttcctcgtgttacagagctgtttgaggctcgtaatccatctaatcctgctgtcgtttctgaaatagacggtgaaattactatgggtaagattaagcgtggtaaccgtgaaattattgtcacatctaagacaggtgaagtgaaaaagtatttggtgaatctgtctaaacaaatattggttcaggagaatgactacgttcgtgccggaactccgctgtctgacggtgcgattactcctgctgacattttggccattaaaggtcccacggctgtacaggaatacatcgtaaatgaagtgcaagacgtttaccgtttgcagggtgtgaagattaacgacaaacactttgagattattgttcgtcaaatgatgcgtaaggtagaaatcgatgagccgggcgatactcgcttcttggaacagcaggtagtggataagcaagagtttatggaagaaaacgatcgtatttggggcaagaaagtagttgttgacgctggtgattctcagaatttgcagccgggtcagattgttactgctcgtaagttgcgtgatgagaacagtatgttgaaacgtcgtgacttgaagcctgttgaggtacgtgatgctattcctgctacatctacccagattttgcaaggtatcacccgtgccgctttgggaacttcgagtttcatgtctgctgcatcattccaggaaacaacgaaagttttgaatgaagctgctattaatggtaaggttgatagattggaaggtatgaaggaaaatgtgatttgtggtcacttgattcctgctggtactggtcagcgtgaattcgaaaagattattgttggttcgaaggaagaatatgaccgtattcttgccaatcgtaagaatgtactcgattatagtgaggtagagtaattttaatatatacactgtaaaagaggctgatttctgtctaagaaatcagcctctttaggtttattatagtagatgctataggaaaattatatagaataataagtatgttgtattattacaaataaatgtctatatttgtactccaaccaaagaataggagttggggatattgagattcagaatattttttaatgctaaagtataaaatcatggaaaacgaaaaaaataataatcagttgcagatagagttgaaagaagaagtagctcaaggaacgtatgcaaatcttgccattatcacccattccagttcggaatttattgttgattttgtgcgtgtaatgccgggattgcccaaagctggagtgcagtcacgtattgtactgacccctgaacatgcaaaacgtttgatgtatgcattacaggagaatgttgcaaaatacgaacgtaattttggacctattcgaatgccggaagaaatgaatgggggaaataatggaccggatggaaaaacattcattcctcctataagcggatttaaaggggaggcataagggcttttgtagcaaaaataacatagtagtctgtttttcaaaaactttttttgagaaacagactatttttattagtagaaagtattgtttattaaaatgttattcgtaactttgcagcccaaaatgtatagttttggacttagtatagcaaattaataaacaatatataataattaaaaatcaaacaaaatgcctactattcaacaattagtaagaaaaggaagagaggttttggttgagaagagtaaatctccggcactggattcatgtcctcaaagacgtggcgtttgtgttcgtgtgtatactactactccgaaaaagccgaattcagcaatgcgtaaagttgctcgtgtgcgtctgactaactctaaggaagtaaactcttatattccgggagaaggtcataacttgcaggaacactcaatcgtgttggtgcgtggtggtcgtgtgagagaccttccgggtgtacgttatcacatcgttcgtggtactttggatacagctggcgtagctggtcgtacacaaagacgttctaaatatggtgctaagcgtcctaaagcaggacaagctgcagctcctgcaaaaggaaaaggaaagaagtaaaccgtaactgaattcctgaaacaaagaatatttaatttaagttttggtttgttggaataagctataaaggttgagtaaatgtttcagaggaagcgttgaagtaaacggaaaaagtgcagccccaaacaaaaacattattttgagaaaaaaatgagaaaagcaaaaccaaaaaaacgtgtgatccttccggatccagtatttaatgatcagaaggtttctaaattcgtaaatcacttgatgtatgatgggaaaaagaatacatcttatgagatcttctatgcagcactggaaacagtgaaaacaaaacttcctaatgaagaaaaatcatctttggaaatttggaagaaagctttggataatgtaactcctcagattgaagtaaagtctcgtcgtgtaggtggcgctactttccaggttcctactgaaattcgtcctgatcgtaaagagtcaatctcaatgaaaaatttgattcttttcgctcgtaaacgtggtggtaaatcaatggcagataaactggcggctgagattattgacgcttttaacgaacagggtggcgcttacaagcgtaaagaagatatgcaccgtatggctgaagctaaccgtgcattcgctcactttagattctaatcaagtaataattaataagtaaaggacgaaaatggctaaacatgatttgcatttgacccgcaatatcggtatcatggctcacatcgatgccggtaagacaacgacttcagaacgtattttgttctacactggcttgactcacaaaattggtgaggtgcatgatggtgcagcaacaatggactggatggagcaggagcaggaacgtggtattactattacatctgctgctactactactcgttggaaatatgcgggaaatacttataaaataaacttgattgatactccggggcacgttgattttactgctgaagtagaacgttctttacgtgtcttggatggagctgttgcagcttattgtgcggtaggtggtgttgaacctcagtcagaaaccgtatggcgtcaggctgataaatataatgttcctcgtatcggttacgttaataaaatggaccgttctggtgctgactttttcgaagtcgttcgccaaatgaaggatgtattaggtgcaaatgcttgccctgtggtaattcctattggtgctgaagagagtttcaagggggttgttgatttgatcaaaatgaaggctattttgtggcacgatgaaacaatgggtgcagattatagcgtagaagaaattccggcgaacttggttgatgaagctaatgaatggagagaaaaaatgctcgaaaaagtagctgagtttgacgatgctttaatggagaaattctttgacgatccttctacaatcactgaagaagaaatcttgcgtgctttgcgtgcaggtacattgaagatggatatcgttccgatgttctgtggctcttcattcaagaataagggagttcagacattgcttgactatgtttgtgcattcttgccttctccgttggatacgcctgctatcgtaggtactaacccgagcacaggagcagaggaagatcgtaaacctagtgaggatgaaaaaacgtcagctttggcatttaagattgcaactgacccctatgtcggacgtttgactttcttccgcgtttactctggtaagatagaggctggttcatatatctataacactcgttcaggtaaaaaagaacgtgtgtcacgtttgttccaaatgcactcaaacaaacagaatcctgtagaggtgattggagctggtgatattggtgccggtgttggtttcaaggatatccgtacaggtgatacgttgtgtgatgaagatgcaccgattgtgttggaatcaatggagttccctgatcctgtaattggtattgcggttgaacctaagactcagaaagatttggacaagttgtctaacggcttggctaaattagctgaagaagacccgacatttactgttaagactgacgaacagtctggacagactattatttccggtatgggtgagcttcatttggatattattatcgatcgtctgaaacgtgagtttaaagtagaatgtaaccaaggtaaacctcaggttaattataaggaagctatcactaagactgttgaattgcgtgaagtttataagaaacagtctggtggtcgtggtaagtttgccgatatcattgtgacaatcggtccggttgacgaagactttacacaaggcggtttgcagtttattgatgaagtgaagggaggtaatgttcctaaggaatttatcccatcagttcagaaaggtttccagaccgcaatgaagaatggtgtattggctggctatccgcttgattcactgaaagtagttttgaaggatggttcattccatccggttgactctgaccagttgtcattcgaaatctgtgctattcaagcctacaaaaatgcatgtgctaaagcaggtcctgtattgactgagcctattatgaaactggaggtcgtaactcctgaagaaaacatgggtgatgttattggtgacttgaataagcgtcgtgggcaagtcgaaggtatggaatcaagccgttctggagctcgtattgtaaaagctaaagtgcctttggcagaaatgtttggttatgtaacagctttgcgtactattacttcaggtcgtgcaacatcatctatgacttacgatcatcatgctcaagtttccagctctattgctaaagctgtacttgaagaagtgaaaggtcgcgtagacttagtataataaaaaagcaggggcaacgggttagcgaatgactcttaatccggccccactttatatttaatcatttttaatttaaaatctaatgagtcaaaaaattagaattaaactgaaatcttacgatcacaacttggtagacaagtctgctgaaaagatcgttagaacagtgaaggcaacaggtgctattgttagcggtcctattccattgcctacacacaagcgtattttcacggtaaaccgttcgactttcgttaacaagaagtcacgtgaacagtttgaattgtcttcttacaagagattaatcgacatctatagctcaacagctaagacagtagacgctctgatgaagttagaattaccgagtggagttgaagtagaaattaaagtttaatgcatttaaaaattaactgaaatgccaggattattaggaaagaaaatcggaatgacatccgttttcagtgctgatggtaaaaatgtaccatgcactgttatcgaagctggtccttgtgtagttactcagattaagagtgttgagaaagacggctatgcggctgttcaggtaggtttccaggacaaaaaggaaaaacatactaccaaacctttgatggggcactttaaaaaagctggtgtaactccgaagagacacttggccgagttcaaagattttgaaacagaattgaatttgggagacactattacagtggaattattcaatgatgcagcttatgttgacgttgttggtacttctaaaggtaagggcttccaaggtgtagttaaaagacatggatttggtggggtaggtcagactactcatggtcagcacaaccgcgctcgtaagccgggttctatcggtgcatgttcttaccctgcaaaagtattcaaaggaatgcgtatgggtggccaaatgggtggtgaccgcgttactacacataacttacaggtattaaaagtgattccggaacacaatcttcttttgattaaaggttcggtaccgggttgcaaaggttcaatcgtaataattgagaaataatggaagttaacgtattaaatattaaaggtgaagacaccggaagaaaggttacgttaaacgaatctatcttcggaattgaacccaatgaccacgctatctatttggacgttaagcagtttatggctaaccaacgtcagggaactcataaatctaaagaaagaagcgaaatcagcggttctactcgtaaattaggtcgtcagaaaggtggtggcggtgctcgtcgtggtgatatcaactctccggtattggtgggtggtgctcgcgtatttggtcctaaacctcgtgactattggtttaagttgaataaaaaagttaagacattggcccgcaagtcggcattgtcttataaagctcaagaaaacgcaatcattattgttgaagactttacatttgaagctccaaaaactaaggatttcgtttctatggtaaataatcttaaaattactgacaaaaagttgcttctcgttttgccggaagctaataaaaatgtatatttgtcagctcgtaacatcgaacgtgctaatgtggcaattgcttctgcattaaatacttacaatgtattgaatgctgaaactcttgttgttacagaaaactcgctcaaggctatcgagaatatcttatcttaatttaaaaaggaggcttagataatgggaattattattaaaccgttggttactgagaaaatgactgcaattaccgagaagttaaatcgattcggttttattgtacgtcctgaagctaacaagttggaaattaagagtgagattgaagctttgtataatgttacagtagtagatgtaaatacgctaagatactcgggaaagagtaaaagccgttacactaagtctggaatcatcaatggtcgtacgaatgcttataagaaagctatcgtaacattgaaagaaggcgatactattgatttttatagcaatatttaataaagatggcagtacgtaaatttaagcccacaacaccggggcaaagacataaaattattggtacttttgaagagattactgcatcggtaccagaaaagtctcttgtatttggaaagcgctcaacaggtggtcgcaacaacgttggtaaaatgacaatgcgctatatgggcggtggtcacaagagaaaatacagacttatcgatttcaagagaaacaaagacggtgtacccgcagttgttaaaactatagaatacgatccgaatcgttcggctcgtattgctttgctgttttatgctgatggtgaaaagagatatattattgctcctaatggattgcaagttggtagcacattgatgtctggagcgaatgcagcgcctgagattggtaacgcacttccgcttgaaaacatccccgttggtactgtaattcataatattgaattgcgtccgggtcaaggtgcagctttggtgagatcagctggtaattttgctcagttaacttcaagagaaggcaagtattgtgtgattaaattgccttcaggtgaggtaagacaaatacttagtgcttgtaaggctactattggtagcgttggtaactctgatcatggattggagtcttccggtaaggcaggtcgtactcgttggatggggcgtcgtcctcgcaaccgtggtgttgttatgaatcctgttgatcacccgatgggtggtggtgaaggacgtgcttcaggaggtcacccaagatcacgtacaggcttgtatgctaagggcttgaagacaagagctccgaagaaacagtcttctaagtatattattgagagaagaaagtaataactgattaattgagtaaattatgagtcgttcattaaaaaaaggtccatatattaacgttaaacttgaaaagaaagtgcttgctatgaatgaaagcggcaagaaggttgtcgttaagacttgggctagagcttcaatgatctcgcctgattttgtagggcacacagttgcagttcataacggaaataaatttattcctgtttacgttacagaaaacatggtaggacacaaattgggtgaatttgcaccgacacgtacattccgcggccatgcaggtaataagaaaaaataagcaggataatctgaagaaataataaagtaataaataatgggagcaagaaaaaaaatatcggctgaaaaaagaaaagaagcccttaagaccatgtattttgcaaaattgcaaaatgttcctacctctccgcggaaaatgcgtctcgtggctgacatgattcgtggtatggaagtgaaccgtgcactgggtgtcttgaagttttcttctaaagaagcttctgcaagagtggaaaaactgttgcgctctgctattgctaactgggaacagaaaaacgaacgtaaggcagaaagtggcgaattgtttgtaacaaagatttatgttgatggtggtgcaacactgaaaagaatgcgtccggctccgcagggaagaggttacagaattcgtaaacgttcaaatcacgtgactttgttcgttgattctaagagtactaatgataatcaaaattaagactagatgggacagaaagttaatccgataagcaaccgtttaggaattatcagaggatgggattctaattggtacggtggcaatgattatggtgatgctttgttggaagacagcaaaatccgtaaatatttgaatgccagacttgcaaaagccagcgtttcaagaattgttatagaacgtacactgaaattggtgacaatcacagtttgtacagcgcgtccaggtattatcattggtaaaggtggtcaggaagttgacaaactgaaagaagagttgaagaaaatcacggacaaagatattcagatcaatatctttgaggtgaagagacctgagttggatgctgttattgtagctaataatatcgctcgtcaggtagaaggtaagattgcctaccgccgtgccatcaagatggctatcgctaacacaatgcgtatgggtgctgagggtatcaaagtgttgatttcaggacgtttgaatggagcagaaatggctcgttctgaaatgtataaagaaggaagaactccgttgcatactttccgtgcagatattgactactgtcatgcagaagctttgactaaagttggtttgctgggtattaaagtatggatttgccgtggtgaagtgtatggtaagagagaattagcgcccaactttactcagactaaagaaagcggtcgcggtggaaacggcaacaataacggtggtaagaacttcaaaagaaagaaaaacaatcgctaacggatttgaattttaggaattatgttacaaccgaaaaagacaaaattcagaagacagcagaagggcagtcagaaaggaaatgctcaaagaggaaaccaattggcttttggatcatttggtattaaatctttggagactaaatggattacaggtagacaaattgaagctgcacgtattgcggtaacaagatatatgcaacgtcaaggacagatttggatccgtattttcccggacaaacctattactcgcaagcctgctgatgtgcgtatgggtaaaggtaaaggtgctcctgaaggtttcgttgctccggttaccccgggacgtattattatcgaggcagaaggtgttccttatgaggtagctaaagaagctttgcgtcttgcagcacagaagcttcctgttactactaagtttatagttagacgtgattacgatgctcaaaatcaaaatgcttaatttattatgaagattgcagaaattagagaaatagctaccaatgaattggcagaaagaattgaagctgaagtagccaattacaatcagatggttttaaatcattctatctctccgctggataatcctgcacagattaaaaagttacgcagaacgattgcgcgtatgaaggcagaattgcatcagagagaacttaacaaataataatggtcctcatggaagctagaaatttaagaaaagaaagaacaggtgttgtagtaagcaataagatggataagaccattactgttgctgctaagtttaaagaaaaacaccctatttatggtaaattcgtttctaaaacgaaaaaataccatgctcatgatgaaaagaatgaatgtaatgtaggtgatacagtacacatcatggaaactcgtcctttgagcaaaactaagagatggagattggttgaaataattgaaagagctaagtaattatgatacaagtagaatccagacttacagtgtgtgacaacagtggcgctaaagaagctctttgtatccgcgtattaggtggtacaaagagacgttacgcttctgtaggggatgtcattgtagtttctatcaagagtgtaatcccctctagtgatgttaaaaaaggtgcagtatcaaaggctttaattgtacgtactaagaaagaaatccgtcgtgctgatggttcttatattcgttttgatgataatgcttgcgtattgttgaataatgcaggtgaaattagaggaagtcgtatttttggccctgttgcaagagaattgcgtgctgcaaacatgaaagtggtatcacttgcacctgaagtactttaattttgtaaaagatttaagtaatgagtaaattacatataaaaaaaggcgatacagtttacgtaaactctggtgaagataaaggtaaaactggccgtgtgctgaaagttcttgttaaagaaggacgtgcacttgtagaaggtatcaatatggtatcgaaaagtaccaaacctaatgcaaagaaccctcagggtggtatcgtgaagcaggaagctgctatacatatctcaaacttgaatgtggttgatcctaaaacaggcaagccaacacgtgtgggaagaagagaaagttctgatggtagaacatttgttcgttatgctaaaaaatcaggagaggagattaaataatgagtaatactgctagccttaagaaagaatatgcagagcgcattgcgcctgcattgaagaatcagttccaatattcttcaacaatgcagatccccgtacttaagaagattgttattaatcaaggattgggtatggctgttgctgacaagaagattattgaagttgctattaatgagttaacagcaattacgggtcagaaagctgttgcaacagtttcacgtaaagatatcgctaactttaagttgcgtaagaaaatgccgattggcgtaatggtgactttgcgtcgtgaaagaatgtatgagttccttgaaaaacttgttcgtgttgctttgccacgtattcgtgactttaaaggtatcgaaagtaagttcgatggaagaggtaattatacattgggtattcaggaacaaatcattttccctgaaataaatatcgatagtattactaaaattctcggaatgaatattacctttgtaacttctgctccgacagatgaagaaggttatgctttgttgaaggaatttggtttaccgtttaaaaactcaaaaaaagattaatatattatggcaaaagaatcaatgaaggctcgtgaagtaaaaagagccaaacttgtagccaaatatgctgaaaaacgtgctgcgttgaaaaagattgtcaactcaggtgatcctgctgaagcttttgaagctgctcagaaattacaggctattcctaagaatgctaatcctattcgtttgcacaaccgttgtaaattgaccggtcgtcctaaaggctatattcgtcagttcgggatttcaagaattcagttccgcgaaatggcttctaatggtttgatcccgggcgttaagaaagcaagctggtaattctttttatttttaaatattgtcagggtagtcctgattaatttaatttattattatatgacagatccaatcgcagattatctcaccagattgagaaatgcaattagtgcaaagcacagagtagtagaagtgcctgcctcaaatttgaaaaaggaaatcactaagatccttttcgacaaaggctacattctgaactacaagtttgtagaagatggtcctcaaggaactatcaaagtggctttgaagtacgactcagtaaacaaagtaaatgctattaagaaacttattagagtttccactccgggtttacgtaagtatacgggttacaaagacatgccgagagttattaatggtttaggtattgctataatatctacttccaaaggtgtaatgactaacaaagaagctgctgaactgaaaattggtggtgaagttctttgttatgtatattaataggaggataagcaatgtcaagaataggaaaattacccattagtattcccactggagtaacagttactctgaaggataatgtagttactgtaaaaggtcctaaaggcgaacttagccaatttgttgatccttctatcaatgttgcaattgaagatggacatgtgatgttgacagaaaacgaaaacgagatgttggataacataaaacaaagacatgcttttcacggcttgtatcgttctttggttaacaacatggttattggtgtttctgaaggttataagaaagaactggaacttgtcggtgtaggttaccgtgcttcaaacaatggtaatattattgatttcgctttgggttatactcataatatctttatgcagttgcctcctgaaatcaaggtagaaactaagtcagaaagaaataagaaccctcttattatattggaatcttgtgacaaacaactgcttggtcaggtttgctcaaaaatacgttctttccgtaagccggaaccttataaaggtaaaggtattaagtttgttggcgaagaaattcgtagaaagtctggtaagtcagccggtgctaaataatttacataaaattgtattatcatgacaacaaaattagaaagacgaatcaagatcaaatatagagtacgcaataagatttcaggtactactgaacgtccgcgtatgagtgtgtttagaagtaacaagcagatttacgttcaagttatcgatgacttgtctggtagaactttggctgcagcttcatctttgggaatggaagctatgcctaagaaagaacaggctgctaaagttggtgaactgattgctaagaaagctcaggaagctggtattacgactgtcgtattcgaccgtaatggttacttgtatcatgggagaataaaagaagtagctgacgctgctcgtaacggtggacttaaattttaatcaattatggcagttaataatagagttaagataactaacgatatagagttaaaagacagattggttgctatcaaccgtgttacaaaggtaacaaagggtggtagaacattcagcttttctgcaattgtcgttgttggaaacgaagacggtattattggttggggccttggtaaagcaggtgaagtaacagctgctattgctaaaggcgttgaagcagctaaaaagaacttgactcgtgttcctgtattgaaaggtacagttcctcatgaacagtcggctaaatttggcggcgctgaagtattcatcaagccggcttctaccggtactggtgtggtagcaggtggtgcgatgcgtgctgttttggaaagtgtgggtattacagatgttttggctaagtcaaaaggttcttctaatccgcacaacttggtaaaagctactattttagctttgggtgagatgagagatgcccgtatggttgctcagaacagaggcgtaagtatggaaaaagtatttagaggataaggaggaattatgtcaactattaagattaaacaaataaaaagtagaattggtgctcctgctgatcaaaaaagagtactcgatgcgctgggacttcgcaagatgaatcgtgtggttgagcacgaagaaactccttctattctgggaatggttgaaaaggtaaaacacctggttgccatcgttaagtaattcattgttaataaaaaaactaattacgatatgaatttaagtaatttaaaacctgcagaaggatctacaaagactagaaaaagaattggccgtggccccggatctggtttgggtggtacttctacaagaggtcataaaggtgctaaatcaagatcaggttattcaaagaagattggttttgaaggcggacagatgcctcttcaacgtcgtgttccgaagtttggttttaagaatattaaccgtgtagaatataaagctattaaccttgaaactattcagaaattggctgaagctaagaatctgactaaggtaggtatgaatgactttattgaagctggtttcatttcttctaatcaattggtaaaagtactaggtaacggtagtttgactactaagcttgatgtggaagctaatgctttttcaaagagtgcggtagctgcaatcgaagctgttggtggtaatgcagtaaaactctgattcaatgagaaaatctattgaaacattaaagaatatatggaaaattgaggatctgagacaaaggatcctcattactatattatttgttgcaatttacaggtttggttcttacgtggttctgccaggtattaaccctgctatgttaactcagttgcataaacaaacgagtgaaggtttgttagccttgttaaacatgttctctggaggagcgttttctaatgcatctatttttgcattgggaatcatgccatatatctcggcatcaattgtaattcagcttttggcgattgctgttccctactttcagaaaatccagcgtgaaggtgaaagtggtagaagaaaaatcaatcagtatacccgtatattgacaattgcaattttggttttccaagctccctcatacttgcttaaccttaagatgcaagccggaccatcacttaatgcttcattagattggacattctttataattacttctaccatcattttggcagctggaagtatgtttattctgtggcttggagaaagaataacagataaagggataggtaatggtatatcattcatcattttgataggtattattgcccgtctgccacaatctttattccaggagttcgtttctcgtttggcttctccgggtgcaggtggtatcatcatgtttttgttggaaatagtatttttgttgttcgttattgcagcagcaattttgctggttcaaggcgtccgcaaagttcccgtgcaatatgcaaaacgtattgtaggaaacaaacaatatggtggtgcaagacaatatattcctttaaaggtgaatgctgcgaatgtaatgcctatcatctttgcccaggcaatcatgtttatccctattacattggtaggtttctcaaatgctgcaaccgcaagtggtattgtacgtgcatttgtagatcatactagcttctggtataattttgtttttgcaatattgattattgtgtttacatacttctatactgcaataacaattaatcctaaccagatggcagaagatatgaagagaaataatggttttattcccggaataaaaccaggtaagaatacagctgagtatatagatgcgattatgtctcgtattactctgccgggttctatattcttggctcttgtagccattatgcctgcatttgctggcatttttggagtaaaagctgagttcgcccagttcttcggtggtacatccttattgattcttgtaggtgttgtattggatacactccaacaggtagaaagtcatttgttgatgcgccattatgacggattgttaaattctggaagaatcaaggggcgtgctggtaatgttgctgcatattaattagtctgagatgatatttcttaagacagatgatgagatagagctgcttcgtcagagtaacctacttgtaggtaggactctggctgaagttgctaaattgataaaacccggtgtgacaactaaggaacttgacaaggtggccgaagagtttattagagataatggagctgttcctacttttaaaggttttccaaatcagtatggtgatcccttccccagtaccttgtgtacttcggtaaatgatcaggttgtacacggtattcccaatgatacccctttgaaagaaggtgatattgtttctgttgattgtggtacttatatgaatggtttttgtggggattcagcttatactttctgtgtaggagaagttgatcctgaagtcttgaaacttttgaagacaacaaaagaagctttatatttaggtatagagaatgccattcatggaaggcgtttgggtgatataggttttgctgtccagcaacattgcgaggctaattcctatggtgtggtaagagaatttgtaggtcatggcattggaaaagatatgcatgaagatccgcaggtacccaattatggaaaaagaggatatggcactctgttgaaaaagggtatgtgcattgccatcgaaccgatgataacattgggttcccgccaaatagtaatggaaagagatggatggacagtgcgtacacgcgataggaaatgtgccgctcactttgagcatacagttgcaataggagttgggaaggcagatattttgtcctcatttgaatatgtcgaacaagtattaggagataaagcaatttaatatggcaaagcaatccgcaatagaacaagatggagttatagttgaagcattgtctaatgcaatgtttcgtgttgagctagaaaacgggcatgagattactgctcatatctctggcaagatgagaatgcattacattaaaatattacccggggataaggtcagagtagagatgtctccttatgacttatctaaaggaagaatcgtttttagatacaaataaaaaagaaataagatatgaaagtaagagcatcattaaagaaacgtacgccggaatgcaaaatcgttagacgaaatggccgtttgtatgttattaacaagaaaaatcctaagtataaacaacgtcaaggataatttattatttttgcaaaaaaaataatttagtatatggctataagaatagttggtgtagatttgcctcagaataagagaggcgagattgcgttaacctatgtatatggtattggacgcagtagttcagcaaaaatcttggataaggctggtgttgacagagatgtgaaagtgaaagactggacagatgaccaggctgctagaattcgtgaaatcattggtgctgaatacaaagtagaaggtgatcttcgttcagaagtgcaattaaacattaagcgattaatggatattggttgctatcgtggtgtacgtcaccgtattggtctgccggttcgtggccagagcactaagaacaacgctcgtacacgtaagggaagaaagaaaacagttgcaaataagaaaaaagctactaaataataattgttgatatggcaaaaaaaacagtcgcagctaagaagagaaatgtgaaggttgacgctaatggacagttgcatgttcattcttcattcaacaacatcattgtatctttggcaaatagtgaaggtcagattatctcatggtcttctgcaggtaagatgggatttagaggttctaagaagaacactccttatgcagcacagatggctgcacaagattgcgctaaagtagcgtttgatcttggcctgagaaaggtgaaagcttatgtaaagggtcctggaaacggacgtgagtctgctatcagaactgttcacggagctggtatcgaggttactgaaattattgatgtaactccgcttccacacaacggttgtcgtcctccgaaaagaagaagagtttaatagataacctatttttatatgtaacttgattttgttaataatggattgcacttcctttctgtaatcgcggctgcaacaaattaagttcattagtaacaattaaattagaaaaagaaatggctagatatactggaccaaaatcaagaattgcccgtaaattcggtgaaggaatctttggagcagataaagttttatctaagaagaattatcctcccggacaacatggtaacaacagaagaagaaagacttctgagtatggtgtcatgttggcagaaaaacaaaaagctaaatatacttacggtgtgttggaaaaacaattccgtaacctgtttgaaaaggctgcaagtgctaacggtattaccggtgaaatcttgttgcagagtttagaggctcgtcttgacaacgtggtgttccgtttgggtattgctccgactcgtgctgctgcccgtcagttagtaagtcacaagcacattacagtagatggaaaggtagttaatattccttcattctctgtaaaacccggtcagattgtgggtgtacgcgaaagatctaaatctttggaagtgattgctaattcacttgcaggattcaatcatagcaaatatccttggttggagtgggatgaaagttctaaggtaggtaagttgttacatatacctgaaagagcagacattcctgaaaacattaaagaacacttgatcgttgaattgtactctaaataataattaatttcatggcgatattagcatttcaaaaacctgataaagtattaatgttggaagcggactccagatttggaaaatttgagttccgtccactcgaacccggtttcggtattaccgtaggtaatgctttacgccgtattcttctttcttcattggaaggatttgcaatcaatacgattaagatcgaaggtgtagaacatgagttcgcatctgtacctggtgttaaagaagacgtgaccaacattatcttaaatctgaagcaagtcagatttaagcaagtagtagaagagttcgaaaatgaaaaggtaagcattaccgttgagaattctagtgaatttaaggcaggtgatataagtaagtatttgactggatttgaagtgttaaatcctgaattggttatttgccatttagattcaaaagcaacaatgcagatggacattactattaataaaggtagagggtatgttccggccgatgaaaaccgcgaatattgtaccgatgttaatgtaattcctatcgattctatttacacaccgatacgtaatgtaaaatatcaggtggaaaacttccgtgttgaacagaagactgactacgaaaagctggtattggaaattactaccgatggttccattcacccgaaggaagctttgaaagaagccgctaaaatattgatttatcatttcatgttgttctctgatgaaaagattactcttgaaacatccgatgtggacggcaatgaagaatttgatgaagaagtattgcacatgcgccagctgcttaagactaagcttgttgatatggacctctcagttcgtgccttgaactgcttgaaagctgccgatgtggaaacattgggtgacttggtacagttcaacaagacagatctgttgaagttcagaaacttcggtaagaaatcgctcacggagcttgatgatttgctcgagggtctgaatctgtcgtttgggaccgatatctctaaatataaattagataaagaataaaaaatgagacataataagaaattcaatcatttaggtcgtactgcttctcatagaagtgctatgttatctaacatggcttgttctttgatcaagcacaaaagaatcactacgactgttgcaaaggctaaagctttgaagaaattcgttgagcctttaattacaaaatctaaagacgacacaactaattcacgtcgtgttgtatttagcaacttgcaagataagtttgctgtaacggagttgttcaaagaaatctctgtaaaagtagcagatcgtccgggtggttacactcgtatcatcaaaacaggtcatcgtttgggtgataatgctgaaatgtgctttatcgaattggtagattacgatgaaaacatggctaagactgcaactgctaagaaagcaactcgtactcgtcgttctaagaagagtgcagctgctacagaagctcctgcagcatcggcagctgaaactacagaggaagcccctaaagctgaataatctgtatatcatcatatatataaaagccatagctataaaagctgtggcttttttttattttatgccatgatcggcagtaatgagaaaacaagctgagagcgctttcgtccacataaatattacttgtcctgtttacaaaagttttgatatgaacgaagcatacagaacgagaacagcttttagattaaagccggaattaagaacactgaataattccttcaaaaccttcatggatagataactgcctgtatctcaaaaagaaatcatgaaggagttgagagctgatccttcatatcttttgataatccttcaaatctcctttaaaacaaaatacctttgatatttgttaattattgtatgaaatgaaacctaagaagctatttatgttatctttgtaactcaaacagtaagcaatgagaggatttgtaacagtcatattattttttctgtttgctttggcttttgccagaacagaatatgttgatgcagttccagctgcgttaatgacggtatgtactgtacagaatacggatactactccgcaggactccatcaatgaggatagtgtcattcccatggatagcaataagggaatagcagatatggagtttggggatgctcatactttagcacatcgtgtcagtgcttctgcagagcgtatgtaccgtttttcctccatagagactacccaatttataaagactttgttgcgtaagatggccgcccggatggccagtcttgcaagctgtcatacccatgtgtatgcctcttcccactcccttcattgggatagtgcttgcgagcactatatcttcggtatgaggcgtattctcatttagcttttattcttttaccaatttgttttttcatggttccgtcttgtcggtgatggcgagatgtgaccttggtatgaattattgtctttttaattagtaaagaataaaatttaaattattatgagtaatacagtttctactgaagcgaccttattttcaacaacacatcctgatgtcgtaaaacgtactagtatttcttctgttatcatatccgctatcctttgcgtgataggtgcaggtgcatttgcaacctctttaaagatgggggattcctcatccaccatgagtatggtgtttatggctggtggaaccattttgtttctgtgggccgtattccgccttttctggcgaagcaaggaatgggtatatgcacctaccggcagtgtagctaaagaaggagcctgcttctttgatgtatgcgatttacaggctttaacggaaacgttggagaaaaaaggttttgaaaccaagaatgacgtgaaagtaaagacaaacggaaacgtacgtatggactatatgatttctcaggataagaaattcgttgcggcccagttgttccgtttcatcccctatacatacgagcctgcatcttctgtgttttatttcacgggagacgatgcaagtgcgtttgtacattgcttggaaacaagtgaattttgattttctatgactctttatgttatgaaataaggtgtgcctgtgaaggtctgctttatttgcttaagacgttaatgtgataaattgtcgggtggggttagtcgttgatgattagccccatctttttcatcaggaagcaggcattcatattttgtgcgatgccttcacggagtttgtatgaaaaagtcagttcatcgttggtaatatcagcttcaaagcaataattccgtatctctttggggaaatattctattagtttccctaatagcaggtcgtgtgtggcaatgatgccattcgtcttcagttccatcagttggcgtaccagggcgaatgagcctttctgcttgtccatcgagttggttccttttaaaatctcatccagaat

SEQ ID NO: 14424 - DNA, 50946 bp, Unknown
  gut microbiota DNA sequence
gtaatcgcacttactaaaaacaatcgtctgcaaaccgaacgtctggaaggattgctacgcgaagaaatgaaagaaaaccgggacgaactgggaaaaaatattcgcgaacttcgtaacgaactgaatcaaaccttgaattattctatccgtaatatgcaggatactttgcataaaaacctgctgaccggtaatgaaatgcaacgggaaaaatttgaagcaatgggcaagcaacaggaagctttggtgaaaagtacggaaaaacgattggatgacatgcggcaaatggtagaagaaaaattacagaaaacattgaatgaacgtataggacaatcctttgagatagtacgttcgcagctggagaatgtacaaaaaggattgggagagatgaagggtctggcacaggatgtaggaggattgaaaaaagttttaagtaatgtgaagacacggggtacattcggagaagtacaattaggtgccttattggatcagatgctgagtccggaacaatatgaggcgaatgtcaaaaccaagaaaaatgcaacggaatttgtggagttcgccattaaacttccgggaaaggaaaataataatgatactgtatatttacctgtggatgccaaatttcccaaagatgtatatgaacaatatcaggatgcatacgaagccggagatgccgcattgattgaaacttcatcccgtcaactggaaatcacaattaaaaaaatggcaaaggatattcacgataaatatgtagacccaccttttacaacagattttgccattatgtttctgccattcgaaaacatctatgcagaagtgatccgccggaccgcgttggtggaaatgttgcagaaagactggaagatagtggttacaggtcctaccaccctgggagctatcctgaatagtttgcaaatgggattccgtacgctggccattcaaaaacgaacaagcgaagtatggaatgtgttaggggcagtaaagaccgaattcggaaagtttggaggattgctggaaaaggtacagaaaaatctacagaatgcaggagaccagttagaggaagttatggggaaacgtactcgtgccatagaacgtaaattacgccaggtagaagcccttccggcagaagacagccaacgaatgttgagtttgcccgaactgactgatgatgaagacgatgaataaaaggaggatttcaatatgagcatgacgtgggattttattttgagattgtttgtggcaggcgctttgggtactgttattggtctggatagggaatatcgtgctaaagaagccggttaccgtacccattttctagtatcactgggaagtgctctcattatgattgtatcacaatatggttttatggaagtagtgaagatggaggggatagacttggacccgagtcgtgtggccgcacaggttgtcagtggtatcggttttattggagcgggtactattatttttcaaaaacaaatcgtgcgcggacttactaccgctgccggaatttgggctacttcgggcatcggtctggccattggagccggtatgtactggctgggaatctcagcaacaatccttacgctgattggtcttgaggcacttagctatctttttaaaagtataggtatgaaaagttccatggtagagttctctacagacaataaagaaacactgaaccgtatggccaagaaattcaattccaaggaatacaatattgtttcctatcaattggacgaaaagaggttgggagaagtaacaacctattatgttacaatggttataaaatctaagaaatacaatgatgaaggtatgttactgacattattacaagattttagcgatattaccgttcacaggttggagtaagcttttccgacttggttcaaaagcagcgggggagagctcttattgaaagattctctcccctgtgctgtgatcatgcttttaatcgcataacaaacatacttccttctcccagcttactgtctactgtaagagtaccattatgggcctcgacaaaatctcgggaaatagacaggcctaaaccgcttccttgtactttagttccgggaacccggaaataatggtcaaagatgcttttatgataacgtggatcaatccctttcccgaaatcccgtacaaacatctcaatgaatccatcatctgtttgacgtgcccctattaccacacgaccgttttccggtgaataccggatggcattggaaagaaggttggttagaacccaagctatcttctcactgtcgacaaacagtttacctattttgtcttcagggtattccacttctatttgaatattaaatttttcagcttgtacacgattggcctttattgcatattctatcaactctataggtttggttatcttaggcttcaactgtagttttcctgattctacctgggtcatattcagcaactcgccggtgatattaagcagccgttcgctattttctttgatactgtttgccaaatcttcctgttcttcatttaaagctccgatacgctggtcttctaataattgcagactcatcataatagccgagataggagtcttcaattcatgtgagattgtagagataaacgtagtcttggccgaatccagttccttaaattcggttatattcttcaacataatgacatatccttttttttccatagtaaccccatctttccccggttgggaaatactcatgtattttacttggaaaaaactctccttattgtccgcataaatcttcagaggttctttcttttctttttccttgtctctgactggttctccaggaatttccaccaattcacgaatcaggcgacgcaacaaatcattgcgcagggaaatatcctgtgcagagtgtttaataacttcttcacgcttcaggttgatcacattcaatgcttcatcattgatgaaaaggatttccatatcattatttaaaccaatgataggctcgttgatactgttgatgatagtctccatatattttttagatgccatcatatcggataaagcacttgcatgataatcttccagacgtttggccatgcggttgaaatttttagatacttcagaaaattcttcactattgcttaattccaaacgttttttataattatggttcgcaatttcctgtatagcgttggtcaattctttaataggattatcaatcgatgcaggaagacgcagccacataccaataccaatacatatacatgcggcaccaacaacatatatccacaataaagcccgctgtaatccgggacctgctgccggactgtcaggttccgtggcggtcaatatttgcaaattcacaacagaaagtacaaccaatagtacaatcattgccaccaatacccctatggcaagggttagtttcgactttatattcataacttttattttttatgcaagtataatcaaatctatgtctatttcagctaaagagtttagaaattttcgatatttggaaagactgaataatgcacctggcattttgaaagtaggatgccccatacagacggttgtaattccacgttgacgacaagttttaattatttctcccataatatcggaagatgaaacttggataacttcaccgcctaactcggtaaccagtttaaaatggttaagtaaatgccgctgtgttgccaatggaatacgttccgtactctcggcaggtgtctgtacatagagggcaaaaaagaccgtattgtaccgggaagcaagccgtgccgctttacggataatatgtcggggagtccgttcattactactgatacatgccaaaaacttctcgtgccggatgcccttttcacctgttacaatttcattttcaactttcttctcgactcgaaaggccacttcttttagtgccagttcacgtaactgaagaatattctctgtcttaaaaaaattattcagtgccaactgaatcttttcaggacgatagattttcccggctttcaaccggtttatcagttcttcggcggtaaggtctatatttaccacttcatccgcatcctgcagcaccttatccggaatccgttctttaacttctatacctgctataccttttacgtcctcattcaaactttctatatgctggatgttaactgcagaaattacgtttataccggcatccaacaattccattacatcttgccaacgtttctcattccggctgccctcgatattggtatgtgccaattcatctactataactagttcgggatgtaactgaagaatggcatcaagatccatttcttccacttccttacctttgtaaaatatctttttccgagagataacaggcaatccttccaacatagcaacggttcctgcacgtccgtgcgtttcaatataacctatctgtacatctaccccgttctccaacatttcgtgagcttcttgcagcatacgataactcttccctacaccggctatcattccgatatagattttaaactttccacgccgtgaacgtttaatcaaatctaaaaaatgctgtacactttcttctctgtcttccatttgttactttatcatattagtgtaaatataacaattttccgcatatttaatatcagtccttttataacagacaaagaatataccaataaaacaaacggcttagttacaatgccataagcgtgtcattaaaaactaaagcttaccaaaatgaaaaggaactctttcaaaatgaaacactttcttaatcactataattattgctgttagatcccctagaatagtttattcctgcttttctagcttgtgtatgttgaaattggcgggctattttatattcacgttctccttttagtaatctgtatccagtttgtttaaaccaaaagctaatattattttctatacattgccgacgaatgtccaacacccagtcataattacatatgcgcgcttctttacctgattctccacctaccacaatctgttctacccatataccaagttctcccttgaagtttatagcggacaacaatggttcacagataatgattttatgctttacaggagctgctttataaagaggaagacggtaatccactctttcttgattttccatggtgcaacaaatggtaacattatcatacccgtccccccaatccggaggcagacattggctgagccggtctatacgtttagttataaacaagaaatgaagatcgtatcgttcccgcatcattttccatgcttctatacgccattcatcggcttcttctatcagaaaatcagaggtaaaacaagtatagacgagatttccggaagggatcttgtaagtcttatcctttttccgcctcacgggcagattgaattgtccggttttggttattatggaactgtctttcccatgtttactatctccgcgatatacataacaatgccggcaacctgtacttagcttatggcagccatgccaaggattccatagagaagactccggacttattctattttccattctgtttgaataaaatttatcattttattattgtctgcaaagttagctaaagtcttttcatcatttacataattcattcctgaatttcttcaaaaagaatgggagtgttatagttaatgcaaatggattaatgtacctttgccgatataatcaattaagccactaacaagaataaattttataatgtagagtataaaacaaaaaacttattatatgaacacagacgatagaaaatgggagattattgaaagtgaatatcttatccgccgcccttggctgaccgcacgccgtgatcgggttaaattacctacaggagttgaaattcctgaatattatattttggaatatcctgattgggtaaatgtaattgctatcaccaaagagggtaaattcgtattagtacgccaataccgtcacggaataaaagaaacacgttatgaaatttgtgccggagtttgtgaaaccggagaagaacctttgctttctgcccaacgcgaattgtacgaagaaacagggtatggtaatggaaattggacaaaacttatgaccgtctctgcaaatgccagcaccatgacaaatatcactcattgttatctggctacggaggtagaacgaatctccacccagcatttggaagaaactgaagatttgacagtgcatttgctgagtgaagaagaaataaaagcgttgttattgaatgatgaagtaaaacaatcattgatggcagcaccgctttggaagtattttgctttatattctcattcatagttcaatcacccaaatacattttcagggaggattttgccctctctgaaaatgttttttggcttaaaggataaagtaatctagaaccactttgcccataaaatattggagttctccggagaattgattttgacaggttattctaaatgtctttttatctgttccttatcatttcaacaaaggtaattgatttaacatttctttaattctgatagcaatccgtggcatcggttcggcaacggttagacctactatttctttttctttggcaatatcattaataacgcggaccacttctgccaatttcattccatcgggaactacccctacggctgctataatttcggcagggtcgagcacatccatatcaaaatgaattaacacgcgggatgctccacatgattttaaccattcatatatagcattactattttgtgctacatcttccggagtaagatgttttataccatattgtttctggcggacttttatttcatcacgttcccaatcacgcaatcctacgagcagaatctttgagggggctatttgggccggtagcttggaaaggatttccttgtcgcctttccccatgcaggtagtaacagccatggcatggaatccgctgtacatatctccgggaagtgttatatcaggatgggcatcaatccaaatcattgccacatcatctttatatttctctgcaaggtaggtaaacggaacgacactgacagaacattctcctccaagagttactattttatcaggatcactgatacgcaacaagtcaagagcagctttagtctgtttcacaataatgtcgcggtctagtacaccatccttttttctacgttctgtaatttctgttgaaatgggaactgtcagtgtttcttgactgctgtcgggagccaagaagttaagcaattctgcccctaagaagtatccctttgatgctgcttcgggatcttttatttcagtaatccaccgagcaatatcacctccttgccattgcggataaatcaaacgaattgtttttgttttcttttccatactttgattattaattgaatttttctgttgtgcattaatagaaatcacattaacagccagtaatattatcagagataaccactttttcattatatcattattatatatcccattattcctatatctgaatctgtctgcaaatttataattacccgatggtttgcgcaagtagggataaattaatcagtatatgaataatttatccctataacatgaaaagagtagaagctattctttccatgttatttcaatatgattaattttgcagaaaaaagaagatttatgtacagaaagaaaataccttttgatataaactgcggtgtgaaaatagcgatggaagtgattggtggaaaatggaaaagctgcattattcaagaattggacaaaggcccgaagcgcccgagtgaacttcatcgttactttgatgatgccagcccaagggtaatcaaccaacaactgaaagaactggagattcatggcatgatacagaaaaagattttttcggaacttcctccccatacagaatattccattacagagcaaggtagaacactgcttcccattattgaacaattagaaaaatggggagatggattccgaccgcaaatgaagaaaatattaggaatggaagactaagttcaacaagatatgattctttatcaattcggttttctgattgaaaatgaattactttgtcaattagaaaacgttttaaaaagagggtaattaaaactattatcataaaacaatttaaagccttataggctgtaaaattccattcattaaaacgcccacaagaatatgctttgctgctcaatgtctcatctgtttatctgaatgaggcggtgaaaaagacgactgggtataagtgcctatgtactgaaaagcgctttaatggaaatgcttgatatataaaaaagcgagtgcagatactccttgaacagaatgtctgcactacttgaatatgttttagaaggtcactttactcttctttccactaaccttgaaagggatttattttctttgctataaaaaatgcatatccatagtattctttatacttactatataattcagcttcatggcagatggatgccatcagtttttcagctgttttattccctgcatacttcttgataaacatttctttggctttggcctgcggaacataataatgttctgtccagcaattctccggaagaatgaacgtagcaacgggaatatatcccgctttttgtatttgtactactttattaggaattgtatctatttccgtgtaagcattcatccagaaatcatgaatctctgccggacggtgatcggtaaaccagacactttcagaaacggcaaggtatcctcccggtttcaaataattgcgccactcgttcaatcctcgttcaaaaccgatattataaatagctccttccgaccaaatcaagtctagggattctttttcaaaagaaagggcatccattgagccgactacaccttttactctatcctgtaaatttaacttttcggcattcctgttgaagcattcaataaattccggaaagaagtcgagtcctgtaatacttcccggtgtatgttgtgccaataccattgtctgacctcctgtcccacaaccgagatcggcgataagggattgaacagtgagattatttataaagcttagtgcttttaaggttgcttcgggacttccgggaccttgccggtttgtatttaaaaagaaatcacagattaaatttacgtcgaactcttggattgtattatgattattatcgttattcattattgtaaaacattgagggcatacaatcccattatttgtatgcggattaaaagatcaattataaataatataaaattgctctcaaaagacattctgagagtaaaaacgactggacaatctattctataaaaacagattgtttacgacaccaaatccgatatatgagtttttaacatattgcaaagatacatttattttattgaattgtaaatagattattcataaaaagaattattcttctgtccgattcattgaaagtgatagaaaataatgtttaaatttagtaaggatttgatcgtttccactcttttaaaaccctattttacgtttcaaataaatcatatcttttagtaaaaccccattgtcaatgataggatgatcgtaattctccgtgaaaaaatcttttatacaatgagaatattcaaaaccgcaacttttataaaatgcaagagtgccgggaacgtctcccgttcccaccatcatctgagtatattcttttgagtaatggtttatcaggtaatttattagttttctaccatatccttgtcgttgggcactaggggtaaccgctatattcttcaattcacaaattttcggaccttcttttgttacaacacaaacagcttttatcccgttatcttccaatacaaacaagtcaccgcgctccaaatatcggtctatcattatttcctgttcatccccaagcaataataaatccagatattgctttttatttctagatattttaacgatgtgataatccataatattatatttatgacattcttgtctttattttcatagacagtacaaaatagcactattttaacgattcctggcatatcggtaaatagcagccgaaatatcagagatgatcttagtattcgtttccatattttcttttgagtctttgacaaatacggctactacgtatcggttcccatcaggtagaattacaaaaccaatgtcattgatgccaatgtattccccccgttcattcttatcggaagttcctgtcttatgtcctatcttgacttcactttcgggaaggggagcaggtagtctgtctttacctgtctcacactctatcataatatgttttagaaaatttgtatattcatttttcatggaatcttgagtcataaaaagttccaatagattggctgcttccattggtgttgtccagtttttgtaacaatcatccatgtcttgatgcatctcatcttcggtagtagttatagaaacatcgtttattcccaatgaatgaatgtattcatccaccacgtttacaccacctatataatcgaataaaatatcacaggctacattgtcacttaactgcattgtataagctaaaagttcactaatcggaagttccaaattaccttggggatatttatcacgcaaagggctgtatgtatccggtttgaaataccttttatcaagatatagggaagtggaaagtggaatatgccgtttttgcaggtaatcacatacagccaatgcctgatgaaacttataaacgctcatcatgggatatttttcggcattatttatggccagcgtatcttctccatccagtatcaaagccactcctatagttgctttcttatctttaataatatgtcgaatttctgtttttaatgttttcaatgaatcttgggatttattctgaacacatccgccagacaacacacaccatatacatataataatatatggacatccgttttttactaaagactgcaagattaacctttggctccgtttttttgttatacgcattttcctgattttaattgtacaaagatactggattatcagtccttctccaaatttttccttatttaaagattagccttttatcttcttccgcaaataacacagcagtatttaccagtgccagatgagaataagcttgtggaaaattacccagttgttcttttgtttcgaaatcaatatcttcactgaacagacccaaatggtttgaatattgcaaaatttcatcgaacaaacagcgtgcttcgtctttttccccgatgacataaagtgcacggatcagccagaaagtacagatggtaaaggccgaagaaggacagccaaaatcatcatgagtattataacggtacatcaaccctttgtgtaacagggatttcttgacggctttcactgttttatgataacgaatatcatcagcatctataaatccataaggttccattaacagtaaagaagaatccaaatccagattgccgtatgcttgtgaaaaactttgtatttcttccttccagccgtttctcataacatcagctttaattgcatcagcttcttcttcccaacgtcggctattctcatatttattcagaatacgagctatgcgggctcctctgtccaaagcaacccaacacatcactttggacgaaacgaaatgctgtccttcaccccgtatctcccaaattcctttatcaggctttctccaatcttccaccacagtcatcataatgcttttcaccatttcccacatatcttctatttcatccaatgtacctggcatcaaccggtaatattggtaaatcaaatccatcaaatagccgaacgaatcattctgcctttgatgataagcatcattgccgatacgcaccggtttggagtttttatatcctgaaagatggtcgagtataacttcagtcaatttcctttccccacgaatgccatacattatttgataagtgtcatgctcggcaacaaaagtagattgtatgaatttcatgaatttgcgggctgcatcggcatgacctattttgaaaagggtctctatggacatggaggcatctcgcaaccaacaaaaacggtaatcccaattgcgtacttctcccacagcttcgggcaggctggtagtaagagaggctaataccgcgccattataaaaggacatcatcttcagggtgagtaagctacgctctattatatcgttgtaaatagtgaactttcttgtacgatccgtccagttcaaccaataaaccaacgtgcggcaatactccagtttctcacgctctatatcaacaggaatcaccttttcattgtatgaaagaagaaaaaattcatctttctctaatataaattcctgatggtttacaataccttgcaacggcaaagaggaatacagatattgtctgtccttgttgttagaagaagaataggtttcaatataccgggaagttacattaaaaaacgcttttccacgagcataatcgggagccggatggtaattgactttaatgcgaggacgacctttaatccagcggatataacgatagacctcagctggacgataatattccttattatcatataactcataacaaggcataaagtcgactaccgcaaattcgtcttgttctgacacaaaagtagtggaaagaatattggtatggggaacatacgattggatggtgtgatagtcttctgaaacttcaaaaccaaaagtcccgcctttttcacgatctagaagagctgcaaaaatagaaggtgaatcaaaatttggaaaacatagccattcaatacttcctttttcggaaatcagtgcggctgtgcagcaattaccgattacaccgtaattcaaattatccatggttattttttttgtaatgttagtggtttattatccgtttaaaaacatctatagccgatgataactgccctttcaaaccacttttcaaggctgctttcaccatgccttcatctgtcagccgttgtaaaaacggcaaggtgtctgtctgtacgggcagattgtaacgtgcactctcggatgctgtaccaatctttacagtcacagcagtaacaggtacggctttaaacatatcatcatccgtagtatcatctcctattgccaagataaaatcatatcgggtggcaagcaaaagcctgtttacttctgaacctttggtaaattcgggagattttatttctattaccttattaccctgcatgatttgcaaattctgtttcaagcaaatagatatcaaggaattgaccaactgttgcgcacgtaatctgcccaaccatgcatcggcctcacgataatgccaggcaagtgccgtttctttgacttcaagatgggagcgaggagtcttgctgacaaataattttaatatagaaagcaatccggggctccattcctgcccgtgtacattcttgtgccatacaccattctctttataaaaggccccatgttcggctgcaaaggaaagaggcagtgcacccaaccacttctctaaagtaaaatggtcacgtccgctgtttattaccacatgattcaaggggtcggcggtcagtttctgcaatgtatccagcaattgtggagtaggagaggcatcttccggccttttctgaaaagggaccagtgtcccgtcataatccaacaaaatcaaacgctttttagcatgtaagtattgatgctgaatttcctgcatattctgtgatcctatcttcttaaaaagcatggttttgtttttgtgtgccacttcctgccattcatttacaaaatcggcagcccatttattgacagtctgtacggatacaatagactgcatacggtgcatccgttcttgctgttcttcaaacggcatttccaatgcccggcaaatggcattttctatctgctccgtatcattgggattaaccagcaaggcgtcggtcagttccacagcggcaccagccatttcacttaaaaccaatacaccaggattgtcttgcttgacagcaacatactctttggcaaccaagttcattccgtcacgcaaaggagttactaatgcaatatcagctataaaatacatagcagccaattcttcgaatgaaaaaccatgataaaaatagcagaccggagtccagttcattgtagaatatcgtccgttgatagaacctatttcctcgtcaatccgggttttcaattcggcataactgcctacatgatcacgtgaaggaactatgaccatagccagtgttaccttgccatgatattcgggatggtgttccaaaaaagaggcaaatccataaaggcggtgcaaaatacctttactataatccaaacggtctaccgataggataagtttatgtttgccaaacaagagacgggttcgttctatagccttccaaacatttttttgttgtgacacattgtggtaaaggtcataatttatccccatcggaagtgcatcaacgcgcacaatgcgactgcctatccgggtttcatccaaactgaaatctatatggagtacccgttcggccgcactgatgaaatgacgcatatagtcatgtgtatgaaatgcgataaaatcggctcctaacaatcctttcagtatttcggcacgttcaggtagaattcggaataactcataagatggaaacggaatatgatggaaataaccgatatgcaactggggaagctcttggcgaagcatttccggaagtaacatcaactgataatcttgtacccagacccaatcatccggttccacaaggcggataatttcccgacaaaacaaagcgttaacctcttggtaagattgccagaaactttttctatataatgtataggcaaagaaatagtgacataaaggccacagggtactgttactgtatccctcataatagttcttatattgctcatcggataaaaatatgggatggagattcatttcctccaaccggtgacagatatcctgtttttcttcctctttgtctgtacagattccgggccaccccacccaatgtttctcgtaattgccctgtagggaatttagtcccgttgtcagacctccttcactacgtgagaaaacaaaggtatctttttctgcgacagccttcacgggcagtctgtttgatatgatatacaatttcatttttatataattctttttttcaattagatgacaaaagtcataccactaatttaaacatcttattatcaacatgatatatgtttattgattagtttatactttttcaatatgaaagccttttttctaaaatgggaaatgaaatagctgaaagataaaagtgcaatttttgtaatggcatcgattttgatttatatggagtataacgctatcgacttatagaaaaggtagcgagcaaacaataagaaataactgattaacaaactaataaagatgaaactagtaaaaacatagctttccaatatggaaatttgcctgttaaaatgaaaaagaaactccaaaagaataaaatgcaataaaaaaatgaaagtatataatttagaaaatattaaatctgccaccgaactgaaacattggactgaagtaattaacatgaacgaacgttctattatagtgctcgacacttttaccagcattgcccaaaagctgcaagctgtttctatttctttattccatgtcgatatcgaagaggttatgagtcaattgcaggattttgagaatgattgtagaaattggctggacaatcttctttcctccgaaatacagaaagcagaagctgccaaagaaataaaagtacacatcgatcaaatttcccgtttatgtaatgaaaatctgaacatcattgacgatcatgagatcatggctcacggagcaatgatatcctctcttattctgtcacattatttagaagaatgtacaaaaaagaacttcatcttgaactcatgtcatttcatgcgactagggcttgatcgaaaaccggatataaagtatgtgaaaaagaatgtagaagaactgatgaaagactgtcccgatgttcacattcttattacccaaagccgtttgtgtaaaaatgtatatgatgaagtggatttcttcccacaaataggaaatgagtattatgccactgttatcggggctgtattccatgcggatgaaattataacatccttacattctgatgaaatttgtttccgaggtatggaacatactcgaactcttacatacggtgaagccgagaattttattgatagcggcattgcattgcttcatccggaatgtattccgctggcgcgcaccgccggtatggctattgtattgataaaaacaccgaaagatacattacgaatatcatcagaaaaaacaggaacaaaagtaaaagctgctgtttcacgcagaggtgtggtctttgtcaaacttcgttcgttggggattcttacttcttatctatttattggaaaagtatttgatgtgttcgagaaatataaggttcctgtctatttagcgacttcctctaatgtaagtgtttcattggctgtgaaatgtagcaacgacacattacgcctgatatatcgtgaattacataagtatgcggaaataggaatggaaacagaaatgtctgtggtcagcgttattggagatctaaattgggaaaagcatacagggttggaagccagaattatagaaacactgaaagaaatgccggtatgcatgatttcatacggtagcagcactcacaatctttcagtgctggtacgggaacaagatagagaaaaggcattagtgacactgtgcaaagcctttctagatattccatcagagaaatttgatgtaataaagcaaactcaattacaagactcttttgttatgtgaccttcctgagtaaacagaagcaacaattcgtccgacaaggtatttgttgcttttgtttttgattaaataaaacattattttatccttatagcgatttgtactttattgccaattctatcacctaaattgttatccatacaaaaatctgacttatgaatttaatagaattctttcccttataaacaaaaatagacatatagttgattatcagtcctgaataaccttttaaaatagttgctgttatccattcttaactttagcacagaacaggaaataataaaatggatttaaagcaaacaaagaacatctctgttaaaatactttttgtatatttgcaacaatatgttttatcgttaaaatagttgcaacagaaataatacacataaaagaaaaacagagtaaatagaaaatgaagcgagttattaacctggacaattggaatagaaaagagcattttaaattcttctcggctctcgatgaccctttttggggaattactacgactgttgatttcacaagcgtatatcaacaaagtaaaaatatggaggtttctttttttctttattctgtgtacttcctattgaaatgtatcaatgcaactactgcattcaaattacgtatagaaaacggagaagtagtagaatatgataaaatcaatatttcgcccactatcggaagagaggacggaacttttggctttggattttttgagtatgacacagatctttccttatttattgaaaatgcagaaaaggaaatacatagagtaaaaaacagtgccggactttctttttccaaggacactgcaagagcagatgtcatccgttattcggctctgccttggtttgccttttccgagatgaaacatgccggttcaattcaaacaggagattctatacccaaaatttctacaggtaagctgatacaagaaaaaaagaaacttttgctccctatatccatcagtgtccaccatggcttggtggatggacgaaatgttgccgaatttatacagaacttaaaagacggacaaaacaatacattatgatatgattgctccctcttcctattctaataataaaacatgaaaaataaaatagaatttatcgcttttgatgccgatgacactctttgggaaaatgaactttattttcaagagttggaacacaaattttgtcatcttctgaggaaatatttaccagctccttccatatcagaagaactgttcaaaacagaaataaaaaatctgcatatctatggttatggactgaaaggaatgctgctttgcatgattgaaaccatttgcaaagttactaatggagaaggagatctcaatctcgtaaaagaaatcctccgatcaggccaggaacttctgcaaaggccaatcatattattggacggtgtgcaagaagtcatatcagccttgtgcgaaaattataaattagtattggccaccaaaggtgatctgttcgatcaaaaaagaaagatttctgcgtccggactacaagaatgtttttgccacatagaaataatgagcgacaagaagaatgcggattataaaagattgcttgataatttagggtgtaaggcagaaaatttactgatgataggaaactcaataaagtcagatattattcccatattggaactcggaggttatgcagcctatgtacctcatcatatcacttgggcacacgaacaatgtgaaggagaagtaacgcactcccactttattaagttgaataacattaaagagatacaaaactatctttagtttttgccatattccattctccacgtggcaactctttgaacaaaaataccacatctggcaagaatcaaaaaaagataagtcactctaatacaacaaaaaggagaaatgctttgcatttctcctttttgtcaaaaaaatcacacatttaaaacccaatacttaatccggctatcagataagttttgtcaaatgagggcgaaacaatagcctgtacaaacaaaggcaaagaaaaattatctgtaatattaatgttcttggaagcttttaaagcaatatctgtaaaagcagcaccatcagcatcatacattcctttccaaggagtgaaaccaacggaaggagtgagcgtaatttctgccgggcaagcaatattataagaagcattgatataagtggaataagcacgatcaccgtctttgttatcgtctcctcccgcaaacatagtagaccaactcaaggtcagaggaaagttctcgccgaaattataagctaatgttccttcaaaatgatgatcatgtttataatccccgtagggcatggtgatgccattccaccaatagtcggttactgtaatacctaaaccgccaatagtatagcttaaattgatgtcaaactcttgtgcaccgtctgtcttggtcaggctctgactcccccaagcagataaagaaaggttgccgtaagataatcctaatgtaggctgtacagaaaatcctgaattctggtaagcgccacgccaaatgtaatcacttacaaaatctgccttagccgttacgttaaattcttgtgcttttatcactccaggcaacagtaaagccagcaccaagaccacttttttcaaattccttttcatcttaaaaaattaaactaattaatattcgtgttttacatatttctactatttccttcttattgtctgaaaggaaatatccattttgagtttttctgaatcaagatgcatcattcaatggtgatgcacgtcaaagatcaagaatccatgttatcaaagcaaagaacaatacaatgatagccacagcttctagagccgacaggctctcggtatccaggaaacttctctttttcatgacgcacatcttcctaatttaatgactatatatttttattattttgccttttctaaagcagcattcagttttaacacattcaccttctctgtaccgaacatgcccataaacggtttttccacagctttatctacaatagcttttacagtttcctcactcattccgcgagctttagccacacgttgtacctgcacgtatgcgcaggccggagtgatgtcaggatccaatccggaaccgctggctgttaccatttcggcaggtacttccttacggctcaagtaaggatgatgctttaaaaatgtatcaatccgagcttctacttcagccagatactcctcattggtaggacctttattgctaccggccgaactagccgcatcataaccttcaccagcacatgaaggacgtccccagaaatagatatcttctgtaaataattgtcccacattggctgcacctaccacttttccgttaagttccacaatctcggcattgccggaattaggtccggcaaattgagcgaaaatccataagactagtatatagcatactgagaaaaacacacaaaagactaaagtaagtctgaatgactttataaaatttttcattgttatttacttgttaaaagaataatcctactactaaatctattaatttaatacccacaaaaggagcaataacaccacctatgccatatatcaaaagattacgacgaagcaaggcggaagctcctatcggtttgtattgaactcctttcaatgccagcggaatcagaataggaataatgatggcattgaatataactgcagataagatagcactctcagggctatgcaaccccataatattcaatgcagccagttctggaatggaaagcatgaacaatgcaggaacaatggcaaaatatttggccacatcattggctatggagaaagtggtcagtgtaccacgtgtcatcagcaattgtttacctatctcaacaatttctatcagcttggtaggatcattatccaaatccaccatattccctgcttccttggcagcctgtgtaccgctattcatggcaacccccacattagcttgggcaagggcaggagcatcatttgttccgtcacccatcatggcaaccagtttgccggcagcctgctctttcttgatatactccatcttatcctccggtttagcttcggctatgaagtcgtctactccggctttctctgcaatatatttggcggtcaaagggttatctcccgtcaccatgactgtttttacccccatcttgcgtaaacgttcaaaacgttcctgaatacccggttttatgatatcctgcaattctataactccggcaattttcttattgacactcaccaccaatggagtacctccattacttgtaatggtttgaatgatatcttccgtttcttttgggaaagggtttccggcagacaaagctatcttgcggatagcatcaaatgcacctttacggatttctgttccatccttcaagttaatacccgagcatttggtttcggcggtaaattttatcatatgagcaccatcggtattcaaattacgcatccgtaaacccgattcacgtcccagttcaataatagatttaccttccggagtatcatcagatacagatgagagtaggcaggcttcgatgaaagcatgttcatccactccctgagccggataaaaacgagtagctttacggtttcctatagttattgttcctgttttatcaagaagcaaagtatctatatctccggctgtttccactgctttacccgatttggttatgacgttggcacgcagagcacgatccatcccggcgataccgatagccgaaagcaatcctccgatagtggtgggaatgaggcagacaaacaaggacagaaaagaagcaatggtaatgacagttcccgtataatcggcaaacggtttaagggtgatacacacaatgacaaagaccaatgtaaatgctgccaacaggatagtcaatgcaatttcattcggtgttttctggcgggatgcgccttccaccaatgcaatcatcttatccaagaaactttcacccggctgggtgcttaccattacttttatctgatcggacaatacttttgtacctcctgttactgaactcttgtcaccgcctgcttcacggattacaggagcggattcgcctgtgatggcactttcgtcaatagacgccagtccttcgatgatctcgccatcggcaggaataacatctcctgcctcacatacaaaaatatcacctttctttaactgggaactactgacagttttcaaagtcccgttcacaatcaatttggcaggagtctcctcacgagtcttcctcaggctatcggcttgtgcttttccgcgcgcttcggcaatagcttcagcaaaattagcaaataacaaggtgatgaacagaattacgaaaacccataaattataaataaatgagccttgtgaatcattaacgatagagtagagcatcaccaagaacataatagctgtacaaacctctaccgtgaacataatcggattcttaatcatcactcgcggattcaacttcacgaatgattgttttatgctgtcaataacttgctccttctgaaataaagaagctgatttattatctttcatatcttctattaatatcgttgtctgttatcagaattataaactcaagtgctcggcaatagtgcttaatgcatgtaccgggaagaatgatagtgcggcaacaataaaaataaccgcaaatgtcatcacaccgaatgtcactgtatcggtttgcaatgtgccggcgctttcgggaataaattttttcttagccagaatacctgctatggccacttgacctacaatcgggacaaaacgtcctaatatcagcacaataccacaagagtagttccaaaaccatgtgttatcacccagtccttcaaaaccggaaccattattggcggcacacgaggtgtattcataaagcatttcactcagaccatgatatccgggattgttcaaccagccaccttcactttccacaaatgcaggcgcatgaacaaacagataagcagccaatgctgtaccaactaaaatgataaacggatgaagtagtgctacaatggaagcaatcttcatttcacgtgcttctactttatgaccaagaaactccggtgtacggcctaccatcaacccactgatgaacacggcgataataataaatgtaaagtagttcatccatcccacacctacaccgccaaaccatgtgttgatctgcatgttcagcatttccatcatacccgaaagcggcattgttgaatcgtgcataccattgacagaaccattggaagtaaccgtagtagtaatactccacaaagcagtggcggccgagcccaaacgtatttctttaccttccatcgcgccattatcctgcgctatccccatctcatcaatacgtggattaccacccatctcctgactgacattgatacaaactcctaccagataagcaaacagcatgacaccatatatactataacccaattttttacgtttcagatagaaaccgaatgcaaatgccatcgccataggtatgataaggatagaccaacattccaccatattagcaaaataggtagggttctccaagggatgagaagagtttacaccaaaataaccacccccattagtacccaattgtttgatagggacaatagccgccgtagggccttgtgatacatattgtgtagttccttccatggtggtcaccttcatttttccgtcaaagcccatcggagtgccttgcacaatcaggataaaacctacgatcaatgaaagaggcaacaggacacgggtacaacttaataccaaatagttccagaaattgccaatagtctgagtagtctttgcagccagcgctttcattatacctgccatggcagccataccggtagcggcagtaataaactgaaagagcatgatgacgaatagctgagtaaaataagtcagcccactttcaccgctataatgttgcaagttacagttcaccatgaaactgatacaagtattaaatgcctgatgcgcagtctgaccggcatttccatccgggttaagcggcagcacaccttgtgtaaccaacagtaccatcccccaaaggaaccaaaatagatttaccaccagcaaggctctcaaaaactgtttccagttcatctcctcattgggattgataccactcagtttgaacataacccgttcaacgggcttcataaaatccgaccaagtcttttcacctttataaactttagcgatatatttgcccaaaggatagctaagcactatcaataagacaatttgcgctataacacctaaaacttcagtattcataactctttatttcttaacttacttttttaaaacttctccggcttgataagaacatacatcatatagccgaacataatcaaactaactacaaataatgctgtgtacataacttgtttctcctttctttttttagatcttctcgaaccagtctatacatttaaagaaaagccaaaagcaagctatgccgctcaaggtacaaaccgcaaatccgattgaaaataaatccataattcctttttttaaattaatactattgttaactgccacgctatatgccaatagtgtgccattactggcaaacaggagataagtaattgatttatatacagatataacaacaagaaaaaagagggagcaaaagaagatcttttcaaaatgaaaagggaaggatatcaaaacaggagaataattgatttatttgctgccaaactgcataattccccaatttattatatagctttgtatagaggttttaatacagaaaaacagaaaggaaaaatgaaaaagataaatattaccgtagccgatatcactactttaaaagtcgacgccattgtaaatgcagccaacagttcgttgctgggtggtggcggtgtagatggagctatccatcgggctgcaggtccggcgttgttagcggaatgcaaaacattgggcggttgtccgacaggggaaagcaagataaccgatgcatacaacctgccatgcaggaaagtaattcatactgtagggcccgtatggcatgggggaacgcatggagaagccgaaaaacttgcatcatgttatcgtaccagttttatactagcgagagaaaacggcatccaaagcattgcattcccctgtatcagtaccggcgtatatcattatcccaaggaagaagcggcacgtatcgcattgaatgccatcggggaagaaatggcacatggctatgaaggagaagtgattgtatgctgtttctcggaagaagatgctgaagtatatcgagagctcctgtcttgctgaggaaagccacgggggatttctaaaatccgtactataccgattccgtttccatctttgctgaaactgtgacggacagaagagtgtagtaagtgttccagcttgtgaaacgctaccgtatggtctttcatacctgatactaagctctttcttccttatggttaagcccattcttacggttacatactatagtcgccggcatcgctccgtacagtccactgcaatggactgtacggactgccccggtggactgtacagtccaccggaagaaactgtagcagcaaaccataagagtgggcttagccataaggaggaaacggcttaatcaatggtactcaataactaaataccgtattcctctatttttctatataaagtagtcaaacctattttcaataaacgtgaagcctcagtcttgtttcctttagtatgttgcagaactttagcaatatgacgtttttccatagcggccagttcaaactccgaataattcttgccggaataatcttcctgtcgggtattctgtatttcaataggaagatcttgtaaggtaagctgtttgtcgcagacaatcatgctgcgttctatcacgtttcgcaattcacggatatttcctctccagtcggcagctttcaaagcattcaagaactccggagccatcccttccacttgtttccccagtttttttgaaaagagttggataaagcttcccgccaaaagttcgatgtcttctttgcgctcacgaagaggagggaggtgtatctgaaaaacagaaagacgataataaagatcttcacggaaattaccttgttctatttcttttttcaggtcccgattggtggcggagataacgcggacattcactttcgtcggtttcgtgtcgcctatcttgatgtactctcccgcttcgagcacacgaagcaatttggcctgcagctcgaaagccatttcacctatttcatccaaaaagatggttccgttatcggccacttcgaacagccccttcttatctttcatcgctccggtaaacgaaccggctttatgaccgaatatctcgctttcaagcagatctttgctaaaagcagaacagtttacagccacaaaagcattctctttgcgaagactgttgcgatggatggcttgtgcaaagacttctttccccgtgcctgtttctccggtcagcaagactgtaacatccgttgccgaaacctttcgggccaatgctacggcttgttgcataccctccgacttcccttttatagcgtcaaaagagaaactttgggtttcttctgttttcactttttcccctacattctttttagcctgagccatagcccggctgattaacggaataattttattattatcatcccctttggtgatataatcaaaggctccattcttgattgcctgcacaccatccggaatgttaccgtgggcggtcaaaagtatcacctccaattctggatagagttttttgatggttgtaaccatatctactccattgccgtccggcaaaaacacatcacacaacaccacttggggattatgtaacttaagttgtttcaatgtagactggcaatcggctgcctggaatacttcgtaaccttccaattccatcatacgcgaaagaagtttgcgtatttgcggttcatcatcaataattaaaatactatccatatatttattctgttttacgggacaaagatagaataaaatgaacgctcgacaaaaggataatacttaatttctgttttatagaaaacgctttctgattatcttttttaatctcggattttctgaaccactcccgtagggagtaaacaataacaagctgtaagaaacatatttactgatcaattaaactcatcttataatgaacctttttatattttgtttcgttaaatataccggatgacatctcaatttacttccgtcaattcctccctattcttaattaatttaaactattatagactatgaacaaaatagaaataaaagacttatatcttgttttcggtccggaaaagcagaaagcgttccggatgttgaaagaaagaaaaagcaaaaatgaaattttaaaggcgactaattgtactgtagcagttaaaaacgccaatctgacaatcaaagaaggagaattcttcgtaatcatggggctatcgggtagtggcaaatcaactttattgcgctgcataaaccgattaatcaaacccacaaaaggacaagtactgattaatagaacagatattactgccgcatctgataaggaattgttggaaatgcgtcgccgggagatagctatggtgttccaaaattttggtttgttacctcatcgcagtgttttaagcaatattgcattcggtcttgaactccaaggagttcccaaacaagaacgtgagaaaaaagccatgaagagtatggaaatagtcgggctgaaaggatatcagaatcagatggtcggacaactttccggcggaatgcagcaacgtgtcgggttggcacgcgctttggcaaatgatccggaaatattactgatggatgaagccttttccgctttggacccattgatccgcgtacaaatgcaagatgaaatgctggcgctgcaatccaaaatgaaaaagaccatcgtctttatcacgcatgatttgagcgaagcaattaaactgggtgaccgcattgccattatgagagacggagaagtggtgcaagtcggaacttcagaagaaattttaacagaaccagccaatgactatgtggcaagatttgtagaaaatgtggaccggagcaaaatcataacggcaggaagtattatgataacccgtcccgccgtagcccgtctgcgtaaagaaggtcccgaggttctgatcagaaagatgaaagaaagagatattaccgtgcttcctgtgatagatgaaaatgacaagctgataggagagattacattggaaagtgccgccattcttcggcataaaggtataaaatcaatcaaggaagccgtacaaagtgaagtacattccgttacggaggacacaaagattgaggatctgcttcccttaattacgaaaaccaattctcccatttatgtggtaaatgaagaacgcgaactgaaaggcttggttcctctatcgtccatcgtagtagagatgaccggaaaagataaagaagaaattaatgaacttattcaaaacgctatcgaattatgataaacataggaaaatatatagaaacagccatcaactggctcacagaaaactttgcccctcttttcgacgccatcaatgttggaataggcgggttcatagatgggttccaaaacatattgatgtggatacctttttatgtaacaatagcattgctggccatcctggcttggtataaatcgggaaaaggagtcagcatttttaccattttaggattattactgatttggggaatgggattttggaacgaaaccatgcagactttagcattggtgctttcgtctaccatcatcgctcttatcatgggacttccattgggaatatggagcgcaaacagcaaacgatgtgataaaattctgcatcctatcctcgacctgatgcaaacgatgcctgctttcgtctatctgattcctgccgtactctttttcgggctgggaaccgttccgggagcttttgccaccattatttttgccatgcctcccgtagtgcgtctgaccagcctgggtatcaagcaagtaccgaagaatgttatagaagcttcgcgctcttttggtgcgacacctatgcaattattattcaaggtacaattaccgctggcattgcccactatcatgaccggtataaaccagacaatcctaatgtcgctctccatggtggtcattgccgctatgattgcagccggagggttaggggaaatcgtattgaaaggtatcacgcagatgaaaataggtttaggtttcgaaggcggtatcgcagtagtcatcctagccatcattctggatagaataacacaaggacttggaaaacaaaagaaagggaaataagcatgaagaaaatactatattttttgtctttcctcctgttgcttacctcttgcagcgggaaaaaagatgataagacaataagcattggatacataaactgggacgatggcatcgctctgacctatttaacggaagtgattcttgaacaacaaggttatcatgtcattttaaagaatgctgatcctgctcctatctatgcaacaatggcccgtggcaaagtagatttgctgatggatgcttggttaccggccacacaggccgattatatgaaacaatacggaaagaatctggaaatcttaggcaagatctatccagatgcccgtatcggtctggtagtccccgattatgtggacattcattctattgaccaattaaatgccaacaaagaaaaattcggaggcgagattatcggcattgatgccggcgcagggattatgcatgctgcagatatggccatagaaaaatacaatctggattacaaattgctggagtctagcggaccggctatgaccgcagtactaaaaagggccattgacgaacatcaatggattgtggtgacgggatggactccccattggatgttcacccgctttaaattaaaatttttagaagacccgaaaggcatttttggtaaagcggaaacaattacagccattgcctgcaaaggatttggtgagcaacacccgtttgtggtaaaactgatagaaaacatacatctgagcaccgaagaaatcagcagcttgctggatgatgtatcacaaaatgaatataatgaaaaagaaggagcggaaaaatgggtaaaagaacatcaggagctggtagattcctggattccccagaaatagaaatatctcacttaccttgagggccgcgcccaaggtaagtgagaaaacaaacgaactttgtatcagctcaactatgccatatattttgataagtttctcgaaaacaaaacctatctttgcaacataataaaacacatataaattatgaatgtaatcaaatcaaggttcgtctatcacttaatggcaataatcactgtagctatctgggggactacttttgtttctactaagattctaatccaacatggattaagtccttccgacatcttcttttatcgtttcactctggcctatctttgcatgtggtgtatttcttataaaaaactatttgccaatagaataaaagatgaattgttacttttattggccggattatgtggaggaactatttatttcattactgaaaatacggctctcggtatcacattagcctccaacgtgtctctgatagtatgcacatcacctgttctgaccacactactttcttatttgttcagaagaaaagaacctttcacccgccatcttgtttacggatcgatcatggctttgataggagtggggctagttgttttcaacggcagtttcattctgaaaattaatcctttgggagatattctttcactgaccgctgcattgatgtgggcattttattgccttattctcaaacaattggataatcattattctatcgtattcattacccgtaaagtattcttctacggagtgctgaccattctgcccatgtttttattccgtccgttaaattgggacaatgtcttgatgatgcaacccatcgtgtttggaaatcttctctttttgggatttgtcgcctccatgctctgcttcatagcctggaatgcatgtgtcaaggaattgggagccgtaaaaagtacaaactatatttatatcgtccctttggtaactcttcttacttcagcggtcattattaatgaaaagataacttggatagcccttaccggctgttttcttatcttgtgtggtgtatatttggcagaacggaaaacaaatcctacatttgaggcgaaatcttaaagccctttaattatgaacgagatagacaaaatgcgtaacagtcagctggccgatatggagaaaccggaaatacaggccagtttcatacacgccaaaaaactagtggcccaattacggatgatgagtacatacgatgatggtttcagggaagtgctggaagaattagtgccgggtatcccttccacttctgtcatctgtccaccattttactgtgatcatggacacggcatccgcttaggagagcatgtctttgtgaatgccaactgtacatttttagacggtggatatatcaccataggagcacatacattgataggacccaatgtacagatctatactccacatcatccggtagattacataacccgacgcgaacccaaagagtatgcatatcccgtaactatcggagaagattgctggataggaggaggagctattctttgtcccggagtaaaaataggtcatcgctgtattatcggagctggaagtgtcgtaactaaagacattcccgacaattccgttgctgtaggtaatccagccaaagtgattagaaaagttgattaaaaaaagagaacagataattatgaaagttttggccccacataattatctgtttctcgtattcagccaatataaacattgacgctcagaaacaggcaatcgtctccgttagaacattcaaagtctattttattctctctggccagccaacctatagctgcattcaaatctctgtcagacaactctgaagctctttttaaatcacaataactccaccgtttattgtcattcagcagtttccaaacttttcctgcgtttactccaatttgatgtttatccattttgatgttcaattaaagaagttaataatagaatgcttagttttttgcggtaaatataaccttttattaaaataaaatagactctcctacataaaattcatgtaaaagacatgattatttaacatttgtttctgtcaaatttcatgtaaattctctttttatgaagatatttattgccggatgagccatttttacaaatatttcctctaactttgtaagtcaattaatcctttgatatgaaaagaaataaaataaactggagagtgcccaaaggtatggaactcacagagttagataaaaaggttctctattatcaagatagaggtcatttggtgccttcacgtgaactgattaagacaccagaacagattgaaggaatacgccgtagcggtattatcaataccggagtgctagaccttgtagaacgcgagatccatgcaggcatgagcacattggaaatagacaaactagtttatgaatacactaaagatcatggcggcattcctgcaaccttaggttatgaaggttttccaaaaagttgctgcacctctatcaatgaggttgtttgtcacggtattcctaatgaattcgacattctggaagaaggagatattatcaatgtggattgtactaccattcttgatggttattatgccgacgcatcgcgtatgtttaccattggaaaaaccacacctcagaaagagaaactggtacgagtagctaaagaatgtttggagataggcatggaagctgcaaaaccatttggttttgtgggagacataggacataccattgaaaaacatgctaaaaaaaatggattctcagtagtgcgtgatctctgcggacacggagtaggcatagagtttcatgaagaaccggatgtagaacattttggaaaaaaaggaactggtatgctattggtcccgggaatggtttttaccattgaaccaatgatcaatatgggaacatgggaagtcttcattgatgaggaagatggctggactgtagtcaccgaagacgaacagccgtctgcacagtgggaacatactttcgttatgacagataacggacttgaaattctgacacattaatatatataattaaggtatagaaatatggatacaattatattaggtatagaatcttcctgtgacgacacatcagccgcagttatcaagaatggcgtattgttgtccaacgtagtgtccagccaggctgttcacgaagcttacggaggggtggttcccgaattggcgtcacgtgcccatcaacaaaacattgtaccggtggtgcacgaagccttaaaaagggcaggagttaccaaggagcaactaagcgccgttgcattcacccgaggacccggcttgatgggatcattactggtcggagtatcttttgcgaaaggtttcgcacgttcattaaatataccaatgattgatgttaaccacctgcaagcccatgtgttagcccatttcattaaagaatcggaagaagacaacaacgaacctaaattccctttcttgtgcctgctggtgtcaggaggaaactcacagataatattggtaaaggcctataatgatatggaagttttgggacaaactattgacgatgcagcaggagaagctatcgacaaatgttctaaagtaatgggcttaggttatcccggaggtcctatcattgataaactggcacgtcaaggcaatcccaaagcgttcactttcagtaaaccacatattccggactataactatagcttcagtggactaaagacttctttcctatactctttgcgtgactggttgaaagaagatcccgatttcatcgagcatcataaaaacgacttggctgcttcattagaagcgactattgtagatattttaatggataagctgagaaaagcagccaaaaatctcaaaataaatgaagtggcagtagccggaggggtatcagccaataacgggcttcgtaactcattccgcgaacatgccgggaaatatggttggaatatctatatcccgaagttcagctttactacggataatgctgcaatgatcgcaattaccggttattacaagtacctggacaatgatttttgcactatagacaagcccgcttattcacgggtaactatttaaatatttaaaaaccgttttcaacatgtcagtagaaggtaaatttttaagtaaagagattaacgatttgttttggagagaaggcctgacactcgttactgccgagagttgcacggcaggaagtgtggcggccgctattacagccgttgccggaagttcacacttctttaaaggtggaattatcgcctattccaacgaaataaaggaaaatctgttgggggtaaaccacggaactttagaaactcatggggctgtaagtgaagaaaccgttatcgaaatggtaaaaggggcgatgaaatcgatgaattctgattgtgctgtagcaacttcaggtatcgcagggcccacaggaggtacccccgacaagccggtaggtaccatttggattgctgccggatgtaaagacaaagtgattacactgaaattggaaggcgacgaaggaagaaacaaaaacattgcaaatgcaacccaaaatgcactgcaactgctccgaaagttgttccaaaacgaagaaaatgagcagtaattgcagaattatttgcaaaaactcttgttttatacaaataaaagtgcttattttgcactccgtttgaaataagtattgaaaaaaactataaaaataagatagcaatgtcgaagatttgtcaaattaccggaaagaaagccatgattggcaacaatgtttcacactctaagagaagaaccaaaagaacttttgatgtgaacttgtttactaagaaattctactatgtagaacaagattgctggattagcctgaatatctgcgctaacggcttacgtgtgattaataaaaaaggcttggatgcagcgctgaatgaagcggtaaccaaaggctattgtgattggaaaagcatcaaaattattggttaattaaaaaggagagatagactatggcaaagaaggctaaaggtaatagagtacaggtaatccttgaatgcacagaaatgaaggatagtggtatgccgggaacttctcgttacattacaacaaaaaatagaaaaaataccactgaaagattggaacttaagaagtacaatcctattttgaaaagagtaacagttcacaaagaaattaaataattataacccatggcaaagaaaacagtcgcaacccttcagacaggtaaagaaggacgttcttatactaaggttatcaagatggttaaatctccgaaaacaggagcttacatcttcgatgagcaaatggtacctaacgaaaaagttcaagactttttcaagaaataattcagtcggaagactaatggaaagttcctttcatatattatggaaggaactttttttataccacaatgttatcatcataatacattatgaccaatcattgtgacacttttttttgtccgtgtaagagattagttatatctttgtagcataaacagataaatcagactccaatatgggattttttaattttttctcgaaagaaaagaaggaaactttagacaaaggattgtccaaaaccaaagaaagtgtatttagtaagattgcccgtgccgtagctggtaaatcaaaagtagacgatgaagtattggataatctggaagaagtgcttattacttcggatgtaggcgttgaaacaactctaaatattattaaacgcattgaagaaagagttgccaaagataaatatgtaaacactcaggaactgaacaagattctccgtgaagagatagcggcattattgactgaaaataacacggtggattcggatgatttcactgttccggaaggtaagaagccctatgtcatcatggtggtaggtgtaaacggtgtgggtaaaactacaaccattggcaaattggcatatcaatttaagaaggcgggcaaatccgtctatttgggtgccgctgatacattccgtgctgccgccgtagaacaattggatatttggggagaaagagtaggagtgcctgttattaaacagaaaatgggatcagatcccgcatccgtagcttttgataccttaagctctgccgtagctaataatgcagatgtagtaattattgataccgcaggtcgtcttcacaataaagtaggtttgatgaacgagcttactaaaatcaagaatgtgatgaagaaagttgttgcggacgcacctcacgaagtattgctggttttagacggttctaccggtcaaaacgcatttgaacaagcaaaacagtttactttggctacagaagttactgctatggcaattaccaaattggacggaacagccaaggggggcgttgtaattggcatctcagagcagttcaaaattcccgtaaaatatattggattgggcgaaggtattgaagacatgcaggtattccgcaaaaaagaatttgtagactcactatttggagagactgaataataaatgaaacgtaacacaatagatatcatcaccttagggtgttccaaaaacttagtagactcagaaaagctgatgcgtcagctggaagcaaacggttataaagtaactcatgattccgataaaccgcaaggagaaatcgcagttattaatacatgtggttttatcggcgatgccaaagaggaatcgatcaatatgatattggaattttgtcaggccaaagaagaaggaaaactcaaaaaactatatgtaatgggttgcctttcagaaagatatctaaaagaattggcattggaaattcctcaagtagacaaattctatggtaagtttaattggaatgagttactggcagatttaggcaaagcatacaaggcggaatttaccattgaacggacattaaccactcctcatcactatgcttatctgaaaatatcagaaggctgtgaccgtaaatgttcttattgtgccattcctattattacaggacgccacatttcacgtccgatggaggagattattgatgaagtgaaactacttgtatccgaaggagtaaaggagttccaaattatagcccaagaattgacttactacggcgtagatctatataaaagtcagaaattgcccgaactcatcgaaagaattgctaatgttcccggtgtagaatggatacgtttacactatgcatatccggcgcatttcccggaagaattattccgtgttatgcgcgaacacgataatgtatgcaaatatatggatatcgccctgcaacacattagtgacaatatgctgaataaaatgcgccgacacgtaagtaaagcggaaacctacgaattaatcgaaaaatttcgtcgggaagtacccggtattcacttacgtacaacattaatggtaggacatcccggcgaggctgaagaagattttgaagaattaaaagaattcgtcaaaaaagtacgatttgaccggatgggggcctttgcatactcagaagaagaaggaacattcgccgctaaagaatacgaagattccatttctcatgaagtgaaacaacagcgtttggatgaattaatggcacttcagcaggaaatagccggcgaactgagccaaacgaaaataggtaaagaattcaaagtcattatagaccggaaggaaggagattactacataggcagaacccagtttgactctcctgaggtagatcctgaggtcttgataaaagctgatgacgagtacttaaaaataggtgaattctataaagtgaaaattacagccgctgatgattttgacctatacgccagcattttataggctttttcccatataaagtttggataatgtttgtttttttactaatatagcaaccaaattaacactttaagctttgaataacaaagaatttatatctgaattatcacgtaaactaggatatacaaataaagatacatcacaattggtatcctcagtcattggtgttatgacccaagaattgcaagatggcaacaacattgtaattcagggatttggtacgtttgaggttaagaaaaaattggaaagaatttctattaacccggctactcaacaacgtatgctgattccccccaagttagtgctgacttacaaacccagtgtaaccttaaaagaaaagtttaaataaaatagcccttatttataatattatcatgagcgagaaagtaaccatacaagatatcatcgaacttttggctgagaaacacagcatgactaaaaaagatgctgaaatctttgtcaaaggaatgtttgaactgatagaggaagctctagctactgaaaagtatgtaaaggttaaaggactaggtacgtttaaactcacagaggtggagagtcgtgaaagtgtaaacgtaaatacgggggaaagaattgaaatacagggtcatacaaaaatatcttttactccggattccagcatgaaagatttaataaataagccatttgctcattttgaaacggttatattaaatgagaataccaaattggaagataccgaaacagaaatagaaggagaggaggaagataccgttgacgaaaacgcgcctaagcctaaacaaacagttgcggctaaagaggttgaactcatagaaacggaaaatacagaagattctccaaatgagaatcccattgccgctaaagacactattccggttattgaggaaacaattattgaagaacctgtaccttctgttgaaatcacaaaggaagagatacaaattatagaaccgggaaagaaatcggaagatattgtcactgaagcagaaaaggatattgttgttgaaacggctgttccccaaacggtttctcctttagcagaaacaatagaaggaaacaaggtaacagacaaacctcaagaagaagttatgactattgccgatgcagccatactggctgctcataaagcttgtgaagaaaaaacatctttggaaataatagtgccacaagaggcaaccccgtcagaaaaaacggtaactgttacttctaattttgaaaaagaacagaagatagaggaaacaacagaagcacaagaaatctcaggagagaaaaagaacagagtttcccggggaattattcttgttatcattttgattgtctgcatcacaggtggcatatattggtatttgcaatcagataaaacttcggatttacaatcgccggctacaataaaaaacacccaagaacaattggaagaggatattcctgcaattccggttaatgactcattaatgcaaggtaaagataccgcaaacatatggacggatgttactagaaaagaaaccatcagtcaatcacaacaggctgtatctcctagtacgaaaaagagttctggcgttgctgtaactgcaaatgttgaaaaagaaactttagccgacactgtagaatatgacataacagggactaaaactaattacacattacgagaaggagagagcctggtaaaattagctgtgaaattctatggtacaaaaaagctatggccctatatcgtgaaacataataaaaacatcattaaagatgccgacagagtacccatagggactactctgcgtattcctgaattaactcctaaaaaataagacttcttgtattttgcctgctttcgacttaaataaagcaggcaaaatacaagaagtaaaaaaagtgcgctcaactgatattctcactctacaaaccttatctttgtattttaaaattctttagcccaataacctttaaaaagtagagatgcactttacttttttaataaaaattagttgccgctgttaattaattaccgtaattttggctgcgttaaatgaacaaggctatttacaagcccgttattagatcaataaagaaacaactaaataaacaaaattatggctgaagcaattgacattcgcgaactaaacgaacgaattgaaagacaaagtgcgttcgtaaccaacttaatgactggtatggaccaggttattgtaggtcagaaacatttggtagaatcattacttatcggtttactgtccgatggtcatatcctgttggaaggtgttccgggtctggcaaagactctggcgatcaaaacgcttgcatctttgattgatgccaagtacagccgaatccagtttactccagacttgctgcccgccgacgttatcggtaccatgatttatagtcagaaagacgaacaattcatagcaaagaaaggtccgatttttgcaaatttcgtattagccgatgaaattaaccgtgccccggctaaagtacagagtgctttgctggaagccatgcaggaacgtcaagtcacactgagcaaggaaacctttatgctacccgaacctttccttgtaatggctactcagaacccgattgaacaggaaggtacctatccgcttcccgaagcccaggtagaccgttttatgctgaaagttattatcgactatccgaaactggaagaagaaaagaaaatcatccgccaaaatattactggagagaaaatcgaagttcgtcccattctgaaagcaacagatattatggaagcccgtaaagtggtgcgccaagtctatctggacgaaaagatagagcaatacatcgctgatatcgtattcgcaacccgtttccctgaaaaatatgacttgaaagaactgaaagacatgattggtttcggtggttcaccgcgtgcatctatcaatttggcattggcagcacgcagttatgcgttcatcaaacgtcgtggttacgtaattcccgaagatgttcgtgcagttgctcacgatgtgcttcgccaccgtatcggcttgacttacgaagcagaggctatgaatatgtcttctgatgaaattgtaagcaaaatcctgaataaagtggaagtaccctaaggattgtgttctgaggcagttcttaattgcttgacaattaggaagaaaccttggaaacaaaaggttgagtacagagttccacatgggtgggactgtcatcccacatgggtggaacaccaaatgcatccgtttgaaaaaccattctcgataggagaaaaaacagaaaccgatgcgccggataaataaacaacatagtacgaacagtatggaaacaagtgatttattaaaacgggttcgccagattgaaatcaagacacgcggactttcgaacaatatctttgccggacagtatcactctgcattcaagggcaaaggtatgtcattctcggaagtacgtgaatatcagtatggtgacgacgtacgtgacattgattggaacgtaaccgcccgctacaacaaaccctttgtcaaggtgtttgaagaagagcgcgaattgacggttatgctcttgattgatgtttcgaacagcttggatttcggtacggtgaagcagttgaagaaggatatggtgaccgagattgccgctacattggcattctcggccattcaaaataacgataaaatcggagttattttcttttcagaccggattgagaaattcattccgcctaaaaaaggccgtaaacatattctttatatcatccgtgaactgcttgatttcaagcccgagagcaagcgtacagatataaaaacggctgtggaatatctgaccaacgtaatcaaaaaacgttgcaccacctttatgataagcgactttatagatgaaaacgacttccgcaatgctttgaccattgccaaccggaaacatgatatcgtagctattcaggtatacgaccgccgcatggcagagttacctgatgtgggactgatgaaagtacgcgatgccgaaaccggccacgagcaatggattgacacctcgtcacgagctttgcgtcgcgcacataatgactggtggatacagcgtcagggagtattgaatgaaacatttactaaaagtaatgtggactctgtatctatccgcacggatcaggattatgtgaaatcgttgcttaacttatttgctaaacgaaattaaagaatatgaatatactgaatactagcaaaaagttcttgaaagctggagtttgtgcaattatgctgataacagccggacaggcacaggcacagcaggttacggtagacgccagcattgactcgctgcagcttctcattggcgaacaggctaaagtgaagctggaaatcagcatggatgccaaacaaaaactgcaacttccgttcctacgcgatacattggtaaaaggagtggagatattggatatagccaagcctgatacccagatgctgaacgatggaaagcgtatgctgataaaacaggaatatacaataacttcttttgactcggcactttactatcttcccccattcgaggtgatggtaaacggagagtcttaccggtccaaagcattggccgtaaaagtatattccattccggtagatacgctgcatcccgaacaattcttcggaccgaagaccgttcgcgaagtacctatcacctgggatgacgtatcggccatcgtatggcttaccttgctgatgcttgctttgggcggactagcttactacctgtttgtacgctacaaagataacaagcctatcatcaagaagatcaagattgaaccgaagttgccgccacaccagcaggcgttgaaggaaatagagcgtatcaagggagacaaaaccttgcgtacagccgatccgaagacctattataccgagctgacggatgtactccgtacttatatggaagaacgattcggctttaacgctatggagatgacttcatccgaaattattgataagctacaggaaatcaacgacaaagagtctatcaaggatttgatgtatttgttccagactgccgacttggtgaaattcgccaaacattctccgttgatgaatgaaaacgatatgaatctggtaaacgcagtagactttatcaataatacaaaagtggaaccagacccgaatgcaaagcccgaacctacggaaatcaccgtggaggaaaagcgaagcaaacagggcagaatgattctgctgggcagcatcagcatcattgttattgcgattgtggtaattctatataaggtgctgagtggtgtatataacctctggttttaacaaataaatactaggaacaatgatttttgcaaatattgaatatctatttctgctgattctgctcataccttatataatatggtacgtcatgaagcggaagaaaaccgagcctacgcttcaggtttctaccacacgcatgtacatgaaggcacccaaaagctggaagatttacttgctgcatgctccgttcgtactccgtacggtggctatcatcatggtaatcctgatcttggcacgccctcagaccacagacaattggcagaataccgaaatagaaggaatcgacatcatgctagcagtagacgtttctaccagtatgttggccgaagacttgaaacccaaccgcttggaagccgccaaacaagtagcttccgagtttatcaacggccgccccaatgataatatcggtctgaccatctttgccggtgagagttttacccaatgtccgctaacggtagaccatggggtactgctgaatctgttcaacagcattaaaggcgatatcgcccagcgcggactgattgaagatggtactgccatcggtatgggcattgccaatgcggtgacccgtctgaaggacagcaaggctaaatcgaaagtgattattctgctgacggatggtagtaataaccgtggagatatttctccactgacggcagccgagatagctaaacagttcggaatcaggatctacactattggtgtcggtacaaacggaactgctccttatccgatgcagacctacgcagggacgcaatatgtgaatgtccccgtcgagatagacgaaaagactttgaccgagattgcaggtacaacgaacggaaattatttccgtgccaccagcaattccaagctgaaggaagtctatcaggagattgacaaactggagaaaacgaagttgaacgtgaaagaattcagcaaacgcgaagaagaatatcaggtattcgcctggattgctttcttctgcattttgcttgaacttttgttgcgtaactcagtattaaagaaaataccttaaaaaaagaaagtcatgtttcgatttgcagacccgaactttttatatttactcatcctattgccgtttttggtggcgctgtatttgtattccaattatcaccgccgccaaaatattcgcaaatatggtgatccggcattgctgaaagggcttatgccgactatttccaagtatcgtcctgacatcaagttttggctgacttttgctgcgttgacattggttatactgatgttggcccgtccacagttcggctcaaagatggaaacggtgaaacgaagtggagtggaagctgttattgcattagacatttcaaactctatgctggcagaagatgtgactcccagtcgtttggacaaatcaaagaaattgatatccagactggtagatacgttcaataatgataaagtaggattgattgtttttgcaggtgatgctttcacgcaattgcctattacaagcgattatgtttctgccaagatgtttttggaaaccattaacccgtcattaataaccacacaaggtacggatatcggtacggccatccgcctggcaatgaagagttttactccacaagaaggagtgggacgtgcgattattgtcattaccgatggtgagaatcatgaaggtggggcagtagaagcagcccaggaagcagccgaaaaaggtatgcaggtatttgtactaggggtaggttcaccggatggttctccaattccagctgagaatggtagcaacaattttcgtcgcgataaagatggaaatgtcatcgtcacccgcttgaatgagcaaatgtgccaggaaatagccaaggcaggcaatggaatgtatatccgcgtagataataccaactctgccgaaaaggtgttgaacaatgaaattgctaaattgtcaaaagctgatgtagaaagtcaggtttatactgaattcgatgaacagttccaggctttggcatggctggtgcttatcctgctggtggtagaaatgcttattttggaacggaagaatccgcttttcaaaaatgtcagactatttaaataaggaatgcttatgttacaaaaaacctatatcactctgttattcttacttgtggcaagctgtgccttcgcccaaaaaacagaaagagattatctgcgcagtggaaacaagctgtataacgacagtttgtttatcaaagcggaggtagattatcgtaaggcattggaaattaacccgaaatcaacagatgctatgttcaatttgggaaactcgctcttgatgcagcaaaaagcaaaggaagcgatggaacagtttgaatctgcttcaaaagtagaaaaggatagagataaactagcacagatttatcataacatgggagttatccttcagtcgtccaagcagtatccacagtgtatagaggcttataaggaatctttacggaataacccgaaagatgatgaaactcgttacaacttggctttggcacaaaagctgttgaaagaccaacagcaaaatcaagaccagaatcaggataagaatcaagatcaaaaacaaaatcagaaagacgacaaaaaggatcagaacaaagaccagcaagaacaggataagaaagaccaacaaaatcaaaatcagcaacaacagcagcaaaataaggatgaaatgtccaaagaaaatgcccaacaattattgaatgctgtgatgcaagatgaaaagaatgtgcaagataaagttaaaaaacaactgcaaattcaaggaaagaagttggataaagactggtaatttcttaattttggcaaataaaaaaataattagatagcaatgaggaaagtaattctcttattcatattaataacatcggtgctcggagcatgggcagacggaaatgtgacgtttaccgcttctgcgcctgatgtagtagtaagcggggatcagttccggctgacttatacggtcaacactcataaagtcagggattttcgtgcacctaatatcaaggggttcgatgtcttaatgggaccaagccgttcacagcagagtagtacacagattataaatggtaatgttacttctaccagctccattacttttacttatattttgatggctgataaagaaggaacttacaccattcctggtgctactattgtggcagacggacaaaacaaaacttcaaattccgtacaaatcaaagtattaccgcctgatcaaacaaatggtgttggaggtggaaacaatagcggtggaagaacttcttcacgcagtcaggttgccggaagcaaaataaccaatcaagatttgtttattaccgcaacagcaagtaagactactgtttatgaacaggaagccatcttgttgacatacaaggtctatactttggtaaacttgcgccaactgcgtggtgacatgcctaaactaaccaacatttatgtacaagaagtggaacttccccaacaaaagacattctctttggaacattataacggaagaaactataacactactgtgtggagtcagtatgtacttttcccccagcaatcgggaaaaatagaaattccggctattacctttgaaggggttatagctcaacaagttgcctcagacgatccttttgatgctttctttaatggtggaagtaactatgtggaagtaaagaaaaacattgttactcctaagctgaccatcaacgtaaaagcattgcccgatggcaaaccaattaatttctccggaggagtaggagagtttactatcagttcgtctataagtacaaaagaactgaaaacaaatgatgctgtaaccattaagttagtcatttctggtacaggtaatttgaaattggtcaatactccggaagtagctttcccaaaggattttgaagtatacgaccccaagattgacaataaatttacattaactcgcgaaggtttgtcaggcaataaggtgatagaatatctagcaattccaagacatgccggcaatttcactattccgcctgtcgaattttcctattttgacttaaaaagcaatagctataaaacaataaaaacagaagcttacaacctaaaagtggaaaaaggtgcaggaaatgcagatcaagttattgcagactttaccaacaaggaagatttgaaagtattgggacaagacatccgttacatcaaaatgggggaaactagtttaactcgtaagggagatttcttctttggctcaacaacatattatctatggtatatcattccattggttctcttcgttgttttcgtaattgtctatcgtaaaaaagctattgaaaatgcaaatgtagcaaaagtacgtactaaaaaagcgaataaagtggctgccaaacgcatgaaaaatgcaggcagattattagctgaaaacaaacaagaagcattctatgatgaggtgttgaaagcactttggggatacatcagtgataagttgaatatcccggtttctcaattgtctaaagataatatcgaggacgaattgaccaaatatggtgttgcccccgaactgattaaagatttcatcggaacattgaatgaatgcgagttcgcccgctatgctccgggtaatcagaatgaagctatggataaagtatattcttcggctgttgaggtcatcagcaaaatggagaatagtataaaacactaaatcaaaggagattataacaatgacaaaaatatatttcattttgatattcctgataagttttgtcacagtctacgcacagaatgaatcagactctgcacaggttaccgcccaaacagaaatgccacaaagtgctgctgtgcaaactttcccaacaaagacagaagccgatagtgcatatataagaaacgactttgcagcttctgtagagatgtatgagaatatattaaaaaacgagggggaatcttccgatatttattataatttaggtaacagctattataaaatgaataacattgccaaagctgtccttaattacgaacgtgccttgttgctaaacccaggaaatagtgatattcgtttcaacctagaactggctcgaagcaaaactgtagacaaggtaatcccttctagtaaaatgttttttgttacctggactcaatcacttattaatacaatgagtgaaaaggcatgggcacatacaggcattatcatgtttattctgatgatattggcactgtctttatttattttcggaaaacgagtagtcttgaagaaagtaggatttatttcagcaatctttttctttctagtgaccattttagcaaatatatttgcctcagaacaaaaatctgaattaattaatcatgataacgctattataatggctcctagcgttacagtcaaaagtactcctaaccaaagtggaacagacttatttattcttcatgaaggtaggaaagtaataattaaagataatacgatgaaggagtggaaagaaattaaactggaagacggtaatgtgggatgggtacctaccaatgttattgaaatcatttaaaacataatcaatggatatacaacagtacatagcagcagataaagaattactactgaatttgaacggaagccaatccttattttgggacggattcatgtgggtagctaccagtacaattgtatgggtacctgtagctgctatgctgttatatatcataattaaaaataacaaaattcaagaagcattattgactatcgttatgattgccttagtcataactttagcagatcaaatagcttctggtttatgcaaaccgtttttcgcacgtttccgtccaacacaagaccccaatattatgtatatggttgatattgtaaacggatatagaggaggacgatttggcttcatatccagtcatgctgccaacacatttgctatttctgtctttttatctttactaattaaaaggaaatctcttacttttatgcttcttttttgggccgtactcaattcctattctagaatctacttaggagtgcattatccgggagatattctttttggtgctatagaaggttgtttcataggatatttgatttatctcctttataaatttattcaaaaaaaaatcttttataaaccacgttgcatttctaatcaatacactgccagcggttatttgattagtgatattaatttattctacataattctcatttctacttatttcttcattattatagcaggtatgattgtgactcatacactcaatctataatcagcaaattaaccattataaatttacatatagtcaaaaatagcacaaaaagatttgttttatgcatttttttgattaagtttataccatgatttaagtactcacttttataactaaatttaatacatcatgagaacaataacatttaatgaactgcgcagaatcaaagattcattacctagtgggagtatgcacagaatcgcagatgaactcaatatgaccgtagaaactgtacgtaacttttttggtggacacaatttcaagaatggtaaaagtgttggaattcatttggaaccgggaccagatgggggactagtaatgctagatgatacaacagttcttgaaaaagcccttcaaatattgagagaaactgaagaaaaaataacgcaagaagtgtaatataaaatcccggttgaattgcaacattcaattgggattttttgtttaacctgaaaatcacttaaaatatagaattatggaagataaattggtaaccttagcaatcctcacttacgctaaagctcagattttaaagaatgtgcttgagaatgagggaattgaagcgtacattcacaatgtgaatcttattcaacctgttatatcttctggggtaagactaagaattaaagaaagcgatctgccccatgctttgcaaattatagaaagttctgcatggctttcagaagatataatcaaagggaaggagagtagctcggaaaaaaacaaagaaaaaagaaaagtacttatcccggtagatttttcaaactattcccttaaagcctgccaatttggtttctcttttgctaatgctattaattcagaagttgtgcttttacatgcttatttcagtcctatttatgtgcctacaattccttatggaactgataatttcaattttcagatcgaaagagaagaatctgtaaaaagtatgatagaaacagtgcacaacgagttgaacaaactttccgatacaattaaaaagaaagttgagtcaggagagtttcccaatataaaatatacttgtattttgcgtgatggcattcccgaagaagaaatcttacgatatgctaaagaatataatcctcagataattataatgggaacaagaggaagaagtcaaaaagatatagacttgattggcagcgttacggccgaagtcatagaaagaagccaatcctttgtatatgctattccagaacatacaccattaaaaacattcaatgacataaaaaaagtagcttttgtgaccaattttgaccaaagggatctaatagcttttgactccttgataaatgtttttaaatcgtttcattttgccgtttccttcgttcatttaagtacagataatgatgcatggcatgaaataaaactagcaggtattaaagattattttcaaaaacaatactcaaaattggaactacattataatgtagtgaaagaagataacatactgagcaatttggacaaatatgtaaaagaagaaaatatagacgtaatttgtatcacaaactataaacgaaacatatttgctagattgtttaatcctagcatagcaagaaaaatgatatttcatgctaatacacctatattagtaataaaataaagaatcaagaagggtagcacaagcaaatcgcaatattttgttactctttaacatattaatatctacccaataaaaaagagatcaatataaattaaacataatattgattatatatcaaaaatggttctcgtaaacggatgtatgtaatgggtaaacttttaaagatacataaaactttaggtaataacaaaacccgggcttgggaaagtcttttggcataaaaagagaggttgtgccagaattttaacacaacctctttattattttaaaatcagtgtttttattaatatcctaattctttttccaaagaatcatattcagctctatttaacttcc

SEQ ID NO: 14425 - DNA, 16512 bp, Unknown
  gut microbiota DNA sequence
ccccacaaagccttattgtcaggctttaattcttttgccttctcatagtatggtttagctttctcatacaactctttaatcttactttcgttttcattgtatttgggatcatcaatagctagcttcgcattttcctcaacaataatctgagctgggaaaaaataacagtcaccaatctttgaatatgcttcagcaactaaatctccgttatttgaaataattttattaaatgtagcaattgcatcatcatactgctttttctcatataataagataccttttacataaagatagtacggagtttcactcgtagcaagcaatttattaatttgaaccagaccctcatcaaccatacctttttgaatgtaataatccataatattaccaacaaagtattcttgcttagggaacaattcagtaccttctttgattacttcaagccattttgcagaatcaccaccttctttctgaccatatgtttcagccaagcacattaatgctctataaccttcttctttatgattcttacctatattaccatatttgatgacagcctgattatctttcagcatattagcagctaaagttgcatagcaagcatataatgcattcaaagtatcagtcttcaactcatcatcatcagcaaacataggttcgtttactacatcaacaaataacccaaaatactttaaagcatcagcataatctcctttattgtaagcatcaccaccaccattaaccaggtttaaacgcaaagtcttcaaagcatctgcattcttctttctgaatttgggtttctttaactcgccactttgaactttagcctgctctatttcatcgcatttcaagtagaagtcatacatcttagctaagctgttataaagcttagttgtatctgcttggcctccaggtaaataaagtttcatgttttcttcatcataaattgctttctgaaaatctcctgctaatttccatgtttccggatcattagcagtttcaggattagttaaagccggttcgatagcttttgcagcttcttcaggtttgcttttcaaggatttagcctccttaacaacacttacttgtgcagacacaaagcaagctgttaacaataaagccactgtaaataatacttttctcatgattttgtggatttaataatacaatttattttattcttcactatttgcttcggcaattaaatctggattagtgatactaccaccctctccttcagttatattttcaaaatctgcatttgaattttcatctgtaatctcctcttcttcagatgtcaccttacatacagaacctatttggtcattacgtttctccaaatttatcaatcgtacaccttgcgttgcacgtcccataatgcggacctcagcgactttcaaacgaattgttataccagatttattaataatcatcaagtcattcccatctgtaacagacttgatagccaccaatttacctgttttatctgtaatattcaacgtttttacacccttaccgccacgattggttttacgataatcttcgatatcagaacgtttaccgtatccttgttcagaaactaccatgattgattcagcttcaggatcttttatacaaatcataccgataacttcatcgccaccatcttcatccaaagtcataccacgcactcctgtagccgtacgtcccataacacgaaccgcactttcgtggaagcgaattgcacgaccattacggttagcaataatgatttcattatcaccgttagtcatacgaacttcgatcactttatcatcctcacgaatagttatcgcattaacaccattctggcgaggccgtgagtattgttccaacaaagtctttttaatgacaccattctttgtacagaacagcacataatgactattaataaactcggtatcattaaggtttttcacacgtaaatatgctgtaaccacatcatcggaatcaatattcagcaaattctgaatagcgcgtcctttggcatttttagttccttcgggaatttcgtaaactttcaaccaatagcacttacctttctgagtgaagaacatcatagtattgtgcattgtagccggataaatatgctctacaaagtcttcatcacgggtttcacttccttttgatcctaccccacctctattttgggcacggaattctgataaaggagtacgcttgatatatcccatatgggatatcgtgataaccatctgatcatcagcataaaaatcttcaggattaaattcttctgaagaataaactatttcagaccgacgggcatccccgtatttctcttttacttctatcaactcatctttgattacttttttacaaagttcatcatttgaaagaatttcttcataataagcaatctgtttcatcacttcttcatattctgcgtgaagctgatcttgcatcagacctgttaattggcgcaaacgcatttctacaatagcacgtgcctgaatttcactcagattaaaacgttctattaaccctgctatagcatcattaggggtttttgcagcacgaataatacggataacttcatcaatattatcagaagctataatcaacccttcaagaatatgagcacgctcctgtgccttccgtaaatcatactgagtacgacgaattaccacatcatgacgatgttctacaaaatatctgattaaatctttcagattcaacattttggggcgaccatggaccaaagcgatattatttacgccaaatgaagtttgcaaagctgtcattttgaacaatttgttcagcaccacactagcatttgcatcacgtttaacatcaataacgatgcgcataccttcacggtcggattcatcatttacatacgaaataccatcaatcttcttgtcattaactaaagatgcgatattttcaatcaattccttcttatttacattataaggaatttcattaactatgatcttatcatgtgtagtatgagtttctatctcagccttagcacgcatcaccactctaccacgtccggtttcgtaagcatcacgtaccccgcttataccatatatatatccacctgtagggaaatccggtgcttttacatattgcataagtccttcaatatcaatatcattattgtcaatgtaagcaatacatgcatcgattacttcagaaagattatgagtaggcatattggttgccatacctactgcaataccggatgctccatttaccaacaagttaggaatccgtgtcggcatgacagtaggttcctgcaacgtgtcatcaaaattattctgaaaatcaacagtttccttataaagatcctgcatcatctcttcacctattttctttaatcttgcttccgtataacgcatggcagcagggctgtcaccatcaacagagccgaagttaccttgaccatctaccaacggatatctcatagcccagtcctgagccatcctgaccaaagctccatacacggaaaagtcaccatgcgggtgatatttacccaaaacttcacctacaattcttgctgatttcttataagctttatcggaggtattacccagctcaatcataccatataagatacgtctatgaaccggtttaaagccgtcgcgaacatccgggagggcgcgcgcaacaattactgacattgagtaatcaatgtacgacgacttcatttcctcttcgatgttaatctttataattctgtcttgttctagcatttaaacaaatattaattatacatctttttggtttaccaaaaaccacgctaaagtactacttttatacgacatacgaaacaaaacccataaaaaagttaagtccattaaatgtttttacttatataagtaaaaagtatccctataccttattctatagtatatagtgattatcactcccacttctcatttactttgtgaatagtttgctataacccttatttttgtttaatccatttagtctgtcaaagcttggcatacattttgttatgctaatataaataagaaaacaatggtatgcattgttattatgtgtatctttgcacactgggaaataaacactatactttaggaggacgataaatttatgaacaatcaatttacacaaagagtgtccgatatcatcatgtatagcaaggaagaagccaacaggctgcggaatagctatattggtcccgaacacttgttgttgggactgatacgtgaaggtgaaggaaaagctatcgagatcttatttaatttacaaataaacttacaggacataaaaaatcagttggagaccattgtgaaaaacaatgtggaaaatgacaccacctatgacgagaatattagctttaatgacaaagcatccaaagtgttaaagttatgtattctggaagctaagttattgagaaacattgcagctgactccgaacatattttattagcaattatgaaggtcaaggataatacagctttccacgtcttggaaagcaatggcgtaacatacgaaaaaattaaactcactttacagccagatccccatgcaggtctggggttcagtgaggacgaggatgaagacgaagatatacgtcagaatccaagtagcaataaatcaaatgcagcacaacaacaggcacgtccggcacaaaaaaagccagctaatgacactcctgtactcgacaattttggcacagatatgacaagagctgccgaagaaggaaaactggatcctgtagttggccgggtgaaggaaatagagcgactggcacaaatattgagccgccgcaagaagaacaaccctattttgattggcgaaccgggagtcggcaaatctgccattgttgagggacttgcattacggattgtggaaaagaaagtatcacgtattttatttgataaacgcgtgatagctcttgatatgactgccgttgtcgcaggcactaaatatcgtggacaattcgaggaacgtattcgttccattttgaacgagttgaagaagaatcctaacatcattcttttcatcgatgaaatccacactattgtgggagcaggttctgcagcaggctcaatggatgcagccaatatgttgaaacctgcattggccagaggtgagattcaatgcatcggagcgacgacattggacgaataccgccaaaatattgaaaaagacggtgcattggaacgccggttccaaaaggttattgtagaaccaacaactgcagaagaaacacttcagattttgaaaaatatcaaagataaatacgaggatcatcataatgtgaactatacagatgcggcccttgaagcctgtgtaaaactgacagaccaatatatcacagaccgtaacttccctgataaagcgatagatgctttagatgaagccggttcgcgcgtacatcttactaatatcactgctcccaaagaaattgaagaacaggaaaaactgattgatgagatgaaatctcttaaaaatgaagctgtcaggttacaaaatttcgaactagccgccagttatcgtgacaaagagaaagaatatacgaaccagcttgatactctgaaggaagaatgggaaaaaagcctgaaggaaaatcgggaaacggtagatgacgaacaaatagccgaagtcgtttccatgatgtcaggcgtacctgtgcaaagaatggcacaggctgaaggaatgaaattattaggaatgaaagacgatctgctttctaaagttatcggtcaagacaaagcaatcgccacactggtaaaagctattcaaagaagccgtgtaggtctgaaagatcctaataaaccgattggtacattcatgtttctaggtccgacaggtgtcggcaagactcatctggctaaggagttagcgaaactaatgttcggttcggcagatgcacttatccgcattgacatgagtgaatatatggaaaaattcaccgtatcccgtctggtaggagcacctcctggatatgtaggttatgaagaaggcggacagctgacggagaaagtaagacgtaaaccctactccatcgttttattggatgaaattgaaaaagcgcatcccgatgtattcaacatactgttgcaagtgatggatgaaggtcggttgactgacagttatggcagaactgtagactttaaaaataccatagttatcatgacatccaatattggaacccgccaacttaaagaattcggaaaaggaatcggatttgccgcccaaatccgtacagatgacaaagaatactcgcgcagcgtgattacaaaagctttgaataagtcttttgcgcccgaattcatcaatcgtctggacgaaataataactttcgaccaactcgacctgaatgcactgactcggattatcgatatcgaacttaatggtctttacagtcgtgtggaacacattggttataagcttgttatcgacgaagatgccaaaaagtttgtagccaccaaaggttacgatgtacagttcggagcacgcccattaaaacgtgccatccaaaacaatttggaggatggaatctccgagctgatacttggatcagaaatggcggctggtgacacgatcaaggtaagctatgacaaagaaaaagacatcattgtcatgactgtggaaaagtaaagagtccaaagttcttcaaaaaataacagacaaaatgtcagatatcattgtatctggcattttttttgcccatcatccaacaaaaagacgattcaaacgtatatataacataataacttaaaaccataaatagtatgcaaaaaggaaatattggggtaaccactgagaacattttccccatcatcaaaaagttcttatacagtgatcatgaaatattcctccgtgaattagtttctaatgcagtagatgccacacagaaactgaaaacccttgcatctaaaggtgaattcaaaggagagatgggagatcttactattaaagtaagtttaggaaaagataccatcaccatttccgaccggggtatcggacttacagccgaagagatcgacaaatatatcaatcagatagctttttcaggcgctaacgacttccttgaaaaatataaagatgatgccaatgccatcatcggacactttggtctgggattctattctgccttcatggtagccaaaaaagtggaaatcatcacaaaatcccaccaagaaggagcacaagctgtgaaatggacttgcgacggaagccctgagtttactatcgaaaatgttgaaaaagaaagccgcggatcggatattatcctttatatagatgatgactgcaaagaatttctggaagaaacacgtatttcttcattgctgactaaatattgccgcttccttcctatccccattgcattcggcaaaaagaaagaatggaaagatggaaagcaggttgaaacaaatgaagacaatgtaatcaacgaaacctatcctttatggacacgcaaaccggtagaactgaaagacgaagattataagaaattctatcgggaattatatcccatggcagacgaacctttgttctggatccatctgaatgtggattatccgttcaatctgacaggtattctgtactttccgaaagtaaagagcaacattgaattacaaaaaaacaaaatccaactttactgtaaccaggtctatgtcaccgactcggtagaaggtattgttccagacttcctgaccctgttacacggagtgattgactcaccagacatcccgttgaacgtatcccgttcttacttgcagagcgattccaacgtgaagaaaatctccacttatatttctaagaaagtatcagaccgcctgcaagccatttttaagaatgaccgcaaagaattcgaggagaaatgggatgatttgaaaattttcatcaactacggcatgttaacccaagaagagttctacgaaaaggctaataaatttgctctgctgaaagacacagatgacaaatattatacttatgaagaataccaaagcttgatcaaagataatcaaacagataaggacggcaacttgatttatctgtatgctacccatgcagacgaacaatacagctacattgatgcggccaagaacaaaggctacaacgtattgttaatggatggtcagctggatgtagctatggtaagtatgctcgagcaaaaatttgaaaagagccgcttcacccgtgtggacagtgatgtaattgaccgcctgattgctaaagaagagcgcaaagatgccagtctggaagccggccaacgcgatattctatcttccatattccgcagtcagttgccacagatgaagaaagtggagttcaatgtagaaacacaatctttaggcgagacaggaactcctatcatgattacccaaagcgaatatatgcgccgtatgaaagaaatggccaatatccaggcaggtatgagtttttatggagaaatgccggatatgtttaacttggttctgaatgtcgaccacaaactggtgaaacaagttttgaatgatgcggacaactcttgtaaagctgctcttgaacctatcgaaactgaaatgaccagtctgaataaacgtcacgacgaacttcacaaagcacaggaaggtaaaaaagccgatgaaatacctcaagcagaaaaagatgaattaagtgatgttgagaaaaagttggccgatgaaaagaccaagaaagaagctgttttaggtgaatacgcaggtggtaacaaagtaatccgccaattgattgaccttgctctgttacaaaataatatgttgaaaggcgaagctttgacaaactttgtaaaacgcagtatcgaactgatttaacaaatctatcacattttgctatcaaaagcgtcgggaagttcatttccggcgcttttttattctaaaaaacgattggaaacgaagatttctttctatatttggagcaacacatacaaagattcgacatccatgaaacattatctatatatactttttcttctctttttactgcttcctcccatccatgcacagaaagtgggactggtactgagcggaggaggtgccaaaggcctaacccatatcggcattatccgcgcattagaagaaaacggtatccccatagattatattgcaggcacatccatgggagccattgtcggttcactttatgctatgggctattctcccgatgaaatggaggctttactcaaatccgatgacttcaaacgctggtattcaggtaatgtggaagagaaatacatctattatttcaagaaaaatcctccaacacccgaatttatcaacatccgtatctccctgaaagactcgctgaagaatgtcaaacctcagtttttgcctaccagcattgtagatcccattcagatgaatattgtatttctgcaattattcggtcaggcaacagctgcaagcaaggccaattttgacagcctgtatattcccttccgctgtatagcttcggatgtgtacaataaaagaccactgatattgaaaaaaggagatctgggagatgccgtacgtgcctccatgagttttcctgccatgttcaagcctatcgaaatagactcgatactggcatacgacggtggcatttacaataattttccagtgaatgtaatgcgtgacaccttccatccggatatcattataggaagtgccgtatccgccaatccgggcaaacccaaggaaggtgacattatggggcaactggaaaatatgattatgcaaaagacagattactctttacccgattccctcggcatcctcatgacttttaaatatgatgatgtcaatttaatggacttccagcgctttgacgagttgcatgacattggttataaacgtgccatagaaatgatggactccataaaaagccgaattcatcgaagaatcacccccgaacaagtgaaagttaaacgactggcctataagagcaatttaccggatttccgtttcaaaagagtaaatataactggtgccaacgaacgacaaaagcaatatatacaaaaagagttccatgaaaacgacttcgatgttttcactatggaggatatcaaacgagcatatttccgtttgttgtccgataatattatatccgaaatcattcctcatgccgtttataatgagaaagaccaaacctacgacttgaacctccaagtcaaaatggaggccaatctctccgttcgtgtcggtggaaacgtgtcttccagtggctccaatcaagtctattttggtgcttcctatcaaaacttgaactattattcaaaagaatttaattttgacggacagttaggtcgggtctacaataatgtgcaacttgcagcacgaattgattttccaaccaagctgcctacatcttataaattcatagcctcgatctctaccttcgattatttcaaagaagccaaattcttttccaataaagacaatccggctttcaacaagaaaagagaagagtttgtaaaattgaaggtgtcattaccgtttctaagccgtaagaaagctgaattcggtgtaggtatagcccgtatggaagacaggtacttccaaaccaatatcatcgacttcagcgagacaaaacatgataaaagcacttattctatcttcggaggctctatcgtattggaaggaagcaccttgaatgcccgccagtttgccacacaaggaagtcgtgaaaaaatggctgcacaaattttcaccggcacagaacatttcagatcaggtgcatccaaagtgactaaagacacaccggaaccttataaaaaggtacaatcctggcttcaagtttcatatcagaacgaaacataccataaggtaagtcctaagtttaccttgggagcgtatctagaggcgtattactcatcccgaaatttctccaataattatacggctacattaatgcaggcaggagaattcactccgacagcccatagcaaagtaacctataatgaggctttccgtgctaatcaatatgccggagtcggcgccatgcccatctaccagttaagcgagtcttttcaattacgcggagaattttatggatttgtacccatctttcctatcaagaaagatgaatatggacaagcatattacgggaaagctttcacaaaattcgaatatcttggagaaatctcattagtttttcaattatcgttcggttctatcagtgcttatgtaaaccactatagttcaccgtctaacgattggaatgtaggtttaacactgggctggcagttgtttaactcccgtttcatcgaataatttttagaaaaaagttttagtaaaacgcttgcattttcaaaaaaagtccgtatctttgcacccgttaaaacaaaagaacaatgaataatggccgcgtagctcaactgaatagagtagctgactacggatcagccggttacaggtttgaatcctgtcgcgatcacaaagaaggccatcttttctgatggtcttttcttgtattttctctctttttttaaatttaaatggctcagttgtaattcttgggggaaaatcccctgttaagcacctccgcgcttctacaggtctaccatttttccgttcttatatctttgcagcatataaaaaagaagcattatggtttagaagaacttgggaacgcttcttggaagcattgaaattatcctcaatcacgcctacaccttctccaacgaaacaatgacgaccaacacaacttctcacacacctgaaaagaacagttcatctttaaacaagcgcttgttcttttttaaaaaacaaggcgtttcaaaggttactaacatacagaccgacaggttagtaacgtgtcgggtaacacgttactaatgtatcaggtgaaagattagtaatgttacgcgtgaaagatatagaatcttacaggtataatatatcaaagaacgaacagacaggcataaaaaaaagactggtgtttttaatgacgaaacaccagtcttatctaattaaaaaaattcctttatcagcatttaattttcaattcatccaaaatagcacgcatcttttcaaatgttgtgatacgagtcggtacaagcggcaaacgtaatttattttcaatcagccccattacattcaacatagccttcaccccggcaggattaccatctacgaacaacaggctgaataattccgtaaacctatgatgaatagtcaatgcatttgcaaaatcaccctgtaatgccaaacgagtcatacgactgaattcacgcggaaatgcattaccgataaccgagataacccctacagcacccaaagtaatcaaaggaaatgtaataccatcatcacccgaaatcacatcaaaattagccggtttattcttgatgatatcatccatctgagtaatattacccgatgcctccttgatagcgataatattcttgaaatcgcgtgccagacgcaaggtggtctcagcagtcatgttcacaccggtacgtcccggtacattataaagaaccacaggaagatccgtcgcttcagcaatcgctttatagtgttggtaaataccttcctgggaaggtttgttataataaggtacagcaacaagtacggcatcaactcctgtcatatcatcatttttcagcgtttccacaacagcacgggtacagttgctgctaactcccagcagaatagggatacgtccattcactctttcgattatcaaacattttatcttgtctttttcttctttagtcaaagtcggggtttcagccgtggttcccaacacgcacaaaaaatctgttccattttgaagctggtaatcaaccagacgaagtaacgcatcataatcaacgctgtcatcttccttgaaaggagtaatcaacgctactcccatgccttttaatcttgtctgtatcataaatgaattataaattcttatttaatagcctacaaaagtacgaatattttctcttttagcgataaaaatcacactatttttagtttatactcgctaaaaagtcactctatcatttgcagaaactcctcttcgctcacaatggtcacacccagtttctgcgcttgctccagtttactgggtcccatattgtcacccgccaaaacaaagctggtcttggacgaaatacttcccacattcttaccaccatgcttttcaattaactccttatattcgtcacgcgaatgatgggcgaaaaccccactaatcacaatagatttccctgccaatttgtcagtgtgtcccgaagtatcctcctcatcagcttccaatctcacacccgccacacgaagacgctctataatgtcacgattcttcggattagcaaagtacaacaagatactctgtgctattttttctccgatttcatcgacatgaatcaaatcatctaaactcgcgtctgccaaagcatccatcgacttaaaggatttcgccaccttcttcgccacagtttcacccacaaaacggatacccaatgcaaagagcaccctttcaaacggcacttctttggactgctctataccttttattatattctcagcggatttttctcccatacgttccaggttgatgatatccgatgtttttaaagtatacagatcggcaacatcacgtatcaatccttcctggtaaaactgatctaccgtttccggaccgagtccatcaatatccatagccctacggctgataaaatgttctatttttcccttgatctgtggggggcaagcggcatcattggtacaataataagcagcttcaccttcatagcgcaccaatttactgccacactcggggcaataagtaataaactttactttatcacctatcataatacgggcgttcttgtccacacctacaatttttggaataatctcgccccctttttctacataaaccatatcgccgatatgcaaatccagcccttctatgatgtctgcattatggagcgaagcacgctttaccacggttccggatagctgtacgggatccagattggccaccggagtcacagcacctgttcttcccacttgataggtcaccttgttcaaacgggtaagtgcctgttcggcctgaaacttgtatgcaatggcccatcggggtgattttgccgtaaaacccaaattacgctgctgtcgcaaagaattcactttcagtactattccgtccgtagctacaggcagattcttacgctccacatcccagtatttgatgaaatcaaatacttcctgcaatgttttgcatttgcgagtaagatcagaaattttaaatccccatttctccgcttctttcaaattttcataatgaccgtcgcacggcaaattatctccaagcaaataataaaggtatgcatccagcttgcgggatgccacaatggcagaattctgcaacttcaatgttcccgaagctgcgttgcggggattagcgaacaacggttcttcgcgggcttctcgttctttgttcaattcctcaaacaccacccaaggcatcaaaatctccccacgaatttcaaatgcttcaggatacccctttccatgcaacaccaaagggatactgcggatggtcttcacattgcctgtcacatcatctccttgcacgccatcaccacgcgtcacagcacgcaacaatttcccgttctcgtaagtcagcgaaatagaagtaccatcgtatttcatttcacaacaaatctcaaaatcttcgttcaaggacttctttaccctgtcataaaactcggttacttccgtttccgaataggtgttagtcaatgaaagcatgggatatttatgtaccacctgcatgaagtttttgtttatatcacttcccacacgcatactgggcgagttctcatctctatgttccggatgtttttcttccagatcctgaagttcacgcatcagcttgtcaaactcctggtctgtaatctcaggcgcattcaatacataataattatagttatgtcgatgaagctcctcgcgcaattggtctattctttctatttctgtcatatatataaaggtagttttcccgcaaaaatagctattttttgaatgaaaaacaccttccggcaaagaggaatttgctacttttgcaaaaaataaccgaatatgagaatagacatcattaccgttttacccgagatgctggaaagcttcttcaactgctctatcatgagccgtgcgcagaaaaaaggaattgcagaaatacatatacataatttacgcgattatgcatacgaccgttatcgcaaagtagatgattatcccttcggtggatttgccggtatggtgatgaagattgaaccaatagaccgatgcatctcagctttgaaagcagaacgcgagtacgatgaaattatatttacatctccagatggagaacagtttaaccagccgatggccaactcactttcactcgcaaagaatttaattattctatgtggtcattttaagggtatagactatagaatacgtgaacatttcattacgaaagaaatcagtatcggtgactatgttttgacaggtggggagttggctgccgccgttatcgccgatgccgtagttcgtattattcccggggtcatttctgacgaacaatcggcattgtccgattcttttcaagataatctgttagcagctcctgtatatacccgtcctgcagaatacaaaggatggcaagttcccgatgtgttgttatccggacacgaggcaaagattaaagaatgggagcttcagcagtcattagaaagaacacagcggctaagacccgatttgctaaaataaaaaatatatataaaaaataaagagataaaagccttatgatgaacatggcttttacctctttgcttttgtttatatcatacctgaaaagatgttctctctttaatataacctaagtccatcttccttttccttatatattgataaagctttttcaagtgtttttctactccattttttcaaaaacaagccatttcatcgaaaaaaaataattgaagttatcattttatacccatgcaataagttgtaacaacaaccatttttatactcgttctatctagagaaggttataaaaaaagccctgcaagaaatgcttcaatttattcatctacactctcgcagggctataatttaaaagataaaattttcagatttctaaagcgcctattatatcttttacagatgtatatccatgacgttccaaatagtcatttattccttctgaaactttgacagtaatagctgggtctatgaagttggcagtacctatctgtattgcggtggcacctgccaacataaactccacagcatccttccagcccatgatcccccctagtccaatgacaggaatatttactgctttagcgacttgccataccatacgcaatgcgattggtttcacagctgcaccactcatgccgccggtaatagtggaaagtacaggccgacgcttttcagcatcgacagccatccccagcagggtattgatcagagatacactgtccgcaccggaagcctcggccgcacgtgctatttctgtgatgtctgtcacattgggagataattttacgatcagcgtctt

SEQ ID NO: 14426 - DNA, 37019 bp, Unknown
  gut microbiota DNA sequence
gtttaatgagatgtaaaaatacagttatttccttagatattatctattcatctctaaaaaatagactcttgtcgactttttagcatttaaaaacatggaaatattgcattattcggtggaaaggcgtaaatttgcgcaattatttgaataagatgaaaaaatatatcattatagctcttgtctccggtacggttctaacgtcttgtggagagtataacaaagttttaaaaagcacggactacgaatacaagtacgaagcggccaaaagttactttggcaaagggcagaatactaaggcggccaccattctggaggaattgattaccatcatgaagggaacggataaggctgaggaatcactttatatgttgggtatgacctactataatcagggtgacttcatcacagcttcgcattatttcaccacttattataatacttatccgcgtggggtctatacggaacaggccagatatttttcaggaaaagcattgttcttggatactccggaacctcgtttggaccagtcgagcacctataaagctattcaggagttgcagatgtttatggaatatttcccaaccagtagccgtcggcaggatgcacagcaaatgatttttgatttgcaggacaagctggtgatgaaagactatctggctgcgaaattgtattatgatttgggttcttatacaggaaacagtacttatagtactaccggtaacaattatttgtcttgtatcgttacggctcagaatgctttgaaagactatccttataccaagatgcgcgaagatctttctatcttggtcttgcgtgctaaatatgatatggcgaaagcgagtgtggaggaaaagaaagaagagcgtatgcgtgagacgatagatgaatattattctttcaagaacgaatttcctgacagcaagtatactaaagaagtggagagcatctacaaggatgccaataagtatgtaaaagaatttaatgaataaaactaaataagaaattatggattacaaaaagacaaacgctccaagtaatactgttacccgtgacatgatggatttatgtgcagacacaggtaacatttatgaaactgttgctatcattggcaaacgcgccaaccagattagtgttgagatgaagaatgatctttcaaagaaattgcaggagtttgcctcatacaacgataacctggaagaagtctttgaaaatagagagcagatcgagatctcacgttattacgaaaagcttccgaaaccgacattgatcgctgctcaggaatatgaagaaggcaaggtttatttccgtaatcctgctaaagaaaaagagaaactacagtgattcttcatttggggttgtgcaaaaggtctttaccacagattacacagatcgttctattttgatacatgagtcatttcgtgtggaaactgtatcaatctgagtaatctgtggtacattttgatgcacctcacattatattagccctgttatgctgaacgcagtgaagaatctgataaccattcactttgtgttttcaggtttttcactgcgtttagaatgataggttgtatgattaaaattaaagagactatgatacaacgcattcaatctgtttatttacttgttgttaccatcttgattattatttgcctgtgtagtcccgtaggttcatacataggaagtgattatagtgtttccgctttaacaaatctgtgtcttactatggcggatggtactaaagattatgctccatgggccttgtttgtgattttgctggttgttgcggttcttgctttcggcactatcttcttgtttaaaaaacgcatgttgcaaattcgtctgactattttcagcaccattttgttgatcgggtattatgccacattggccacttttatttttatgttgaaagaagagtcaatgacattttctctttcatggactgtatgtctgccgttggttgccatcattttgaattggcttgccatccgcgccattggtaaggatgaggtattggttaaagcatacgaccgtttgaggtaagctgagggaatattatgatataaaaagcctgcaagatccatcttgcaggcttttgttgttatgagagagagtggaacgcggactatttgcagaataaaatctttttttttatttagtaatatctatcagataactcagccgtatgcctatgaatgaatgggctgatctttcgaaaaaatctcttttcgaattcttgtaaaagtcgctcaatcccatgtagtaacgtccttccagcaggaaatgtccgataccggtacttacttccagaccggcgccggctgtgataccataatcgaatttattctctacctctttaccgtgttccggtcttgttgtagaagtagtccagtttatcttttcgttgtcacccaggaaaaagccgatttgtggtcctgcattgaaaaagaccttcactccccggttcaatgcatccttgccgaatgccagatgtgccatgaaagggatttccagataattcatggtacggctgtaagaattgccggaatcgtcttctatcttttcgtcccatccgcgttgtgaatagtttatttccatttgtacgccacacatcatcttgaaatatttctcggacatatatctcatggtaacccccatagacatggtgttcaaggtgttcagtttgattttcgggttgaaactgacggaactcatgttcagaccaccattgatgccgacggcaaaattatgacgttcttcacccaactgtgcagctgccggcaatgcaaagagcaatgtcagtacaagcagcccgaatttcttatacttttccattattcaaaatcaagtttaatcagttcaaagtccttggtaaaatgaacgaagaacactttgcgattgataaatccaccccagttgtttacgcgttcaaatttaaatccggtctggataggggtgacagccaccttgtccagtttgtcttccagtttgttgccgtattgggacaggcccttcaggaagaaatatcctgtatcgaatcccagcataccatatttagggaatgagttgagcatatccttgctgtaccatttgcggtaagccgatgagaactgaacggcttccggaaataaattgtttgtgtaaaacgaagaatagaaataggtgtccagttcatagaaactggccagatggtcgttggtataggtctgccattccggatagccgaataactgcatacggtagtcgggattgtcacgggaggtcacaatcagttgtggtaacagttttatcaatgccacgttggtgccggaagtcgggatgaatacattatccatactatggttcatcgcggctttcaatgattccggagtaatattttccccttttaattcggtaaaaggaatgcgtttgttttttaactcctctttcagcccttttataaaatccactttgtctttatcaccatcttctgcatccaggaagataacattggcggttgtaaacttgcgggtaaaatgctcataaacttccgagtataaataagattggggagtatttatctgatagatggcgggattgttgaaaacttcattccctttggaggtaaaaggtactaccagccggatattgtttttcttggcaaattccgcaaccggtttcacctggtcgggataagctgggccgaagataatatccatgctcttcaattcacttctatccagaatgttcttgatggaagaagtattgttatgggtgtcgtatgagtacaggtcgatggatactcctttttccttcaagctgtctactgccatcaggaagccttcatagtattccaccatacgtgtctgttcgtcacggttgcccttaccgtctgtcatgaatggcagcattacggcagctttgatggtagatattttgcgtgcctccttcttgctttcattaaacagctggtcatccgtgggaattacggcaggcgtattattcacaggtgtttcggtctttgtatccttaggatatggaatacaaaggaactttccttttttcagtttttcggtacgcagttcaggattggcggcaatcagttcggcttctgtgatgccatacaggcggctgatgctgaatatggtttccttgcgttccactttatgcatgtccctgcaattgggtttcagtggggtggaagtggtgaccggcttggtagtctgtgcagctttcacctcgttcataattatctcctcgctgtccgtcactttggcgggaattacgataacctgtccgatacggaaattctccgcgctcagcccgggatttgcctggcagatgcgttgtgcggttactccatagcgttgtgtcagcttgtacaaggtttcacccgactggatggtatggaacatctgctgttccgttccgctgttcttttgtggaatcttcaatgtttcaccggttttaattttctggtcactgccggggttcattttaacgatgtcaccggtagtgacattatacatgctggctatggaataaagactttgccctttggtgatggtgtgcaggaaatagccggaagactgtgtttgagccatcattccggtgctgctggcagacaaggctgcgataagatataatgctcgaataaatttcatttgcagtgtgttgattaaactgagtggcaaaagtacaaaaaaaactgttttattcacattatatagaaagaatagaaaatattattaggctttttaattaaatatttcgtcgggaagcattaattttgcaaagattacgcagagtaagaagactatgagtgaagaaaaagaactgattaatgtatacggtgcccgtgtacataacttgaaagatatagatgttgaaattccacggaacagcctgacggtgataaccggattgagcggaagcggtaaatcgtccttggcattcgataccatcttcgccgaagggcagcggagatacattgagaccttttccgcatacgcccgtaatttcctgggagggttggagcggccggatgtggataagattacaggactcagtccggtaatttccatcgaacagaaaacgacaaacaagaatccccgctctaccgtggggactacgacagagatatacgattatctccgtttgctctatgcccgtgcaggagttgcttattcttgtctttcgggagagaaaatggtgaaatataccgaggaacagatcatcggcctgattcaccgggattatcagggtaagaagatatttatgcttgccccgttggtacgtacccgtaagggacattacaaagaacttttcgagcaagtgcgcaagaaaggttatctgtatgtccgcgtggacggcgaggtgcgcgagattgtacacggcatgaagctggaccgttataaaaatcatgatatagaagttgtgatagataagttggtcgtatcggaaaaggatgacaaacggctgaaacagagcgttgccactgccatgcagcagggtgaggggctgattatgatttatgacgccgatacccgggaggtgcgccattacagcaagcggttgatgtgtcctgttaccggactgtcttataaagaacctgctcctcataatttttcgtttaactctccgcagggagcttgcccccgttgtaaggggctggggtatgtgaatctgattgatgtggacaaagtgattcccgacaggaatctttccatttacgaaggagccatcgtgcctttgggcaaatataaaaatgccatgattttctggcagatagaggcgttgcttgaaaaatatgattttacgatcaagacgccggtcaaggatatgccggatgatgcgatagacgaaatactctatggctcggatgagcgtatcaagataaagagcaccttgattcatacctcttccgattactttgtaacttatgaagggattgtgaagtacatccagatgatgcaggagaaagatgcgtcggccactgctcagaagtgggcggaacagtttgccaagaccgatgtttgtcccgaatgcaagggcgcgcgtctgaacaaggaggcgttgcatttccgtatccatgacaagaacatttatgaactggcaagcatggatattaacgaactgtatgactggttgcaacaggtcgattcttttttggaagacaagcagcgcatgattgccgccgagattttgaaggagatccgtacccgtcttaagtttttgttggatgtgggactggattatctttcactgaaccgcacctcggtatccctttcgggaggcgagagccagcgcatccgtctggcaactcaaatcggctcccagctggtgaacgtgctttatattctggatgaaccgagtatcggattacaccaacgggacaacctccgccttatcaactctttgaagaagttgcgtgacacaggtaactctgtcatcgtggtggagcatgacaaggatatgatgctggcggcagactatgtggttgatatgggaccgaaggcgggccgcctgggaggcgaggtagtgtttcaggggactccgaaacaaatgcttcagacaggaacgcttacctctaagtatttaaacggacagatgaagatagagataccggccgaacgccgccccggtaacgggaaatccttatggctgagaggggcgaaggggaacaacctgaagaatgtggatgtggaatttcctttgggaaaactcatttgtgtcacaggggtgtccggcagtggtaaatccacgctgataaacgataccttgcagcccatcctgtcacagcatttctaccgttctttgcaggaacctctgccctatgacagtgtggagggactggactatatagataaggtggtgaatgtggaccagtcgccgctgggtaggacaccgcgttccaatccggccacctatacaggggtattctcggatatccggaatctgtttgtcggtctgcccgaagcgaagatccgtggctataagccggggcgtttctcgttcaatgtaaccggaggacgctgcgaggcttgcggtggtaacggatacaagaccatcgaaatgaatttcctgcccgatgtgctagtgccttgcgaggtttgtcacggcaaacgatataaccgcgagacgctggaagtgcgctataagggtaaatccatagccgatgtactggacatgaccatcaatcgtgctgtagagttctttgagaatgtgcctcagattctgaataaaatcaaagtgctgcaagaggtggggttgggatatattaaactgggacagccctccaccaccttgtcgggcggagagagccagcgtgtgaaactggctacggaactgtccaagcgtgataccggaaaaacgatgtatattctggatgagcctactaccgggcttcatttcgaagatatccgtgtgctgatgaatgtactgaacaaactggtggaaaaaggcaataccgttctggttatcgaacataacctggacgttatcaaactggcggattacatcatcgatatgggtcccgaaggcggacggggcggaggacaggtacttgcggccggaactcccgaggaagtggccgaaagcaaaaaaggatataccccgaagtttataaaagaagaattggaaaattaaccggcataccagcaatgaaagagaagatagctaaaaccaacgtagcccgtctgcttgataaagccaagatagcatacgagcttattccatacgaagtagacgagaatgacctcagcgccgttcacgttgccgccagtttgggcgagaacatagaacaagtcttcaagactttggtgcttcatggggataaatctggatattttgtctgtgtcatacccggcgagcacgaggtagatttaaaaatggcggcaaaagtctcaggtaacaagaaatgcgacctgatccccatgaaagagttgcttcccctgacaggatatatccggggaggatgttctcccatcggcatgaaaaaacatttccccacctatatacacgagacttgcatcacatttccatttatttatatcagtgccggtatccgcggattacagataaaaatagctcccgatgacttgataaaagaaacgaaagcagagatatgttcccttttcaccgaataaatatgccaaaaagagtcacatttgtggctctttttttttcagatagactaaaagttatatctttgcaaaaaaagaatactaactattaattaaatctttatcaactatgtttgaaggacagcctaaaggcttatacgcattagctctcgccaataccggcgaacgctttggttattacaccatgcttgctattttcactctcttcctgcaagcgaaattcggctttacagccgccacgacgtcaacaatctttgccagtttcctggcaggagtgtatttcatgccgctgatcggaggtatcctggccgataaattcggttatggcaagatggttactaccggtatcgttatcatgtttgccggttatgtgctgctggctatcccgatggcaaccaatatcggattgtattccatgttcggcgctcttgccctgattgctttgggaaccggacttttcaagggaaatctgcaagtaatggtaggtaatctgtatgatgcccccgagtatagcgcgaaacgtgataccgctttcagtttgttctatatggcgatcaacatcggcgccctgttcgctccgactgccgctactgccatgaccaactatgtgttgggcaaagcaggtttcagctatgtaccccagatcccttctttggcacaccagttccttgacggtacgataacggctgaaggtgaggccacactgactgccatgcagagcgcacagaatttcacaggaagtatggccgatttctgtactacctatattgataaattgtctgaagcctataattatggtttcggtgtagcttgtatctcactggttgcctctatggctatttatgttattttccgttctacattcaaacatgccgattacaactccaagcaggctaaaccggccaatgtacacgaagaagagctgactcccgcacagaccaaagaacgcatcgtcgctttgttgctggtattcgctgtggttattttcttctggatggcattccatcagaacggtcttaccatgaccttcttcgcccgtgactacacggcacatgaggtaaccggtctggatcgccttggcttcagcgtatggaatctggctctgcttattgtaaccgtttatgcaggtttctcactgttccagtccaagacaggcaagggcaaattgatttcaggcgttattgctaccttggctcttgtggttttaggagtcaattatggtactatggaccctacattgcctattcttcctcagattttccaacagtttaatcccttcttcgtagtagctctgactccggtatcactggctgtattcggttcgttggcaaagaaaggaaaagaaccatcagctccgcgtaaaatcggtatcggtatggtgattgccgcagtaggtttcatgctgttggcgtttggctcattcggtctgcctactcctgcagaagtagaagcgaacggtattgccgaaagtgcattggtctcacccaactggctgatttcaacttatctggtattgacttttgctgaattgttcctgtcaccgatgggtatctcgtttgtttccaaagtagctcctcccaagtataaaggtgctatgatgggactttggttcgtagctactgctatcggtaactatttggtggctatcatcggttatttatggggtgatatgcagttgtggatggtatggagtgtattgattgtatgctgtttgctttctgcattgtttattttctctatcatgaagaaattggaaaaggttgcgaaataattcatgccttatatagattaaaaaaggaagcccacttgatttgcaagcgggcttcctttttttgtaatttagcgcgaatcctcaggcttacgttaaattacagaaaaaagatacgaaaacaggaacgctcatgtcaatcagtattccgtggaatatggctaagggaatcatgtcttttcccgaatagcgtgtgatggatggcagcaatacatccatcgagttcactccggcagccgagataggggccagctgtccaaagtatttccgtatgagcggagcgccgagtaaggccatcatttcccggaaaatattggccagtaatgcaatggttcccaattcggtggccagttgtaacccgatagacggttccttgaactgtgtgatcaggatggaggaaagcgaataataggcaaagccgctacccaccgccatacagtcgaatacactccattggcttaatagcaggctggcaagtgccgagaaaagcaaggttcccgtaatggtagctatcggcaccaggagcattttcaaccgtaagcttttaatcagttctttcaatttcttattgctgcctatgctgattcctacttgtaacatcagtgcataaagcacatacatggaaacagagtgcatgtcatactggaaattattgacagctccaatcatacatcctgcacaaaaaaatgcgacaacaaccaaactacctttcattgtttgcctcctttcttaaaaaacagatgaaataccaggaaggaagctagcatactgcccaaaatgcttaatgtagccaatatagccgcctgccatccgaatctacctaaatcgttaatgattaagctgttggagccgatggagattcccaaaacaaacagtagcaggaagatagtgagtgaggtactcttttctatcttttgtaaaaactgtaagttgcgcaatacatatcctataccgataccaacaaacatgatagatataatagtaaacatagcaatcatttttttagtaaaacatatacaactcgatgctctcaccgaatgagaaccatcatgcaatatatctttcatcgggcacgtgtgtgggtaggatgaaagtttggtaataaattacgtgtgagtggaaatctaaacaaatccgctgaaccaatgtacatgcacaatgaagtgattacacaggggggtatttcccgatgtaaggtgatgtatgctgtatgtagtttgtaattggttcatatcaatcgttcatttgcggtgcaaagataagtcttttgtgcatattttcaaaataaatattcataaatcttcttctgttacctctatccgaatacatcgtgtcttttaatataggatcatttattgggaatttatctccgaattctggcgataaaaaatattcattaattgcaggggagaagaactttatcttttcttgagaattatacttttttattgaattgaatatgctgtgtaattgtttgtatactagttgtttatatttgtttgagataaaaatgaagataatgtcataattggtggcaattatctatacaccctattgatattttttgtttctttgtaatctatttatatactaacacaccaaaggaatggattacaccgaacagtttatccggctgaattgcagcttgatgtcagattacaaaatgatgaagctgaatgccgaaatgaaatgcatgggaataggattatatattcaaatgatattgttcctgcgaaggcaacaggaatacaaacacgattttaacgagttggatttgttggctgaacaatggggggctacagtggaaaatttgcagcatctcattaaagactttaacttgttcgtcataacggaggacggatatttccgatgcctgtatctggatgaggtgatgggttatcagaataagctttcggagcaacgtgcagccgccggtagcaaaggcggaagaagcagcaagaaaaagactgcgcaaatagctgaaaaagtaatcacttctactgtgctggtggcagcagataaagaagcggatgacgaagcaaacaataaggaaaacggtgcaaaatgcatgaaaaatacgattgaaaaaagtgatgatgaaaatatagccgaaaatacgattcaatatattgataatgaatgtgttaatgagtgttcacaagcaagcgttaagcaaaactttataagagaagaaaagaatagagaagagaagaaaaagaaagatgatgtaaacatcatacaaagaaacatcgacgtcgacggaaaaattgctgttgttgctgaacttttcagaaacatagaatttacacctcggtggaaacgctatatcaatgaggctttccccgtccggactcaggcggctacagcgcgtatgatgtcggttctggaagaaaggggaattggaccacccaagaaaaactacgcgtcacatggattgctgagagttattgaccactaagtatccgccgttaactacggagaatagatatagatcttacacgtgcaagatgctatatcttacagctgtaagattatatatctttcgccttcatcgtctggatgttgcagatggattcagccgggctgtcggtggcggaatataaccgcctgcccttgttttcacgagtatcgtttgggatatctcaaaaaaatgctcagcagagcaaatactccgatagctaccggataatacaagtattcgatgatgctcagaggagaaagggaagccagcttggcggcaatcagcatttgcgctccgtaagggatgatgccctggatgacacacgagaaagtatccaggatacttgcactcttgcgtttgtccaccctgtaacgggtagcgatgtcgttggccaatggtcccactgtgatgatggctatcgtattgttggctgtacagaaattggcgatgctcaccaaagctgcgatgcaaagttcggctccgcgtttgctgttgacatgtttggtcagtttttggataatatagtccactccgccgttaaagcggatcagttccagcataccgcctgccatcagggtgatgatgatgagttcgcccattccggtgattcctgtgcccatggagccaagccagtcgaataggctgatactgcctgtgagcaggccgatcactcccgttgtggcgatgcccagtatcagtacgagtgctacattcatccctgctatggcggttcccagcacaaccagataggggaggactttgatccattccaccgactggatgtcatgggtggtcatcacgtccattcccctgaagatgtagtagccgaaaaccatcagggcggccggaagggctatcatgaagttcacccggaacttgtcacgcatggcgcatccttgggtgcgggtggcggcgatagtagtatccgaaatgaacgaaaggttgtcgccgaagaaggctcctcccaccacgatacccgccatgaaggccaggttcatatcggttttatccgcaatgcctgctaccacggggactaatgccacgatggttcctaccgaggttccgatggagagcgagatgaaacaggcggccaggaagatgcctgccagcagcagatgatccggcagcagaagaagcgtaagattcacggttgcatcaatggccccgatatctttggcgctttgggcgaatgcgcctgccaggatgaaaatccagatcatcagcatgatattcttgttggctgcgccgatggaatattgcagcatgcgctcgttcaggctcagccctttggtgatgcatactgcataaaccgaagatgccatgaaagcaaccgtgatggggattttataaaaatcatctacgatgatagatgtcaccagatacaggcatagaaataccagtaatggactgagtgcccataagctgggtttatttgttattggggttaatttttcaccgttcatgaatttgtattttataaaatgaggtgcaaagttacaaaaagacttgttttataacaatatatgcgagaaaaaggtcacagccccaccttcgtaataagaaaggcagggctgtaagggtattgggaaagttgagtataagattggattatagtgtcacgcctgtcttgaagatagcgatttcacgataattcttcttctcattatttaccggttctccgctggcaacccggatgatatagtctataaaacgctcgcaagtcttttccatcggttcgttttctacgatgactccggcattgaaatcaatccatcccggtttgtttttagccagagtggagttggtggagatcttcatggtgggaacaaacgtaccgaacggagtaccgcggccggtagtgaagagcaccatgtgacaaccgcaagaggcgagggcagtagcggctaccaagtcgttgcccggtgcggaaagcaggttcaggcctttcactttcaggcggtcaccatagcccataacgccgtcaacgtatgccttgccgcatttctgggtacatcccagcgctttgtcttccaaggtggagataccacctgccttgttgcctggtgacggattttcgcccacaggttcgccgtgtgacaggaaatattccttaaaatcattaatcagatgtacggtctgttcgaacaactccttagtgcggcagcggttcatcaggatcgtttccgcaccaaacatttcgggaacctctgtcagtaccgaagtaccaccttgagcaatcaggaagtcagagaacatgcccagcaacggattggcggtgatccctgagaaaccgtccgaaccaccgcatttcaaacctacacgtaattcagacagaggaacgtcctcgcgtacatcggctttggctttggcatacagctcacgcagaatcttcatgccttcttcaaattcatcccccactttttgagttaccataaatttcacgcggtctgtgtcataatcacccaaaaactcgcggaaaacatccggctggttgttctcgcaacccagactgacaatcagtacggctcctgcattgggatgcagaatcatgtcgcggagaattttcttggtattctcgtggtcatcacccaactgcgaacagccatagttgtgaggaaaagccatgatggcgtccacgccttcaccgttggtttcgcggcgtaacgcttcggccagttggccgatgatgccatttacacaacccacggtagggataatccatacctcgttacggatccccacatcaccgttcttgcggcggtatcctttgaacgtcaagtctttcttcgggatattgaggtctacgctgaccggattgtaggtataatccaacagaccggcaagattagtctttatctgattttcgttaatccagtgtccttgttccacggcggtcagggcatggccgatggggtagccatacttgatgatgttctcgccctgggcgaaatctttcagtgtcaccttatggccggcgggcacgtcttctttcaaagtgatgacatgaccatctaccgtgatggtttcgcctgcttttaaatccgagatagccaccactacgttatcagccggattaattttcaaatactttgtttccatttctatttttagttattagatttactttttatgtgcgtccagatagaaatccacattctccaccgcaagcagggtgataggcatatagttacattgcttcacctcttttttgaatatcaggtggttgcacaggctctctacgccgctgtatccttgtgcggtaggttgctgcgcgatcaggaaatctacagcaccctctttcagacaagagacgttccggcgtaacaaatcgtacccaatcagtttgaaatttttcatattgtgtccgatgagatattcgcctacaatgtatactttcgagttgaacgtgatgccgcacgtaatctgtgggttctcctggaagaagcggttcatcagtgcctcgtcctcgtccgggcgcttggcatagagattcagttccactatcttgcagtcgggaaaatgctcctgcatatattttctgaatcctttttcacggttttcctgctggttcgatcccaggcgtccttcgttgatttgtctgaagataacaatttccttgggacattctcccagcatcatggccatgcgggcggcaaagtatccgctttgatcggatttctgcccgaagaatgccagtgggttcagactgtccacattggagtctataaatatataaggtatttcccgttcttgtaatttgttggtaaatctggccgtcatttcaggaatagtgggggcaagcaatacgccgtccggctcttttctcagtatgtcctcaccggcgttgatgaaggaggaatattcatattggtcatagtacaccacggacagggtgatgtggaaatcagaaaaagtctctacggctcttttcatccccatctccacatcggtccagtaatcgccttccttgtgctgtggcagcaggcagacgaacagatactttttgttggacgccaaagcgctggcatacatattgggctgatagtccagttgcttcaatatttcttccacccgtttccggctggcttcggatactcctgtgcggccatgcaatacacggtccactgtgccgactgatacatctgccaggcgggcgatatccttaattctgattctttcgggcagtttattcataccttattatatatattgtgctcgtacacactaataatttattttttttcgacacaaatatataacaatttttggttttaaaaaaataaatagtacctttgtgcacgcacacggatgaattatttgagtgctccgttgagtacaaggttatgatgtgattcgtctataagtgtgtaaaccagtaatttaattgggttagaagttaaacgaataaatatataacaatttaaaatcacgaaattatgggaaaagtagtaaccttaggtgaaattatgttgagattgtcaactccgggaaacacacgttttgtacagtcggattcatttgatgttgtttatggcggtggtgaagcgaacgtagcggtgagctgcgcgaactacggtcacgaagcttatttcgtaaccaaattgccgaaacacgaaataggacagtctgctgtgaatgcattgcgtaaatatggtgtgaagaccgatttcatcagtcgtggtggcgaccgcgtaggtatctattatctggaaacaggagcttccatgcgtcctagcaaagtaatttatgaccgtgcccactcggctatcgccgaagccgatccttgcgatttcgattttgatgctatcatggaaggtgcggactggttccattggtcaggtatcactccggctatttctgacaaggctgctgaactgaccaagctggcttgtgaagctgcaaaacgtcatggtgttactgtgtctgtagacttgaatttccgcaagaaactgtggacaaaagaaaaagcacagtctatcatgaaaccgttgatgcagtatgtagatgtatgtataggtaacgaagaagatgctgaactttgtctgggattcaaaccggaagcgaatgtggaagccggtgaaaccaatgcggaaggttacaaaggaatctttaaggctatggcaaaggaattcggctttaaatatgtagtgtctaccttgcgtgaatcattctcggctactcataacggttggaaggctatgatttacaacggagaagaattttatgaatcaaaacgctatgacatcaacccgattattgaccgtgtaggtggtggcgattcattctccggaggtatcattcatggtctgctgactaaaccgaatcaaggtgccgcccttgaattcgctgttgccgcttctgctttgaagcatactatcaacggtgatttcaacttggtatctgtagacgaagtggaagcattggccggtggcgatgccagcggacgtgtacaacgctaaacttgttttttataggaacacgaatgacgcaaataacgcaaatttttgatacatgttttatttgtatcatttgtgttccaatctttcatttaaactaaaatatgaaattatggctcgttttgataaaatagcagtgttgaacaagattggttcaaccggaatggttcctgtgttctaccataaagatgcagaagtggcaaagaaagtggtgaaagcttgttatgatggcggagttcgtgcatttgaatttacaaaccgtggtgactttgctcatgaagtattcgcggaagttgtgaaatacgcggcaaaggaatgtcctgaaatggctatgggagtaggttctatcgttgatcctgctactgctgctctttacttgcagttaggtgcttgttttgtggtaggtccgttgtttaatccagaaatcgctaaagtgtgcaaccgtcgtttggtggcttatactccgggatgcggaagcgtgtccgaggtgggtttcgctcaggaagtaggttgtgatctttgcaaaatattcccgggtgatgtattgggagcaaaattggttaaaggtttgctggctccgatgccttggtctaaactaatggtgaccggtggtgtggaaccgactcaggaaaatctgacttcttggattaaggcaggtgtgttctgtgtaggtatgggttctaaattgttccctggcgacaaggtagccgcagaagactgggcgtatgtaactgcaaaatgtaaagaggcattaggctacattgcagaagcccgcgcaaataaataagaaaaagatcagctcatgcccgcaaggggttagtgaattagggcgtgagtatcattttgtttaaaggtgtatataaaatgggtaagggccatcgcgaagtgtattcgcggtggcttttcactttccggcgtgtgcttgaagcgggatggtggtaaaaatattcttgtaaagattggtagatagaataaaaatttgttcttttgcaccatttcttaaaaaaataaaatgaagcgtttaatctaaaacacacaaaaatgaaaaaagcattattaaaggtgaccgtcatgttgttatgtttggcgggggtaactcctgcaatggcccagtttaatttgaagaaggcagtggggggagccgtaaaggctgcaaaggcggtgactttgaccgatgagcagatgacagagtatgtaaaggagtacattgactggatggataagcataatcaggtttgtgcggacgatgatccgtatactgtccgtttgaaaaaactgactgaagggttgaccgaagtggaagggatgccgctgaatttcaaagtatattatgtgattgatgtaaacgcgtttgcttgtgccgacggcagcgtgcgtgttttttcttcactgatggatatcatgacagatgaagagttgttgggagtaataggccatgaggtaggtcatgtggcacacaaagactcaaagaacggtttccgtaccgcattgctgacatcggcattgaaagatggtatttcatcacaaggaggaaaagcggctgccctgacagattcccagttgggtgacttgggagaggcattggttaatgctacttattcacaaaaacaggaacgcgccgccgatgattatggttacgagtttctaaagaaagcaggtaagaatccttgggcgatggcattatcattccagaaattgaaaaaattgcaagaagaggcaggagcacagaaaagcagcaagctgaatcagttgttctctactcatcccgatcttgacgcacgtatccagcgtatggaggaacgtgctacaagcgaaggtattgagaaacctgcaaacacgatggaggaaacagcgaaataaatggtttccggcaatgtaggttatacacataatagagggtgtccgtttcaatggtggacaccctcttcttttttgggagatttttttgcatgaccttatcttgcctcccggcgggataaaatctgaatttattatgagagaaatccttattgggagaaaatcaaagtccaaagttcaggttaaaagaatcaagtgttctttttcgtctagattatagaaggaaatctcttggtacaaagatacgcttattttaatggttgccgaattccctgtagggttatatcatagctagatttcctaaaatgatggcaaaaattccttttttctttctgatactttgccttctctttacattgtgctatatgctatgtgttgtaaatcagaaggttaatagtgtatattgtttctagactatgcaaaaatagggtggcttaatataagtgaaaatcactatctttgtataaaccaacagaaagaaatgcacaaaacagtttagccatgatgaattacgcatacgatacatctttgcaggaaacgatgatactgactgaagcgtttcacacagacagggtcatctgtgacaatggtagtctgtataagtttatatgggtccaggaaggcaaactgacattgatagtagaccatgtggaaatagagatggagcaggatgaaatcatctctgtgagtaatcttcaccgcacggagttcaagaatgtatcgggcaggtatcttgctcttcttttcaacgagaatttttacggcatttacaagcatgagaaagaagtgtcgtgcagcggagtgctgtttagcggaacttccggcatagtgcatctgcggctcccgataaccgactccgaactgttgcacgaggtggtggacagaatggttaccgaatacattctgcgggataacctgcagggagaaatgctccgcctgctgctgaaacgtttcatcattctgtgtacccggctggcccgtaagcagttgtccggctttccggttaatgaaaaaggttttgacatcatccagcgttattatgtgttggtggacaatcatttcaaggagaaaaagcaggtacaggcatatgctgctttgttgcatcgttctcccaagacgctttccaatttatttgccgcatacggtatgccttcccctttgaagattatacaagaacgagtggtgaccgaagcgaaacggctgttgctgcatacctcgcatagcatcaaagaaatatcggtgattttgggttttgaaagtgtgggtactttcagccgcttctttaagaatatgacgggggaaaatacctcggcataccggaaaagattgcaataaataagaaccggttcttattgctattaattttgataaaaacagggactttttccatgttttatgtagttattctgaaacagtatccgttatctgattaaaaaaacaagcatcaaaactttctatctatctaattttcttgtaaatttgcaccttaatttttggaaggtattgccttttagttagagaatacaagaaaacgatataaaattatgagtaagaaatttgctgaacactcgcaactcaacctatcacaggtcaataaagatgtgctgaagaagtgggatgaaaacgatgttttcgccaagagtatgacagaacgtgaaggatgtccttctttcgtgttttacgaaggacctccctcggctaatggtatgccgggtattcaccacgtgatggcacgtaccattaaagatactttctgccgctataaaaccatgaaagggttccaggtaaaacgcaaggccggatgggatactcacggactgcctgtggaactgggtgtggaaaaagcattgcatatcaccaaggaggatatcggaaagaccatttctgttgccgagtacaacgcggcttgccgtaaggacgtgatgaagtttaccaaagagtggacagaccttactcataagatgggttactgggtggacttggagaatccatacatcacttatgacaaccgctatattgaaacgttgtggtggcttttgaagcagctttataacaaaggtctgctgtataaaggttacaccatccagccttactctccggctgccggaacaggattgagttcgcacgagttgaaccagccgggctgttaccgtgatgtgaaagacattactgtggtaggacagttcaagatgaagaatccgaaacccgagatggcggaatggggaactccttattttctggcgtggacaactactccgtggacattgccttcgaatacggcattgtgcgtaggaccgaaaatagactatgtggccgtgcagacttacaacggatataccggagaaaagatgactgtagtattggcaaaagccttgctctatactcactttaacaagaaagcggaagaacttgccttggaagactataagccgggtgacaaactgattccgttcaaagtagtgggtgaatataaaggaccggatctggtaggcatggaatacgaacagcttattccttgggtgaaaccggtgacggtagatgaaaacggaaaatggcaagaagcggccggtcaggcattccgtgtcattctcggtgactatgtaactaccgaagatggtacgggtatcgtacatatcgctccgacattcggtgcggacgatgcttttgtagcacgtgcggcaggtattccttctctgttcatgataaacaagaagggtgaaacccgtcctatggtggatctgactggtaaattctatctgttggacgaactggacgagactttcgtaaaggaatgtgtggacgtagagaaatataaggaatatcagggtcggtgggtgaagaatgcttacgatcctcagtttactgtagatggcaagtacgatgaaaaagctgctgccgccgccgaatcactcgatatctatatctgtatgatgatgaaagccggcaacaaggcgttcaagatagaaaagcatgtgcacaattatccgcactgctggcgtactgacaaaccggtgctctactatccgctggacagttggttcatccgatctaccgcagccaaagagcgcatgatggaactgaacaagactatcaactggaaaccggaatctaccgggacaggccgtttcggcaagtggttggaaaacttgaatgactggaatttgagccgttctcgttattgggggactccgctgcctatctggcgcagtgaagagggagaagagctttgtatcggttctgtagaggaattgtataatgaaatagaaaaatcaatagctgccggatttatgaccgccaatccttataaggaaaaaggttttgttccgggcgaatataacggggagaactatgataagatagaccttcaccgtccgtatgtggatgatatcatcttggtgtctgaaagcggcaagccgatgaaacgtgaggccgacttgattgatgtgtggttcgactccggtgcgatgccttacgcgcagttgcactatccgttcgaaaataaggaaattgtggacaaccgtacttattatcctgcggatttcattgcagaaggggtggatcagacccgtggctggttctttacgctacatgctatcgctacgatggtattcgacagtgtggcttacaagaacgtaatctctaatggcttggttttggataagaacggaaacaaaatgtcaaaacgtctgggcaatgcggtggatccgttcggcgctatcgaacagtatggctccgatcctttgcgttggtacatgattaccaattcttctccgtgggataacttgaaatttgataccgatggggtggatgaggttcgtcgtaaattcttcggtaccttatataatacctattcgttctttgcactttatgccaatgtggatggtttcgcttatcaggaagcagaagtgccggtaaatgaacgtcccgagatagaccgttggattctgtctgttctgaattcattggtgaagaacgtggacgcttgttacaacgattacgaaccgaccaaggcaggacgtctgattacagacttcgtaaatgataatttgagtaactggtacgtgcgcttgaaccgtaaacgtttctggggtaatgctatgtcacaggataagctgtccgcttatcagacattgtacacttgtcttgaaacagtggctaggctgatggcacctgtcgctccgttctatgccgaccgtttgtatacagatttgattgccgttacaggtcgtgacaccgtggtttctgtacacttggccaagttcccggaaggtaatgaggcattgatagacggagaactggaagcgcgtatgcagatggctcaggatgttacttctatggtattggcattgcgccgtaaagtcaatatcaaagtgcgccagccgttgcagtgtatcatggttccggtggtggacgaagagcagaaaatgcacatcgaagccgtaaaagacttgattatgaacgaagtgaatgtgaaagaaatcaagtttgtagacggagctgcaggcgtattggtgaaaaaggtgaaatgtgactttaaaaaactgggtccgaaattcggcaaacagatgaaagctgttgccgcagccgtagctggaatgtcgcaagaagctattgccgaattggagaaaaatggtaaatatacctttatgcttgatggtgcggaaacggttatcgaaacaacggatgtggagatcttcagtgaggatattccgggatggctggttgccaatgaaggcaaactgactgtggctttggaggttaccgtaaccgaagaactgcgtcgtgagggggttgcccgtgagttggtaaaccgtatacagaatatccgtaagagtagtggttttgagataacagacaaaataaaagtggcattatctaaaaatcctcaaaccgatgatgcggtaaatgaatataatacttatatttgtaaccaagttcttgctaactccttggaattagtggatgaaatgaagaacggtacagaattaaattttgatgatttctcactttatgtgagtgtcgtaaaagaataattaaccttttaaaactaagttatatggctgaaaaaactagatattcagatgcggaacttgaggaattccgtgctattatcatggaaaaactggaattggctcagcgcgactatgatagactgaaaagtagtatcatgaataaggacggtaatgatacggacgatacttcccctacttataaagttttggaagaaggtgctaatacattgtctaaagaagaaacaacccggttggcggcacgtcagctgaagtttatccaaggattgcaggcggcactgatacgtatcgaaaataaaacttatggtatttgccgtgaaaccggtaagttgattccgaaggaaaggcttcgtgcagtacctcatgcaacactgagcattgaggcaaagaacgaaggaaagaaataaaatagtggttaatggttagtgattaatagttaatgagtttcactgtcatgttacagtattaaccgctaatcattaaccattaattaattttcaatttaataaatgaagaaactactcaccaaggggcagctctctgttcttattgtctttggaattctgattatcgaccagataataaagatattggtaaagaccaatatgtactggcatgagagtatccgcataacagattggttttatatctattttacagaaaataacggcatggctttcggtatggaaatatttggaaagttattccttactaccttccgtattgtagctgtgggattgattatctggtatctggcaaaaatcgtgaaacagaattataagactggttatattgtatgtatctctttaattttggcgggggctatcggtaatattatagacagtgtgttctatggagttatttttaatgaaagtactcatagtaccatcgcttcttttgttccggtaggtgaagggtattcggaatggttacatggtaaagtggtggatatgttctattttcccattattgaaaccaactggcccgaatggataccgggaataggaggggaacatttcatatttttcagtccgatatttaattttgccgatgccgccatcagttgcggtattgtggcgttgttgttattttacggtaaatatctgaataagaatattcacccgtcagcagaagaaattaaagaataaatgatgcgtcgcaagaatattacttgggtgtggctgctgggtgcggcttttatggtggggtgtggtaagcaagtgcctgaaaatattatccagccggacaggatggagaatatcttgtacgattatcatttaagtatctccatgggcaataatctgagttattctgataattatcaaaaggaagcatataagaactatgttttcgagaagcatcatattactgaagctgaattcgattcgtccatggtgtggtacacacgtcacacagaggaacttgccagcctctataaaaagctgggggaacgcttccgcagtgaaaaaaaacacatgcaggagttactggcattgcgtgagaataaaccggctgtatcgttgccgggagatactgtggatgtatggtatgaccgtaaactttattggctgacagatgttccgttggcgaataaggtgacttttgagattcccgctgatagtaatttcaaagcaaaggatgctttcctgtggtcggctgattatatattcctttcggaaggagaacggagagccactatggggttcaatattttgtttgataatgattctgtggtgggacgtgtgaaggatatcacgtgttctggtgtgcagaccttgtatataaagcctgattctgcttttgccatcaagagtgtgaacggatttatttactatatggatagtgattcgtcaacgaataagccgggactgattatcaataatattactttgacccgttatcatgaaccggtagatacaatgacagttgccggaaaggatagtttggctgtggaacggcgtgttggaacagattcgatggtaacagagaaaaaagcagattcgattcaatcggtggatatcaggaaaaatgttcccgtccgtatgaatccacgtgagatgaaggagaataatgcggcagatcattctcactcagatcgtcctcagagaatcaagcgcagaaattaattattttttgtgggtatgagacgttttgcttgtcattatctttatgtttcggcagatggctgttattctaaatatgtagtggagttggaagatagcgatagagtgcgtgcatattttccattgaaggaggagattagtgcgacacaatggataggcggagtgattattatttctccgatgtatgagttggatatttgttccggagagaaatttgttgatttcctgcaccgtgccatgctggaaacagaacttgagcaacctgtatatgcatggcatatagctgattttgatttgccgggaaaggagtttacagcaggaagcagactggtacgcttataatgtatgctttgggtagagctgtagtatttctcattcagaaattattggatatgccgatggaaatatgaattttaaggtaataaacgtcttctgaactccgagcaaaccactgctgtggcaattgccacattcaatgattcggaggtttcccgttcttgaggataattgggaatgtataacttcttgtttatcagcttctctacttcaggacttactccttttccttcgtttcccatgacaatcaatccatgagccgatagggattctgcataaataatgttcccgcttaaaaaagtgccgtatacaggaatatcggccaggctttcaataagctgtggtaaagaacagtaatgaacttttactctagccaatgcccccatggttgcctgtacggttttgggattatacacatctgctgtccctgccgagcagaagatatgttcaatgccaaaccagtctgccaagcggataatggttcccagatttccgggatcttgtacatcgtccaacgccaggcatagagaacttttaataacttccggatttaaatcataagaaggttgtacaaaaacggccaatacctcttggggggtcttttgaaggctggcacgtgacaactcttcttgtgttacttcaataatttcgttggccgtgacagggtggtttattttcagccaattggaagtggcaatcagtaacttgcaggggaagtagcctaataaatcgcctaccaatttatgtccttcggccacaaaaacttgttcttctttgcgtttttttttcagttccaacgaacggatatattttattttgtttttgctcagcatgataatttctatttaataacaaatatttggagcaaagctaagaagatattttcaattaatatctatctttgtagataaatttgcgaaggttacggatttgtatgaagaaaagcgcatgcccatatatatgcacatttattatagcactatgcacctcgtgttcggtcagtaaatttattcctgaggataaatatttattggatgaggtcaggattgtatctgagacgaaagaggtgaagccgtcactattcaattcatatattcgtcagaatcctaatgccaaatggtttaatttggttaagatacctatgcgcacttattgcgtctcaggcgtggactccactaaatggattaatcgtttttttaggaagattggtgatgctccggtaatctatgatgaatctgttgccctgaaatcccaggaggaaatagagaaagcggtacgtaatatggggtatatgggggctactgtgcacttggataaaaaaacgaagaagaacaaattaaaattggcttaccgtattcatgccgggcatccttatagggtacgtcatgtggtgtatgatatagatgatttggttatcagtaactacatgcggcaggactctgcccaaagtttgttggcgcccggtatgttgtttgatgtgaatgtgctggatactgaacggcagcggattaccaaattattgcaaaataaggggtattataagttcaacaaggattttttggtctatcaggcggatacggctagaaatacctatttggtggatttgactctacgattacttccttatcagcgtagaaaagaagatttgccgcggaagcatagacaatacaaggtgggggaggtgaactttctggcggatgatgaaatcatgtcggtgcaggaaggaactttggaagaatttgactctttgcgatacaaaggatatagtatgtattacaagggaaaggcttttctccgtccgcaagtgttggttgatttcaatcgtatccgtccgggagaactgtatagtgaacaggatgtgcaaaacacctattccaatctggggcgtttgcgtgccttgaaatactctaatattcgttttcgtgaagtgaatggagaaaatggtacgcaactggacgcgtacgtatttttggcaaagaacaaaaataaatccatggcgtttgaagtagaaggaactaattcggctggtgatttgggagcggctgcctcggtttcttttcagcaccgcaatgtattcaaaggttccgaaacttttatgatgaaagtacgtggcgcttatgaggccattacgggattgggggtggcttcacaggattatgtgaatgataattacatggagtatgggatagaaagcagcttgaatttccctcagttcatgtttccttttctatcatcgaattttaaaaagaaaattagagctacttcagaggtcggcttaaagttcacatcgcaagttcgtccggaattctcgcgtacactggcttctgcttcatggagttataaatggactgacaggaaacgtatgcaacaccgtttggatttggtagatgtcaattatgtatatatgcctagaaagtcatcggcttttcaggaatatttggacagcatgagtctgaggaattcagctttgaaagccagttatgaaaatcagcttgttgtgcgtacagggtacagctttacctataacagtgcaggaaacgtcatgatgcgtacacctactaaaaattcctattctattcgtgccaatattgaagaggctggtaatttactatatgttgcttccaaattggttcaccctaatccgaaagatggagaagattatgtgctggcaaatattccttttgctcaatatgtgaaagcagattttgattttgcaaagaatttcatgatagatccgcgtaactcatttgtgtttcatataggagtgggggtggcctatccgtatggtaactccaaaatgcttccttttgaaaagagatatttttccggtggcgcgaacagtgtacgtgggtggtctgtgcgttctttggggcctggtgtttataaaggtagtgaggatgggagaatggactttatcaatcaggctggtgatattaaattggacttgaatatagaatatcgtactcatttgttttggaaattgaatggagcggcttttgtggatgccggtaatatctggactattcgtgatgactccggacaggaaggtggtttattcaaatttaacgagttttataaacagatagctgtagcatatggtttgggaatccgttttgatctggattatttgattttgcgttttgatggtggcatgaaggccataaatcctgtggaaacaggtaaaaaacgatatcctgttatccgaccgcgctttagccgtgattttgcttttcactttgcagtaggttatccattttaaagaaaaatatataatatgatgaaagaaagaaagagaacatatactgaggaagaggttaatgagttgaaaaaatggtttgattctcaatcacttcctccaacaatgcagatagataaggctgcttttactcctaatttaaaggatacggtagatatgctgtttgagcaggcctatgtatgttacgaaaatcctaaaatgcagggatgtctttatttgttagagaaaattaagagcaatttggaaaaaaacggggcaggagcgtgagcaattagcatttcatattgttatcaaggtattataatttaatactgacagtatgaagaagaatttattattgtatggtgtatttctttgcgccctctccatgtcctcttgttccggtggttccaagagtagtcatgttatggatagcagtagcatgagtgtggagaatgcgaatgaagtgatgaagtattatgatacctcattgaaaatcttgaaagacttagttaatgagaatgagataaaagcggtgctgggctacttggatcagaagatgccggtagattctctgcctgtggtatcacagcctgtggtttctgttcaagatacagtgtttgtttctaatccgggaaattacttcaacgagaatgaccgtcagaatctgaaggaaaattatggccgtttgttccggtcgatttctgcattttatgagaactataagacttaccggctgtatatgcaggatcaatcatataaaaaggataataatgttttggcggataaaataagaaaagaggagctattattgagtattgctttatctgaatacaaacaggttatttttgatatattaactccgatggttgagggggctaaaataactctgactcctataaagggagatgttaaagataaatagaagtataacaggcagctggaaggttgcctgtttggattgtattatgtgaattaaatccttgttgttctctgctttgttgttaaggaagctatttcatttccaatcttcttgattttttctcttaaatattttcagtctgttcaagaactatttttagatatatcttttatacgttcccctttagagaaacttgacattccggtaggagatgcttgcttgtagatttctattgtttaagtttatgctataatgatgaaaaagccaaaagggtatgtatataggataaatagaactcagatggattgctgatattgttttaattgtccatttaatgggttgaatttaataaaattgttaataactttcacataacttttctataaataatgtgaagtttaataaggtgttttttatctttgtagcagattaattgtaaaaaagtgctgtaatattatttgttatggaaaaatcgtatgttataaatagaattaaagaattatgcaataaaaagaatgacagagagatagctttggatttctcttataataataggatattccatgcaaaatatttatttttaggcaatgacctttatattacagatacattaaatgttattgagttaaaggatttggatatgggagttttgagcagacttagcgaattattaaaaatataagataactgattttccttgtgcagtcattgatggctgtacgctcatttgtattttaaagcggtggcccgggaggggtagccgcttttgtttgatggacttataacaaaaaaggaataacttttgttactcctttcgtacaccctcagggattcgaaccctggacccactgattaagagtcagttgctctaccaactgagctaagagtgcaaaatgcaaactatttttccgtacaccctcagggactcgaaccctggacccattgattaagagtcaattgctctaccagctgagctaagagtgcaaaatacaaactattttttcttttgtacaccctcagggattcgaaccctggacccactgattaagagtcagttgctctaccaactgagctaagagtgcattcttttctgatttgcggttgcaaaggtaggtgttttcttttaaacatccaacattttgcatcattttttcaccttttcatcgaaatttattcaaactcataaatatctgaaggcgtattccgctttaaggcaatgacttgcacatctttgccaacgataatccctttgtttcgtagtgagagttctactgtcttatatgccagttcggggtgattattgtctttgctaagatgacaaagccaaatatatttaagactttcattgatattttctgccaaaaaatcggcggtttcgcggttactcatgtgtccattagccccggcaatacgttcttttaaatattggggataaggtcccattttcaacatctcttcatcgtaattcgcttccaataccaaatagtttgctttacatatatattcggcggcagtgggagtgatatgccccaagtcagtaaggaaagaaaatattttaccgtctatatttatgcaatagccaacattgtcagttccgtcgtgaggcacttcaaaggcagtaattgcgaaatcttccaattccattgtctcacctttgtgcaggtagtgtacgcaggtcgataatttctcggtcatgcaataacttttgttgattcctgcatgtacttccggagtagagtaaacaggaattccaaatttctctcctaaatgccctactgctttgatgtggtcggcatgatcgtgtgttatgaatactgcccggataatatccagtccgattccaagttcttttaatgttttttttattgtacggatgccaatgcctgcatccaccaatatgccatatctgtctgttccgagaaaatagcagttgccgctacttccgcttgcgagacttataaatttgattttcattttgttgctctcccaattctagtgaatccccacgttttttgtgttaaaagagccgcaaatatacataaaaaaaggaggaaataaaatagaaacaggctttttcggaaagatgatttagcggatattgttttaaaagaatgcctggaatctggattatggaatacgtagataataaccctttcctctgactgttattaatttatattcttggaattcttttaaaactttccggattgatttgatgtgtgcatctattttttcattggcattatcatccgtaggccagaaactcttttttatttcttcacgacttacgcaagttcctgctttttcataaagcatatttagtaaagtgaggtctaatttctgaatgttgcactttttgtttcctatatacaactcttgtttctccatgtctatgttcataagagtaaggagtgtttgagtatccttttcctttttaagaaaaatgagtatgaaaataagaatcatcaattgtccgatgagccaaaagagagtgttgtctatgtgtcgtaaaatggttttgaagtcatagtttacccatgcttgtaccttgatgttttgggtgatatctactatgtatcggggagtattgtatgccgttcggggaattgcagaactttggtcactgtgttgggaaatggatttgttataataaatagttccggtcctgccggttatgtcatgatcggataatatctttctaaaggttgcatttaattcatcgggctttatgggttttagttgggatagaatgtattggttcagcatacgtttggcggtctgctcgtccaggctgtctttaaaggtatagattgtttttccttgtctggttcttatggtgtagctttttactttttgatgtaggctgggagcgatagtatacatctttatatcccagtttgtaggttcgggatgataatagctgatgtaggcaagtctttcattgtaatcttccgtaatggcggatttgaaagcgtggtctatttgggtgtttactcgttcggtactattatgaaaagcgatataaacagtatatagaacggtggtggtgactgccataaataagataatgtgtgtttttgcccttttcatcgtataaattttgaatgcaaaagtaaataacgttaaggaaaaaacaggtgttttatctgatctttttctgaaaaaggagaaaattcagaaagagttcagataaatattttgcagagatacaggcttttcttcttctttgcgtcaacaaaatattttgcgaatcaataaaagcaagaaacgtatgagaacaaaagctgttttattttttctcttgttattgccagtgtatgtggtgaatggccaagatgacaagagagagtatttgaaaaaggtgttggataatttagagcagattaagtcagcaacgtataaagtagagggcgaagtctggaatcctggtgatacaattccttccagtattagaaaatatatggtgaaagagttcgataatccggcagattctacgataggggcaagttttgtgaatttgggaacagatgatggtaaagagttccaattcggttataatggtgaagtacgtgtgttggtgaatcatgctgtcaaggaaataaaaatcgataattttaccaccaggccgttacctgtcagaccgttgtccccacctttctttaattattgcaaaaatattgtcaggtatgctttggaaacagaagacagcatagccaccacattggaagactgtggggattattttcattttaaacttgtcataaacgaagatacacaagtggagttctttggtaaagcttatcacatgcctccacctcctttttatgtagagccgacctctatttatgaactgtggattcacaaatcgaatggtttaccttataagaaacggagagcgatgtcccataatatatcggtggaaacttgctgtaatgtggaaataaacaaagaaacaattgacaggtttgatgttttcgattatgttccgcaaggttatgaaacaaaaaaatatgattatggcgttccttccaggaatatggccgctaatctgacgggtaagaaagcaccagaatggacattgaatgatataaaggagagtcccgtgtcattgagtgatttgaaaagtaaggtcatcttggtaaatataacaggaataggctgcggagcttgccaggcttctatcccttttctgaaagaactgaaaagaaagtaccaagaagaagattttgaattggtagccattgaaagttggagccggatgcattcacttcagaattatgcaaagagaaaggaattgaattatatgtttttggatggagatgataaagtgatagaagattaccggacgggtggggcggctccgtacttttttattttggataaagaacggattatacggaaagtcattcgaggatatggcatgggaaagaccgacaaggaaataacggaggctatagaagaattgctataactggaatgaggatggaacaaaaagtgaaaacttttgcagacacatttgttccatcctcatttatttatattcagcactctgacggttgtcaaaattggaagaacttcttggcattattatagcagatatcttccaccatctgattgacgcgttctatttcgcaagcagggatttcgccgttttccacatcattacccagcaagttgcacaaagtacgacggaaatattcgtgacgcggataagacaggaatgaacgagaatctgtcagcatacctacgaagcggctcaacaagcctaacaatgacagtgcattcatctgtttttccataccgtctttctgatcgaggaaccaccatccagaaccgaattgaattttgcctggaattgtaccgtcctggaagttgcctaacatggtagcaattacttcattggcgcaaggattcaagttgtaaaggatagttttggccagttttccttctgtattcaggcggtcaaggaattttgccatcgctttggcggtggtaaactcaccgattgaatcgaaaccagtatcaggtcccagaagtttgaacatcttggtgttgttgttgcggattgctccatagtggaactgctgggtccagcctttttcccaatccatttccccaaatacgatcagcatggctgatttgaatttcagaatttcttccttggtcagttctgtaccaccatatactttattaaatatagcattgatttcagcattagtatagtcttcagcataaaactcttcaattccgtggtcagacaatttacaaccttgttcagcaaagaagtcatgacgtttccgcaaagcagtcaccatgtcatcgaaagaagagatcgtgacaccgcttacagcagacaatttttccatataagcacggaaatcagcaggaacttctactgccatagccttgtctggacgccaagtgggaagcattttaatttcgaatccgctttcacgggttttgatgtgatattccaatgaatctaccggatcatcggttgtacaaacggtttccacatgataacgacgcatcatgcctcgtgcggagtattccggtttggcaagcttttcattacattcatcaaaaatctcgcgggctgttttcggattcaatactttattgattccaaatgcggttttcaattccaaatgagtccaatggtataatgggttgcggaaggtataaggaactgtttccgcccatttttc

SEQ ID NO: 14427 - DNA, 1162 bp, Unknown
  gut microbiota DNA sequence
cgcaaccgccatgagcgaatgggaactttgcgacctgttcggagtaaccgccccgacattccgtgcagggctgaaggctctttgcaagagcggagttttaagggaatacgggataaggcgaagcatacgggtatccgataattgctgtatggaggtttacaaccttgaagcgatagttaccctcgctttccatatcggcacattcggagcggaacgggtacgcaatgccgttcttgaaatactgtacctgcgaaaagagaaaaaaagcatcttcttctcgctgaataccaacggtatatccaaatctgaatacttctcgtagctgaatgcctgacataattcactcggtaagtcagtaattcattaagtcagtacgacagacgctctgattttttctcccgaaaagcgtaatccgacattcgcttttcgggagttttccgtttgcacaacccgtttcctgtcccaaaccattgaaagtttttgtttcgggggctatttgtcaccattctgccgtgttttgcataacaacctatccgataattgattatatttttgcagctggtaattttcaaacttaaaaccatttgattatgtcagctatcgaacaacaggacagccacagaccgccatcggatggcggcatggcaaaggaagagtttatccgagtggggacaacgctctataagattgtggagcagcccaaactgaacggagggtatataaggaaacgcatcgcatggaacaacgagaccctgcgacaggattacggcaaggattacatcggcagagttcccaagtatgacggcttctgcacagtacccgaacacatcggctaccgttccgtggtcggcaagttccttaacctctacgaaccgatagaccaccgaccgcaggagggcgatttatcgcatatccaatctttggtacggcacatcttcggggaacagtacgagttggggatggactatctgcaactgctctacctgcaaccaattcagaagttgcctatcctgctgttggtgtcggaagaacgcaacacgggcaaaagcaccttcctgaactttctgaaagccctttttcagaacaatgtgactttcaacaccaacgaggatttccgcagccagttcaattccgactgggctggcaagctccttatcgtggt

SEQ ID NO: 14428 - DNA, 5728 bp, Unknown
  gut microbiota DNA sequence
ttcagttccatcagttggcgtaccagggcgaatgagcctttctgcttgtccatcgagttggttccttttaaaatctcatccagaatgatgaacaactcctctcccttattcaggcggtctataatttgtttcaatcgttttagttcggcaaagaagtaagattcgttgtctgtcaacgaatcggaagtccgcaagcttgtcactagtttggcaggatatatttcaagggaggaacagcatacagggcagccggtacatgccaatacataattcactccgatcgtacgcagataagtacttttccctgccatgttggctcctgtgatgatgacaaagaacggtcttgaggggatatcggcatcattggtcacacattgccgtgcaggcatcaggggatgtcccatattctttgcaaggaaaacaaaaggcttgccggcaatggccggataggcgtatgcgggatggttgccggcaaatgtcgccagcgaacaaagagcatcaatgtcacccaggacgtccagccagtgaagcagatattttccatatttgtgcctccattgttcaatgcgcattacctgccggagttgccagaacatggaaccttccagcaagacatataacaattggttgttgcgcaagtccagtttgtccagttcccgtgaaagctctttcaaaatatgggtggtggatttcccgtccatgccgaattcagctttcaggtgtctgagtagcggagcgttcatttcccggttctctatcaggctgatcagttcggcgtagatagacaggatacgtaatttcttgtcataaactctttgcagattgctgacaggctttatcagtccgaaactacctatcacgaacagtccgaaggccagtccgaaccatgtcatcggaatgaccccggccactcccagcatagccagtacgatgttgactccgggaactattcccaataacgggcggctccaccatttcttgctgaaataagcaggtgcttccgtccactctttaatttcttcgcggtcgcttgtcgcccctttgtagagcagaccggtaatccggaatgtttcccggaaatcggaataagcagccagttcctttgtcgcctcctgccgttggattatctcttcctttatctccagatgattttgtaaccattctgccagtttttcctttccgaatgaagtgcaggtacggttcaaggcctgaaacaaagagtgccttccgaacaagtccaggtcaaaagaatacctgtgggccgggtttgtaaattcctttccgtcctcaaaaggctcatagttgtccgccagtgcggaaagctcgtcactattcacccgtatgcaggtttccagccagtctttgcggaaaaacaaccggttgtgatacttcaccaatgccagaaaaggaacgaaagtgaccgctatagtgagacatatagtggttgttcctgcctgatagaagtagattgttcctataatccctgctgcaaataacaagaccctcagcgtgctgatgcggagaatcttattttttacctggcggagttctgcctcagcctgttcaatgcgctgttcgtattttgctttcaattccataatgataggttgtaaatatttccttgccataccgggtgcggttttgctgcggagaggggggaagccttctgcggcgatgcaagggtatggcgaagaacttttcatttgtttcccggcaaatatatagaaaaaaaaacgtctccttctgtttcttgtgttatttagacttatcttttcattttaggaagaagagccttccatccggaatgatggcggttagaccgatgaggatgaatgacaggaaatgaaattttaacatagccgatgaatccattgtcaataggaaaaagtatatttgtctgtctgataaagattataaactacttggggtatgagaaaaatgatattcattttatgcattccgaccgctttgctttcggcttgctcaccatccggaatgcaaggtaatccggcggcagtacaagccggtgcggccatcggcggagtattaggcgctattgtgggtgacagggccggcggatataacggttcgcaattcggcgccctgctgggaactgtaacgggggctgctgtgggaaatgccataactacgcctcgggagaaaacttatcaggtggaggagtattacgtgaagacttatccttcttcttcgcagtatgagcatacttcctcttatgagccttcgtcaggattgaggatcatcaacctgcgttttatcgatgataaccgtaaccatgttattgatgcggaagaagacagcaaactggtgttcgatgtggtgaatgatggggatgtgcccgcttacaatgttactccggtgatagaggaaatgagcggcatgaaacatattttgatttcaccttcggctcagatagcctatatgcctgtcgggaatcagataaggtatacggccaccattcgcggaggcaggaagttgaaaacaggccaggcgcaattccgtgtttttgcaacagagagcaacggggcggtgaccgaagcgcatgagtttactttgcctacccaaaaacggataaagaaataagttccttgactggcagggtctctgcgggcggataaccctttgccggagacaacgtaagcgttctcagccctattgttaagcctttcaggccgtccggttactatctccaaaacctgcggagttatctccatagcctttggagttaactccgcaagctttggagataactccatagtgctatggagatagtatatatcctttcttcagaccttagcaggcgggagaaaaggccttagggtggggtatgtgtggagttactccttgttgatgatcccttgtatctcttgcagagtcagatttcctgtgatggcgatgatggtaaattcatttttttcctgactcatcaatacaaattccttttctttgtttttgttccgtttcagataaatgatggttttctcgccttcatcgtttatgcgcatcaactcctcgtagccgttcttggggctgatgaaagctgtctcctttttcagcttggcgataatgtcgggtttttcacaacttagaatctggatgttatccagtttggaggctacttcgcctatatttaccccttccgttttcatgttgggcatcaggctgagcatggcttttgagatatagacagaggttaccccttccatatcagcgaacttgtcgaaaaaactgtcctgtgcgtaggtgaacagtgagcacagagagagcaataaagtaatgatatatgtacgtttcattgttttatgttatttaatcggtttaattgttcgtttacgttctcttgaatttttccggtagcttcctgcaccgattccaccttttctattcctttattcaggctgctggaaagcatgataagtgccttttgggcctgtgcgtatgcttcttcgggggtggcgcaggtatcttgcggtgccggatagggcttgtataggtacagtcctacggagagcaggatgagcaggctggcggctatgcttcctatccattgcaagcggagggcccgtatatgtttttttattttcagcgtgcgtctttcgcctgtgtcccattcgtctatcttgcggctcagcctgctttccaggccttccggtatttcgggagcgggatgtgctgccagttgcatgaagatttccttctcggcaagtaaatgagccggaacgtcctcttcggtaaaaaagcgtttcagttccttttcttcggtatcgctggtttctccatcgtaataccgggccaatagtctttctatttcatttactttcatagttcattatttcattatattgttcacgtatctttttgcgggcgcggctcagcaacacacgtatgttgatggcattcagtccggtggcttgctctatctcctcaaaggagcaatcattgacatcacgaagcagaatcacacgtttttgttgctcgggcagtctgccgatgagccgttttacttggttcacttcatcccgctgttctatttcccgggctatgttggtgtccatggggaggttcagttcttcgggagggcgtccgtcttcatccggctgactccggcgcaggacgtcgtagcacagattcttgatgagggtgacacaataggcttcggtgttcagtacgtccgccagttcatcgcgcttgttccacaatttcagatacgcttcctgcaccatatcttccgcatcctgagggttgcccgtcagccggaaggctactcggtagagtttccggtggtaaggtagaaattgttgcttaaactcagcggcgtccatgcttctttcctgtttcctgatttactaatttgtctatatcatcctttgtgaattttccgtttatctgtaccagtgtacagtcttcttttccggtgcatacaaacagcagttcacggatagtttccttttttgttttcatcagcacgcggactttctcgccttcatcgtttacacgcatcagctcatcatatcctttcagattcagtttgttcacttttttgttgaaccgttcttttacgcttgccgtacaagattccaggtccagtacttttattgactttatttttcttattatcttagcatcttcatcgtgtccggcaaacatttttccaagagacatcatgaaagaagatactttgacacaatcggcatttttttcgctgccgaattcattgaaaagaccgttgatgccttgggcgtagcccagatggcagacgaagactagcaatagagtaaatacaaactttttcatggttttattttgtttttgttcataactgaatttgtttttgaaagcgctttcaatcagatagacgggggaagtgggaaagttgttacaaagggaaaagaatttttttaagtttctatgtttgtaaagaggttcagctttacaaagaaagcatcattcaatagcctgtttgatctttcatcagcatgatcacaggctttgccggtccctttaaccaattcctttcattcaggtaatttcggggagtagaatgaagaaaccctcgccttgtttacaaatctttcacaagttcaagatgagaacaaggggtttttcttatgaaatgatattggctggggattattggttccgcacaggcagcctcacccataaccatccgggaatcaatttccagaagaatacgataagctgatagcgccagtctatgatggctactcttttccttcgggagatggcttttacaatttgagatgccacttgggaagtatgcatcagcagcggatatttatcatctttcagcaaaggagtggcgacaaatccgggacggatatcggtgaaggagatgtttagtttcttcatgtgtgccaattggtccaatgcatctatgtacgtgttctgaaaccgcttggtagctgaataagctggggcggatcccagccctttggtgcctgctatggagctgattacggctatatgccctttcccgcgttgctcaaaatagtgataggcggcattgaccatccgtatgaatcccgaaacattggtggcggcggtttgtaattctatatcgggttgaagtgaaagattttgtttgcctatgcccgagctgagcaagaacacatccatacctcccattttagtaatcagttgctccaatgagaaaggggcgtcctcacgggtgacatctattgtctgagta

SEQ ID NO: 14429 - DNA, 8543 bp, Unknown
  gut microbiota DNA sequence
atttatttgcttctctccattttattaatcaactttccacttcatgaaccaacgttcattgaaagtaagtccaatattgattctcaaataattttcttccattaatcctttaaatttaggactgactttaatgtattgcccggaaatgttcagcatagatttactttggaacatgggaagtccaaacccaatactgacaccatattcgcgtgcaccgtcttggaaactggttgttcctgtgtccggactagtatagctgaccttattataaggacttgaataataggcccccatgcggtaacgaatacgtttcagatagttgtggctgatataacttggtacgaattccgcaccaaaagctatttttgtacggctattcatttccacactttctttattgaacttactccaagctagatcggctgtattccacttttgtaaagtatagtcaacccctatagttaagcggttatcatatacatatgtaagccctataccaaatgtatgtggcattttaaacggattcggaatagtatcgccagtttgtgactgtacatagatagaaccattactttccgcacctgtttgatgatacttatatgcatctccatgcaaggtacgtcccaaggtataaacagcacctatattaatagtgttttttttatttaacttataagtatactgtaaaccaaaatctaatttataatcactgatagaaaatttgtctaatttaatactacgtgtatctgtcgctccaatagttgtcatggattgatgagtaatatctccataaagatacgaaaaatttgcaccaacagacaaattattaaaaactttataacctaatcctatgaaaacttgatgaaaacctccgtcgccatcataagattcgctccacttcccgttattgttaacatcctcaaaatcatgtgttttggagatgctgtaacctactgtggaaaatggaagaaacccaactgtcatccccatttttttccataggcgaaattgcatagccaaataatcaaagcttgaatttttagcattggtttttacattaccatccttgaagttcgcattttgaagggtcattcctgcatcgaacaagaatgtcaatgaatcgatggctgtataagatgccggattagatgcgttgatttggtagccgtttcgcaagccgtatgctattcctcccatcgctttactgttaccaaaattttgatcagctaactgaccaaagccgtagcgtgtatagggagaatttgtgcttgtttgggctacggctagccctgtgactgtgagtaatattgacgcactaatcagtcttttatagtttatcattatagcttaatattctgtttaaacctttcaatactaaaaatctatctgcaaagatgatactttttaattttgtatcaaaagaaaattcatctccgcccgttaaaaaaaccaaaagtcccggataattcttttgaagatgggtgatatacccgctcatttcaaattccattccgcgaatgacccctgcccggatagctgtttctgtagattgtccatacatcggaacttctcctttggcgcttactttggggagtttgtcggtgaatatgttcaatgctttgaaacgcatacgcattcctggagaaatattgcccccatgataggatccgtcggcatcgataaaatcgtatgtaacacaggtccctgcgtcaataaccagtacatcgtgtccaggcttcagccagtttgctgcaaccacagctgctaaacggtccatacccagtgtttgaggcgttttatataaattagtgataggaacaggggtttcatgacttaattcgatgatattaaaaggcaatcttcccagttggcgccggatagtattgcttagtgttatgacagaagctatgatacctcgtttcaaggggtatcgagaacaaagcatcgggagacaatctaaagaatgattggagccacgaaatacttcaactaactcgcctttgtcaaatatagccaatttagctactgagtttcctatgtcgattattaaattcacaactttgctttttcggctgcaaagtaacgtaaaaaataaataggaatagcaataaaaaatggtatttgtgaggaattaattaatatttaggtgtacttttgcatcggtaaacagaaaatggattttatgaataaattaattatagcattgattttgttattcttttccttgagtcaatcgattagaggtcaggaggataatataaaggtgagtctgatgacttgtgctcccggtacagaaatatatgctttgttcgggcatacggcattgcgctatgaggatacggcacgtggagaggactgggtgtttaattatggtatgttcagctttaatactccccgttttatctatcgttttgtcaaaggagagactgattatgaattgggcgtaacccgttatccttattttgaaggtagttatgctatgcgtggttcctcggtctatcagcagacattgaatttgactatttcggaaaaacagaaactcagaagattgctggaagagaattatctgccgaagaatagggtttatcgttataactttttctatgataattgcactacacgtgcgcgtgatataatagaaaagtgtattgaaggaaaggttgtttattctgaaggaaaagagagactctcttttcgggatattgtccatcaatatactaaagggcacgaatgggatgagctgggcattgatatgtgtttgggcagtgaagctgataagcctattgatacgcgtaagcagatgttcgctcctttttatatgttggaggcagcaaaaaaagcaactatagtagtaggtgacagcgtgcgtcctttgattctgcatgaaaaaaaggtagtggatgtagaaccagaggatgttagggaaggctttccgttgtcacccatggtgtgtgtctttattttaataggagttacttgctttgtagggtggttgcagtttaaaatcaggaaaataatctggatttgggatttgcttcttttcggtgtacaaggattggcgggatgtgtcatcactttcttggtctttttttctactcatcctacggtagggtccaattggcttatccttttattgaatcctatccctttaatttatcttccggttatggtttatcgagctataaaaggtaaaaaagactactatcatacaataaatatagtgtgcttaacatcttttatgatgataatgccgtttatacagcaaaaattcaacgtaacggtattacctttggcactgtgtttgttaatatgttctgcaaaccacgttttattatattacagacaaaacaataaatgaaaggacgcatcttaacttctcttttgactgttatcgcattaacagggttgcaggcacagaacattcctgcggtccctaggttagtggtcggattgactattgaccaattgcggactgattatatagaggctttttcggctttatacggtgaacgtggctttaagcggttgtggaaagaaggacggatttatcggaatgccgaatatgattttattaatgtagataagtcatcagctgtggcggccatttattctggtactacaccttataccaacggaatcgtgggggataactggatggaccgcagtactcttcgagtccttaattgtgtggacgatgctgattttatgggcatttatacttcagagtctacttctccgcagaaaatgaaggtgtcgactttgacagatgagttgataatagccacacaaggagtagctgaagtttattctatcgctcctacacgtgaaatggcggtgttagctgccggccatgcttcgaaaggtgcattctggttgaatgatgaaacaggaaaatggagtggcagcacatattacggtatatttcctgtatgggtgactacttataatgaccgtgaaggactagatttccgtatcggcaatatgtcgtgggcgccttatttgcctgtgactgtctataaatatttgactagcgagaacaaacaagttacgttcaagcataatttcgatgatgaacggaaaaataaataccgtaaattgaaaacaagtccctatgctaatgatgaggtaaaccgtttggttaatgcttgtttgagtaatacttccattggaaaggatgctgttccggactttttgtcactagcatattatgccgggaattatgatcataaggctcctgcagaactcccgatggaaatgcaggatacatatgtacgcttggataacagtattgctgaattattggaattgatagaccggaaagttggtttgaacaatactttattctttataacctctacaggatatgctgacacagatcctgttgatcctcctcaatataaaataccgggtggagaattccatattgaacgttgttctgctctgttaaacctttatttggctgctatttacggtgaagggcaatgggtggaggcacattttgagcaacaaatatatttgaatcataagctgatagagcagaaacaactgaatatgtccgagatgttgaaccgtgcggcagaatttttggtacagttcagtggggtgaaagatgtatattcttcacaacgtttacaattgggggcgtggactcctaccattgataaaataaagaattactataacccgatatgttctggagacttgtggatagaagttttaccaggttggactgtgttccgtgaacattcgcttgatacgcaggtgcaacgctattcgtatgcgtcggctccattgattttcattgggaacggaataaaaccggaaataatccatgcgcctgtaaaaataggtaatatagcacccaccgtagctcattatatgcgtattcgtgctcctaatgcagccgttctggcaccaatgacagacatcaaaaataatattaaggaaagaagtgcaaattaatctgcattttattgtaactttgcattttcaaaagtaatcaaattagaaaataataaaaacaaaaaaatacaatgggatttaatgaatttattggcaaattatttggaaataaggccactcgtgacatgaaagaaatcaagccatgggttgataaagtaaaggctgtttatccggaaattgccaaattgagcaatgacgagcttcgtgcaaaaacagtagaattaaagaaatacatttctgattcggctgcagaggaacaaaagaagatagaagaattgaaaggtactatcgaaactacagaactggaagatcgtgagggcatcttcgcgcagatagacaaactggaaaaagaagtgctggaaaaatatgaaaaggcactagatgatgtacttccgcaggcttttgccattgtaaaagacactgcacgccgtttctctgaaaatccggaattgattgtaaccgctaccgattttgaccgtgaattggctgctcaaggaaaagattttgtgcgtattgaggacgataaagctatttggcagaaccattggattgctggtggcaatgacatggtatggagcatggtgcattacgatgtacagttattcggtggcgtagtgttacataaaggcaagattgccgaaatggctactggtgaaggtaagacgttagtggccactttacctgtatttttgaatgcactgaccggtaatggtgtacacgtagttactgttaatgattacttgtcaaaacgtgactcggaatggatggggccattgtatcagttccatggattgagtgtggactgtattgataaacaccagcctaattcagatgcgcgccgcagagcttatatggccgatatcactttcggcacgaataatgaattcggtttcgattacttgcgtgacaatatggctgtcagtccaaaagacttggtgcagcgtaaacataattatgctattgtcgatgaggtggactctgtattgattgacgatgctcgtactccgttgattatttccggtcctgttcctaaaggtgaggatcagttgtttgaacaacttcgtcctttagtagagcgtctgtttgaagctcagaaaaagttggctacccaatatttggccgatgccaaacgcttgattgcatcggatgacaagaaagatcaggaagagggatttttggcattgttccgtagtcataaggcactccccaaaaataagccattaatcaagttcctaagtgaacaaggtattaaggcaggtatgctgaagaccgaggaaatttatatggaacagaataacaagcgtatgcctgaagccactgatccattgtatttcgtaattgatgaaaagcaaaacagcgtagatttgaccgataaaggtatcgacctgattacaggaaatgcggcagatcctactttattcgttttgcctgatattacttcccaattgtctgctttggaaaatgagacagatctgacagaagaagaaaagctggccaagaaagatgaactgatgacaaattacgctatcaagtctgaacgcgtacacactatcaaccagttgctgaaggcttatgctatgttcgaaaaggatgacgaatatgttgtaatcgacggacaggttaagattgttgacgaacagacaggacgtattatggaaggccgtcgttattctgacggtttacatcaggctattgaggccaaagaaggcgtgaaggtggaagctgctacccagacttttgctaccatcactttacagaactatttccgtatgtatcataaattgtcgggtatgaccggtacagcggaaacggaagcgggagaactttgggatatttataaattggatgtcgttgttattccgacgaatcgtcctattgcccgtaaagatatgaatgatcgcgtttataagacaaaacgtgagaagtataaagctgttatcgaagagattgaagaaatggtaaaagaaggacgtcctgttctggtaggtaccacttcggtggaaatctctgaaatgttgagcaaaatgcttgctatgcgcaagattgagcataatgtgttgaatgcgaaactgcatcaaagagaggcggatattgtggcacaggcaggtcagaagagtatcgtgactattgctactaacatggcaggtcgtggtaccgacattaagctgagtccggaagtgaaagctgcgggtggtttggctattatcggtacggaacgtcatgaaagtcgccgcgtggaccgtcagttgcgtggtcgtgccggtcgccaaggggacccgggttcatctgtgttctttgtatcattggaagatgatttgatgcgtttgttctcttcagatcgtattgccagtgtaatggataaacttggcttcaaagaaggtgagatgattgaacacaagatgatttcaaattccattgaacgtgcgcagaagaaagtggaagaaaataacttcggtattcgtaaacgcttgctggaatatgatgatgtgatgaacaaacagcgtgtggctgtttataccaaacgtcgtcatgccttgatgggtgagcgtatcggtatggatatcgtgaatatgatttgggatcgttgcgcatatgctgtagaattgggcgactttgataatgtgaagatggaaatattgcagacattggcaatggaagtaccattcacagaagaggagtacaacaagatgagaaaagaagatcttgcagagaaaacctttgaagcggcaatgaacaacttcaagcgcaagacagaccgtatggcccagattgccaatcccgttatcaaacaggtatatgagatgcaaggacatatgtatgaaaacatcatgattcctattactgatggcaagcgcttgtataatatttctgttaacttgaaagcggcttatgaaacagaaggtaaagagattgtgaaatcatttgagaaggcgatactgcttcatactattgatgatgcttggaaagaaaatctgcgtgagctggatgaactgaaacattctgtacagaatgctagctatgagcagaaagacccgttgctgatctttaagttggaatcggtcaatttgtttgacaacatggtacataagatcaataataataccatctctgtattgatgcgcggacaaatcccggttcaagaaccggaacaagttcgtgaggctgctcccgaaccgcagactcctcgccaacagtatagagaggagaagcaggatttaagtgatcctcaccagcaagctgctgccgaacgtgatactcgtgaggtaaagcgtgagccggttcgtgcagagaagacagtaggtcgtaacgatccttgtccttgcggaagcggtaagaaatacaagaactgtcacgggcaaaatgcgtgataaataacgattattatagaaacgtccggggcgaatttactacccggacgttttttttattccttttaactcacttcttacgtaaataagcgtatttttgttccctaagaaaaaatgataatatgaaaagatccgtttcattaataattctagttgctgggacgcttcttgcttcctgcagcagtttgcagaccatatcttttgatcagttac

SEQ ID NO: 14430 - DNA, 58745 bp, Unknown
  gut microbiota DNA sequence
atcgtcacgccccaaaaagacacataactatgcgattatcaaagatttcaaagaacgatgtttaatttaaagtgcccactagtgttcagacatatattatataaatctgataaattctttcacacacagagataatggcaactaaacgctcacgtccttgttttataggggcgtggacgtcgttgtttattttgtgtgtgggcttaccagagccttgaaaacaaataaactaacgaattgcccacgcttcttcccatttataaaccgcttatcgggggcagatagcacaaatcttatttcaaaatgaaaaagaatttatttatgctttttgcagtcatattgactgcgtgtgtttttgcgtcatgttcaaaagacgatgatgacaattcgggtgcagcttccagtctgacaatgaatggcgaagctattaaggtcaaaagtattgaaggtgagtatgacccttctacctctttcagagcttttacattctgggtaaatgatgccagcgttattaatactggagtgtacattcaaggtactctatctaccaagctagaaaatctttcaactggaagtgatattaccagtaaattagggctattaatggaatataatagtggagatgaatatattacagatagtgattttcgttctggtaatctagtggttcaaaatattgatacttcaaaaaaggtactaacattagaatttaagaatttgaaatataccaataatcttaaaaaagaagtagtattaaatggaacgctgactatcccatataagatattagaataggaaatttaatcttttagattaaactgatacaaaaaaagtgtattaatcagtcttttataagattaaattgatacacttttcttttcgatacattaaaatttcacagctatgcttttaagctacttttttcgttctttttgaagaagttagctttaaaacagaatcctcttcaggggtggttgttataacccctaaaagcaagtcatcccagtctaactttatacctttatattcaaatctgatgaggctattaagagtttggtcaaataggtcatacaaaaatctattatctatcaatgaatagaaagacagttcttgtttagtacggttcaaatattcttttacttcgtcattattcaaatgtacttccagacgatgtaacttgcctggattattatagaactcttcaatgtactttttacccgagctattggctatttctgcctttttattatacgctgttaaagtagtacccttacccttatcttttattgcttttttttgctttatagaaactgttaaatacttgtccttattcatgtttccactggttatataagtaatttctggacggtcttcattacggtttttaacctctttagtattgaggaaggtggttacatttttgttgcgaatcagccttcgaatcatccgagccacatcacaagacaagtctaaacataagtccaaagcagttatattatgcagttccagacccaaattatcttcaataaaatccagataatatatttcatcactatataacacacgattactcacactaatccatgccttagcataaccattagaatgaaagttactatcttctttatcatcgttgatacctaatctcaattctccgaataacttatcaatgcctaaatcattgtaacggatttcatatacaaatttgaaatgtttaccctctatacgtcttaagtagaaataaagaaagtctacttcttcatctatttcccttgttctgagaatattgatattgttcggctctttgatttcgtaacacaaccgaagcatatctatgtttaacccatatatcttattcattttcttcatttttagtttcgttattatttggtttgtttggcacttgcttccagtattttttaagtccatctgatatggattgtacatgtgtcgcacttttagttcttcctcttaaggcttgactaattttttgtttggtagtatcatctatctggcgatactgtctcttgtagttagtttccatagttttggttatgaattttatatataataattagttagtttaataagaaagtaaagattagtaagctaatttttgaaaaaaatctggaccaaaatttcattcacccaatcgtttgccaaatcaaccacacctactaaaatgcaatattcagagagtcgggttacagtgctatcccttttcctaaaagggaataggaacttatttcttcctcaaaatattttctgtttgtatattaccgtacttgcttttttccagaaaaagaagcagtttaaacgtatatctatataaactttttataccttcgcaaaaaaaacaatggaaacaactaaagtatattattgctctgatggcatgtattcacgtgaaatagaaagaaagtctgtaaagtgtccattttgtggagtaataaacattcctgaatatctttttctaaaaaacgtagaaggaagtgattttctcaatgtatttactcaatgcactaacccgacatgtcggaacatgttcataacccaatttagcactgtaggggttaggaagcctgtctttacaaaaattttgcccactgcacttcccgaaaaaagaacctttagtgacattatatctgaattatctccaattttttgtgaaatatacaaccaagcatatatagcagaacaaaccaacctcatgcaaatttgtggtactggttacagaaaatccttagaatttctaataaaagattatttaatttcaaccttacctgaggaccaacatgaagcaataaagaataagttcctcaataattgcattagagacaacattagtaacatcaacattaagacagtggcatcacgtgctgtatggctcggcaatgatgaaacacattatacccgtaaatgggaagataaagatattaatgacttaaaatcaataatagagttaaccctccattggattgaatcagaaatcaggacgcaaaaacttttagaggatatgccagagttcagatgaaacaatcttctcaaaatccactataaacttgttcgataattcgatagtgtagccgacactgtaaaggataagagggtgtatcgtaatgaacgatgcactcctttttcatcatgccctatagtaaccagttaactgaaatgaagacttatccaagaattatgagaaaagattattcgagaattcttgcccgatttcaaaaagttacatttttccctaccatagtagttggaatcctgatacaagttctgccggatcctgcaccaagttctgtgaaatcttgtgccaagttctgcctcacgacctcactcttccagtgaaaagactaaatatttacttttagaaataataaagaaaaatatagatagcgctccagttctgccacaaccgccaatcgggagggaacggcaaaccaatgtcctaaagcataaaacctctgcggttaataaaaggccggttaccccattacatgaagtaaccagccatccattatcctgttacctagttaattatcaaaacttataagctgctttacgtaactctttcactgaaccaaatggtttattgggcttcaggtaacgacccatgaacttataaatgtccagacgaatcttgcttgactcataagtgtctaaccgatcaaaactatgcgcaccgggagcacgctcaaatatcttatattcaaactttttgccttctgctttcaaagctcgaatcattgattccacttcgatcacatttacatcatcatcactggtattggtgtagataagtaacgggtctttcaacttctccgcatgccacacaggagagcgccgtttgtattccgcaatattatccttggcagtctgcccgatatgattcttggccgaaaagattttgcgataactgtcgctggcatatcccatacgcatgattacatccgaaaccggtacaccggcgaaaccacatttatattgtcccggataattgaaaagattcatcagcgtaatcataccaccatgactccatcccatgatacccacacggttaccatccacaatatcaaaattgtccaccatatagttacggctgatatatacatcctcattctccaatccaccataatcaatattattgtatgtacccgaaccatatcctgtacttccccggtaatccgctgctaccacaatatattcctgcgctatcaactcgcggatgatatgagcataataggtgtccatatcggcatgtaccccactatgaggaaatacgattaacggatatttcttgttttcatccacgcttttgggaataaaaatgtatgctctgaatttaagttcgttaccggcactcatcgaagtagggttgaactccttccaacgcggtggtccacataatattaccttatctacatgggcgatatcacccactttctcgtaccacaggacatcatcaatttttttcattaactggtcaaactgatgaacggacaactgtgcccgtactattccgggcatactacataggcagcacaccaataccacaaattttactattccgtttttcataagcatatatttaaataataattatatagaatatcaactcttggggtatcccggattttgttccatttcaggactaaagataaactggtcctcaggaatcggcaacacacatttataaaaatcccaatccacttcttcgtccacactgggcaaatgatatcctcccttccgaataatagtcttaccattccgcagcaaatcaaagaaacgatgtccttcacctaccagttccttacttcgctcgtccaaaacacgatccaaagtatagtcagccattgtcacttcgttttcaggattaccccgtttcacaatatcgttcaaatagccaagtccctgaaccgcagcatcaccacccaacttacaaccagcctcagcagcaatcaggtacacttcggacaagcgaaggaccacattattacattccagcggtgcagtcttcatgtccgtccctctcagtttgtacaaccaccataccgtttttcccgcatatttattctcctccagcaactgcccacgcacatctcccggatcagccagcatctgctccgcatatttctgagtgacaaatcccttctgatagccataccagttcaataaatacccccatgaatcccgtcccggagtatcatccacactattggctatctcaaaaaacgattctgagccaaacttggtttccaccgaccaggcagccacatatttctcatgcggataaagtgcatagcttcccgatgcatccacatcctttatcagttgctccgccatatcaaacgctttccggttatcattatgatacagataaacacgagccagcaatgcacgggccgcatacttgttcatacgtccgttatttttctcttcggacatcaatgtaaccgcctcttccagcgtttctataataaaatcgtacgcttgagcaacagtagaacgagaaggattttcgtatgttcccaccaaatgatctatcaacggagcacccagtgacgcaccattatctttcgtataaggatatccaaagcaacgggtcaaatcaaactggcaaagcgcaatcaccgccatcgtttcacctttcaaagcattcagtttcttttcatccccactttcaatttttccttcggcaatagcattcagaatattccacgcctcacgaagaatataaaaaggtcgtccccacaatgaaccggcattcaaactattaggacgatgattgaacatatagcatgtattgcatactccactttcctcagaactctgcatatcatcccccttcatatctccataggcaaacatagcagccccataatatccggaacccgacatcagatcatacaatccattcaccgcattatccacatcggttactgtacggaaagctatagcagtaggaatcttattgctaggagctgtatcgaagaaatcaccacaaccggtaacaagtagtgaagctaatcctaaaataaaaagtatttttttcataatggttctgtttttagtgcaattgatgattaaaatttaagttccaacccgaaagcataagttttcaatggaggggtgtaaaatcctaccacgccactcatctcaggatcatattggccgtaagctgcccatgtcaacaaattcgtacccgagaaataaatacgggcattccctattcctaatttctgcaaccatgctttaggagcattcaatcccaatatcagacttttcagacgaatatgatccgtagaatggatggcacgcgaagaattatagttacccccttttttattcccatatacaaaacgggggacatccgttatatcacccggtttctgccaacggcggcgttgctcggtacttttattgcttatcactgaataaccatcatcttgcagaatataggatgcattatcatacgaataaccaccgaaactataagataaattgaatgacaagtcaatgaatttataattaaaggtattcataaagcctcccgagatagtaggcgtaatatctttcaacggaataggacttgcctgccccggatcggtcactttattttttgtataattgccattctcatcctgttggttatcataatacaaggcacttccagtctcaggatccacccccgcatactcacgcagataaatagtattaaatggataaccttccttacgtacatacctgccatccacaaaccaaggcagatctgccagtttcagaatcttatttttattatggctcaaattgaaggcggtagtccagctaaaatctttcgtcttgatgttattggaacgaacttcaagttccacaccggtattccgcatctgtcccacattggtcagcagagaagaaaaaccgctgatggaattcaattgcttgctcatcaataaatctttcgttgtacgcgtgtaccaatccaaagaaacattcacacgactgaacaagccgatatccagccccaaattcagtgcataattcttctcccaagtcagttcctcattccccaatgtactttcccacggagaaggttttccattataaaacgcccctgtggtataagtactctgataaccataatatgaagagggaagattcccattcaccccataggaagcacgaagttttaaatcacttaatactgatttcaacgactgcatgaacttttcctgagaaagtctccatgaagcggacaaggaccagaaattcccccaacgagtatcgggagacaagcgggatgatccatccctgcgaaaactgaaactggcataatatttatcaccataagaatagttcacactagccacataggacattaatgcatcttcctgcaatttctggtcagcatctatcggatcggctgcatttcccaatgaagtgttgatatcctgcccgtaagttttctttgcagcatacaaatcctcataatcatacttcatcacctcgaaggcagcgaccgcactaacagaatgtttaccgaaagttttagaataagtcagattattctgtgaagtataccgcatacggtcagtcatctgcatacgtccccgtccctgataagtagctccatcacgtccttcaggagactgaaagaaaaagtcctttgtcaacgaataatctaccgtaaacacactggatatcttcaaattgtcccacacattataagctattttagccgtacccatcgcacgtaccgtccgagcataataatcattcacctcggcctccaataccggattatatccattgttttcacgatacccgctggcatacgttccatcctcattataaatgggagtagaaggcgtcagattcacttttgatgcataaatggcacttccataaaatttaccctcaggtaaatgaacgttctttgtccacgaaaaagaagcgttcattccaaattccacctttttatacttgttacttgcatccacacgccccgtaaagcgctccatttctgaattcagggaaacacccgtctgcttggtatatcccaaagaaccgataaaactggaattttggttgccggcactagcagacaggttataatcctgttgataacctttcttgaacagagcgctttcccaatccgaatacccctgagacaggcgtttggcatactggtcgatattcgcatcagcatactgctgtgcctcttgttcacttactcccttatccagttgaaaattaaccagtccttcatgaatcaattccctcctttcctcacctcccatcagcggacgatatgtataagcgaaatcagtgattccatattttgccgccatattgacacgaagtttaccttcttttccttttttagtagtgataagcactactccattagcacctttcgcaccatacaatgaagccgaggctgcatccttcaaaacagtgatactttcaatatctgccggattcaacgtttcaataactcccattcctcccgcttcggacatactggtaaagttactcaagtcataagatggaataggcactccatctaatacatacagaggctcggtggaagcattcatagaagcgattccccgtacccgtaaagttgttttcgcaccgggttgcgaagaagtaccggcaactacactgatgcccggtatattcgattcaatcatctgccctacggatacaacaggtaatgcctccagtttttctgtagtcagaacagaagcagatcccgtataagttgccttcttgaaatctccatatccggtaacgaccacttcgtccaacgtattggcatcttctttcaatacaatatgaaagtctcccttcccttttgtcggaatatcctgtgccagatatcctatatagctcacaaccaacgaagcggattcgtccacttccaacgtaaactttccattaaagtcggtgataaccccattggtgcctctacctttttccaccacattggcaccaatcagaggttctcccattacatctttcaccactcccgtcactcttttctttttagaaccaggccgcgaaacagctttcttctcgatgaaatagattttattgtttctgatctcaaaagtaagatcagtgcctgaaaggagtcttgtcaatgcctccttcagtgtaacatctttgagttgcatggttaccttacgattcacatcgaccaactggtcactgaaaaccaagctcataccagtctggcttttaatagatgccagtactttttccaccctctcattcttaaagtctaaagagactttttgcgactgtgctgaaacagtaaagccaaataaaaggactcccaacagcagtaatgtcttcattttggttcttgctttcattttcatcaatagtattagtttgaaacaaaagaatttcttatataggctaacacatcactccaaagaaggtatgagtccatttttcattttttagaaaaaaaatagatgcaagtgtattcactcacatctattccacttttcttctataaccctcgttatttagaagttacttcaaatacaccttcttctatttccgtaaaaacaatattcgaaacggcttccaaatcatagagcacatctgatgcattgacttttcctgttgacagagtaaacctgttcttcaataccgcagaatctttcactatgaaatgaacatcataatgtctttccattacctttataatttcaccgagtggagtcagataaaaattaaggctgttgacacgccatgccgaaatctgttccatattatccggacgggagatcaggcatttccccgactgacggttatattccgcactctcccccggaacaagtctgtactccttcgcattatgatctctgaaaagaattcctccttcatccaaggttatccaaatattgggttcggcggaatatgcctttacattgaattttgttccagttactctcacttccaccccttgcaaatccaccttaaaagggcggttctcatctttggcaacattgaaatacccttctccccaaagctccaccgtacgattgaacaatccaaactgcttgggatacctcaagcgagaatccgagttcaaatgtacaatactgccatcctgtaaaatcacccggatctgttcaccataaggaacatttatgtcagcatattccggttcagagaaaatgcccgtccggtttgccaaaaaaaacaaggaaacacttaaaaaaacaaacggtaacagcacagccgccacccacatccatctgcgaccaaccgggcgttgtccgcgctcacattttatctcattcataaaacgcactttcatctttacttcaggtatggaatgcgggtcaatactttccggcatctcttccgacaacatcccgatttcccagtcaaagcgttccgacaaatacttattaccttcttccgtagcaaaccaaccagctactttccgagcttcttcaggagaggctttgttgtcaagcactttagctatcaccgactcatctatcttcataatctatttttttgtatatttataataacacctcatcacaacaaaagtatgagtacatttcagactattaaattaatccatatcacaggaaaccatataattaaagactctatctcgttacggagggcttttatagcctgtgtgtaatgggatttcacagtaggaacagttatccccatcctgtcggctatttcctgattggataatccatattctattttcaacaagcagattttttgtttctgaggaggaagcttatctatagcaacccgcaggaattttccgagttcaccattttcaaattgtgtcaaaaagtcgtcttcatcttcatcattcacttgttgggccatttcgtatagtttctcgaaaaccaaactacgatgcctcaattcattcagtatataattctttaaaatagtaaatagcaaactacggatacccgactcaaagctaaaatttgtccgctgctcccacaatttcataaaaagatactgaatcgcatcttccgcctcttcttctgacttcaaaaaacgataggctatggtatataataaccggttatagcgttcaaaaacagcggcaaaggcatattctttcccacggcgaagatcgtcatatagtttctgatcaaaatccggatattgattcataataaatgcttttcctagttttattaaaaggccgacttaacgcaaagatagtataattgaacctatcttatctcagaatactcaaaaaatatacatcatttcgttttctagttctagaattctttacacaaaataagttataaaaatcactttttgatacggaagaaaagtgaataagacaccgtgatatcttttatctcggcgtcttattaatcacatgccggtgtattatcccggatttgagatataaatccgaatccctgcaatgaccctacttgaacaaacattttactccccaactccagactccgaaagttacgaatatcccttcttataaataacagttatctctgatataaaacttggacccgaaagattatacatcttacaagtgcaacatatataatgataacacctgaagatttataatgtgtcacggcatcttctatcaattaaaatcataattaaaccaatcaaaataacatttaccgcctattcccaacgtattatatgaatacaagcccacacgcgcacctttccaatcgccgaactttaacgaataagcatctccacataaaataaaattacagttatcaaaactatagaacaactggcagcgattcttctttgcatccaacataacacgtaaatagatttttttaccggaaaccatctttacttgctgaacgtcaccatttttttctaaatacagataatttttaccttcctcacgactaatgccaattccgttataaagactgcctgtgcagaacaatccacctctttgtccatcagccagcgctgaaaaatcaagcaacacagtggctgtgcttagataccccatacatttttgagttaacatattgcgagattctcttaatgttgcagccttcaaggctttcaaagcaagccagcccctacgctcatttaaactccaatgagtattcactggattatgattaaactgccattgcagccctaaagtgtaagaattgaaatcatcagtcgtttgagggtgagaaacaagaacacttttgcttacaccaggctttgtccaaacctttaccggctcacctatcccattcatatccatatccacccctatcacgggccaattctccatccaacaaacaggctgcaaatgcacgacacgtcccaaaggttctgtcaattggaaatgaaaaaaccaccattctccttcaggcgtatctactaaagccccttgatgaggaccatttacagtagtgtttccctgttccaagactactttcttttcgtatggtccatagatattttttgaacgtaaaatagtctgccatccttcgcctactcccccttcaggaatgcttagataataataaccatgccgtttataaaatttagttccctcagctacaggacctgtataaataattttcccatcatccaacaaagttttaccatccggagtcatacgatgtagataaataggacctgcccctaactggctacgccccatgtaggcctgtccatcctcatcccaaaaaggacaggggtcctcccagccgcctatattcttcacacaatgcaacggcgtccacgggccatgaggatcagtagcagtactcatcatcagtccttctctaggtgtacaaaaataaatccaaaatttaccatcatgaaaacggatagcaggcgcccaagatcctcctccataattttcattattatcccatccgggaaaatcaaaccgattatacacttgactgatgattctccagttcaccatatcatctgattctaacaccggcatcccgatataatgaaaatcagagcaaaccatataatatttatctcccactctaatcacatcaggatcagaataatctgcatttaaaataggatttatataagttccattaccttggtcaccccaagaaacagcttgtccttgtaccttttccgacaaaaacagcaaaacaaacagaaaagccaaaaagaaaaatctcatagtatcattcatcattaaaaaagaaaattgccttcatcattcctaaagataaatgataaaagcaatacactaaattatatacaatcaatcccaaatcattcagctacaacttcaattacgcgactgttaagttgctgtgcagtaaacaaattcaatcctacattcatcaaaaattctcctgagaaaacctcaccattacctgataaagaagagttggctccgggcattaagttaatttctttcacacgatacattttgtctgcatcaagcccctgcaaacgcaccggcaatattttttccgcataacgaggatgaatatcgaaagcaaataccgctgctttatccttatctttgcccacatacatagtagaggtatgattactaccataaggagaaactaaacgatacatatcaccttccagaactaccggcttcaaacggttataattctgcacagcagtacggcaataagtttcatcatccttactcatatccgctaatttgatatcaaaaccaagtttgcacatcatagccacatccgtacggaatttcacactgctattcttattccatgtagtaacatgagcgcacattgtcttggctgggaacacctgtgagaatccccactgaataaataaacgttcaatagggtcagtattatcactaggccagaattctgtaaaatatttcaaagcctcatagtctgagcgtccaccaccaccggaacaaagcatcatcggcaggttaggatattttgctttcacacgctccaatacattatacaggccacgcacataatcaatatataaatgtgactgtttatttttcaaataaacagagtaaatattcgtaataggactattgcaatcccatttgaagaaagcgatatcaggatatttagtcatcaaattgtccacaactccgaatacataatcctgtactttcggattgctcaaatccagaaccaattggttacggaaataatactcgtcacgattcggaagatgaatcacccaatctttatgcttttcatataattcacttttaggattcaccatttccggttcaatccaaataccaaactttataccttttttcttagccgcttccgtcagataacctacgccgtgaggaagtttatcagccgtttcatcccagtcacctaatccttgatggtcaccactgcgcggatacttgttggcaaaccaaccatcatccaacaaaaacatatccacacccagttctactgcatcatccatcagcttcaccaatttcgcttcatcaaaatcaaaataggtggcttcccagttattcaacaaagtcatacgagtctggttcccatccttcacctgatacttacgggcccaatcatggaaattacggctagcctgtcctttacctgtaaaactgtaagtaaaatagaaatcgggagtacgaaagatttcattcggtttcagactatattccgaagcatacggattaattcctgatataacacggagttcattcttattatccacctcgaatacaaaactgaaattacccgtccatcctaatgttccgaccaacacttcaccttggttctcttctgattttccatccaatgaaagttggaagaaaggagagcagaacatattggcacgtgctcccaatttagtatcaatcgtttttttaccaaattccaaaggttgttccttcacatgcgcctcactagcccagtctcccgagaattcagtcaggaaatagttgtcacgattcaagtgcaacatggaagacgcgtacttatgaagctgcacaggtttcttttcctggtggctgatttcagtgaaagtctttatcaaattttctttctgataagccacataatgaagttttacagttacaggatatttatcatcctgcatagtaatcaccacttcatctacccccggcgacacttgattccgagtatgagaaacatattttaataaagtagaaggattgccatcattatgtactatatgaatagccggttcaaaataatcttccatgccatgagtaaggtatgcttcgctaccctgtggcaaatgggcaatatctgtagcataattcaacttctttcccaaataactttgatatagacgtccgttattaccaacccggtaaataaggtctacattttctgtactaattttaattactggcttatctgccgcttttaacataaatgatatgcataaaaaacatatcaagaagaataatctttctttcatggtattatttatcaattaaaattatagtgcaaaaatagggagagaagctcaaaaatccctactcaaatgcgccataaaataagaattttgacgcttataccctcaaaatcatcgaaatcaagcctgtattgtaggtaaaatcaaggaagtctgctatctttgttatccaattctaatacatggatatatgccacgaattaaagagggatttaaaggagaacgcgccatcgtacttcctgcttttctgattgaagaattaaagcaagatccgttaggcagcgaactttacattacagatataggatattatcctcatgcctgttttcattaccggaaacgcaacaccgaggaagcaaccgagtttatccttatttattgtatggagggagaagggtggtttgagttagacaaacatcgatatgtagttaccgccaaccaatttttcattctacctaaacaccaggcacacgcttatggcagtaatgagagaaatccctggactatttactggatccatttcaatggaacaaaagctgcatttttcagtgccggttttgaccgtccgaaagacatcactccacaagaggattcacgaatcaaagaaagattagtactcttcgaggaaatctactcgtccatcagctccggatatagcaaaaactatatgctttatgccactaccagtcttttccattttttaggttccatgaagtttattggtgaatatcgggattgcggttctatgcgcaatggttgcagaagcaaggatgtggtgcaaatagcgattcatttcatgcaagaaaatttgagcaaaaccattcgcctagcagatatcgctgcggaagtaaacctctcagtttcctatttctccaatctgtttgaagaaaagacaggctcctctcctcttcgatatcttacctatctcagaatacaggaagcctgtcactacctggattttactaacctaaaaattaaccaaataagtcccttggtaggctatgaggattctctttatttctcccggttatttactaagacgatggggatgcctccatcagcttataaagaaaagaaaaaaggttaagacttacaccatctaccaacagtcggtccggaaaggggcaaccgggagcccgttctctccgtacaaattacaatccggattatctgcccagccataacgtgcagcaagaggggcaggaacttcagtagaagaaagtataatttttccatcatggaccatagcctctgccggataaaatacacggtccggccctgcaatagtaaagccttttaaagttgtacctttaatctgaaatccatcttgcttttgtccgaaatccaattccatcttgttccccttaattatataattttggaatacaggagccgaacttgaaacattttttccataactaccggccagggcaaccaaagctaaacggcgtcccacctcttgcttattcttaggatgaatatcatcagccaaaccaatatcaatggtcacggccataccaacttggtcaagttttaatgctttagtttgcgcttcacgcaaagccgcccattcggaatccggctgtattttcttggattccataaaattagccaattgtacaaaataaaaggggaaatcactccgccattgtcggcgccaatccgtaatgagagcaggaaacaaatctccatattgttctgaacgacctacattagcttcaccttgataccatattactcctttaatgggaaaagcagtccatggtttgaccatcgcattgaacagcaccgtaggataactggagctttgaacaggagaaatcggtgcaggtggaaatcctgttaaagaaagtccgatacgatatttccaatctccagccaaactgatccgctttccatcagcttctacataaaggtcctccgccttgccatgaataccgccttctccaccaaaatcagaaacacgaacagcaagaaccgccttaccagccttcactagttttgcaggaatggtataagtacgcggtgtcatatagcctgcccctcgggcaatctccaccccattaaaataagtgatatcttcatcatcaatcattcctaaatttagttttaacggtttaccaatccattctgctggaatttcaaaactacgacggaaccatactactccatcaaaatttttcaatccattcttttcccagtaatcaggaaggcacatatcccaccattgtccttctgacaagtccggtgcaatccagcaaggcttatcttcctccattcccttatcttccttagaaaaaagagattgccactcagagcgctcttgattataggccttttccatacgaatagggtcaaagtccaattgttccatcttagccaactcttcacgaaagcccagcacctgtttcaatgtttcatagctggtccacgcttcagcaggcgttcctccccacgtacagtcaatcacacccacagggacatttaattctttccataatgaacgggcataaaaataagcgagtgaagagaattcaggaattgtggcggaagaacattcctgccaacctcccatagtagactccatatcactcaacggaattactgaagtattcttcttcacttgaaacaaacggatagaaggataattcgcctccgttatctcctgctcataattcatgactttcccccaacccgcaacaggcatctccatattagactgaccagaacaaaaccatacctctcccaccattacattttttaattgcaatttcttaccatccgtaaatgtcaacgtataaggccctcctgcagcaggagtaggcacagacaaactccaataaccgtccttattcacctgagtcacatacacttcattattccagcctgtagttacctttaagattttacccaataccgctttaccatgaaaagtaacctccgtattttgctgaagaaccatattgtccgtaaagtaagcgggtaagaccaccttggcgtaagaatttacatacgccaagagagaaacacataaaaacaatattttatttcccatatttaccaaattcatttgttccactattatattcttctttaatcatacatcatcggaagctacaccaatctgaatttcaaattctccaagctccaccaactcgcatcttatttattattataaggtgttaccaacaatttataggaaccaccttgcaataaagcctcatcaaaagtaatacatatatctttggtttcacccggcatcaatgtgaaataattgtcattcataatagcaggaagaatacgctctccatccgaggtccgaacagcctgaacatatactgcaaacgccacaccttttgcagactttaggtgagctatagctgcccgaatctctgcctgaccatttttacgcaacaatttagaagaaactttcaattcggctgccggcaaagtattcaaagccgtaaagtccaaacggtcgttgccacgccaataattgttttcagaaacaacctttcctgatttatctttcaacgtcaggcggataaaatgtacatcgctcaaaccctcactaggctgtgttccacccaatacatcaaaactccataatgaataaccaaaccaccaacctagttccgtcccaaacatacgtacataacgggcatcaacttcggggaaagtaatttcatctattcctccacgtccttcatcagttttatatacttctttccaagtctcggcgtcatctgacacttgaatcttatatcctttaccaaaagatgcctcccaattcaagcgaaccccacctacgggttgcacactgcccagatccacataaagccattcattttccgcttttgccgctgcccaacgggtatcttttttcccatccgtagcatctgaaggctgtccataagtggtacttgaagcaaaggtcggtttatttaatgacaaatttttacgctctttattgaaatctatcgtaaaacattgcacagtagaattgctaggagagttcacaatagctgattttgtataagcctccacagactttccatccagattgtaaacttttacttcagcagtcaaaccttccatatcacatgctgtggtattagcaatcttcacaccgtccgtcacaggattccaaagaatatgcaccggttcacaggctgattttgctccccaaaaggctcctgtcaaatcataataatagtcataagtttgccaaaccatagacggatatgccgactgtcccatccaagtcatgatacctgatgcatcctcccacatacgatccagccaaccctcatacatagccttattagattcaatattgacaagctgagccttacggcaataatcttcaatcccttcgggcttgccaaaacctttggttatagaagcatcataacgatcgggagctgcattaaaagcattttggccaaaatagtgcttgttccacatttcatcacgaggccaccagttctccttgggcataaatttcttgaagctttcaaaggtaggaactacagctgtgccaatttctgtacgaaatccccagccacgcgccggatctccttccaagccatcaggatatttagtaaaataaaagcgaggctcaaatgctccccacggaccactaccggtcaagccctgagcatgggagtttgcttgaaaataacgatcacctccatcaaaagtcctgatattttccgccatccatccttctaaaggaggctgaggattagattcattatcgccacaccacacggctatactagggtgattacgcacacgttttattttctccatcatattattattgaacacattgaggtcataaggcaaattcggattagagtttatccaaaaatcatcccataccataatgccatatttgtcacatgcctcgtagaattcatcatctgtaacagagccgagccaattacgtatcatattaaaattcatttccttatgcaggcggactttggtatcatattcctcgccacggcaacgaagcatatattcagacatcccccaattcgctcccttaacaaataccggaatatcattaatataaatatggaatgtattgccctctttatcataagaatatttctttataccaaaagaaacatctttcgtttccgaaactcttccatccaccatcacctcaaacttacaatgataaagattgggttctccatacccatttggccaccacagacgcggctggtctatacacagttgtggaaaatagcgtttgtcaaacttcacctgttcagtagtatgggcattcacgtctaattctttttgaaaaacaatgtttcctggggtaattgttccgcgcaccaataccttcgtcttttctaccgaattattcttgacatcaagcgccacactcaaatccgctctggcacgggtaggtaaattagtacgtatccaaggatcaattaaagtagctgttcccgtattagtaagaaataccttatcggttataccactattcaaccccggcacataaggcatccaatcccatccgccactagacaaataggttggactgccctgattagccaatggagtatcaggcatatgaacaagtacagccaatacattttctttatcacgatttactattgaagtaacattaaaatgtccacgatgcataaacccatccagtttacctaataatgttccattcagatagacttccgcacgacggtttaccccattaaaattcaaccatatcaattcttttgtaaaatcagcaggaacacggaatgtagtacgataccaaaagctacagtcgtatttgtctcgatttacctgatgaatattgtcaccaaagttaggatctttctccagccctgctattacatacgaattaaaagctgttccaggcacaacagcatctacccaagcagaaacattgtatccgtttccacaaagtgacttcacatccgttccgacttcagcctgaggctttaacttccatttcatttgtgggttatcgctatgtaaatacacagtttgagcatgcagtacttgcatacatcccagtagggctaatacaacccatgttttttttacgtttttcatattatagtcttttcatatttatcaatcatctatttctctttttgcacctgaaaactaaacaaggtgcaatgctcataagctttctccggtaacaccaggcaagaaggaaaattcgaatgagaaggagtatccggataaaattgtgtttccaaacagatggctgtatccggtcggtcataatatcccgctgtatacaaaagaacagcaggcaaatcagtcatcactgtcatttttcttcctgtaacaggttcatataaagaagcagcctctaacatctcctcagacattttatctttcaatatatagcaatgattatatcctttattccaaagtaattgctcatgatcagcatataagtctgcacctaccggttttagggaagtaaagtcaaacggagtatttttcaccttcatctttcttcccgtaggaatgaacgccgaggtagtatccaatatccggtcagacgaaatatgcaaccgatgctctgttatcttttttccatttccgcacaaattgaaatatgcgtgattagtcatattgatgtaagtagcacagtctgtttccgcataatgccgtacagaaagttcattgtcctcattgaaacgatagtctgttatcacatggatatttcccgggaaacctccttctccgtctggcgaatacagactaaaacggatgccatccggtaattcttcccattgccacaccttgttatgaaagccggaaaaacctccatgattggtattattcccatcattaacttccaaatggaaggttttcctatctattgtaaaagaagcatcagcaatacgattggcaaatctgccaacagttgctcccatataataagaatctttcaaataatcggacaaggtatcataaccgatcaaaatattggctaatgctccctgaacatcgggtactgaagctgtaatccaacgtgccccccaattagtgaattccatataagctcccgaggagttcattacggtaaatcgtaatacaggttttccgtcagaggtataagtttctattttatgtattattttcatattattccaaatttcagaaaaagaaaaagcatcaggtaggaagcagatgtttcctcctgatgcttctaatttatatggatagaaacaatttatttgctatatcccggattctgatcttcagggccgaatgcatcatttgttttaatttcagtatcaggaataggatagcgcttatggaaatcttgaattgttcctgattcttttgcccaacggttacgttcttttatcaattctacaaatttattagtacgaagcaaatcaatacgtctccaaccttcgaaacaaagttcacgcaaacgttcatccattactttatcacggaattcatctttgctcattcccgaattccatttcttatcttctggcaagtttcctccccatgcacgagtacgaatttgattattcacgatctgtactgcttccgaagtctgtcctaattcattcagacattcagcatgcaataataatatatcagcataacgaatcattgaaaagttcttaccagaattccacatgttattaatgccaagccctgaaagaatatctgtacgatagtcttcatatttctttatatgcggttccaattcatctgtagttcccgtccattgagtctttgacaaatcaggagttacatattcgaatgttccatcttctgaatatttattagtataatacgtaaaatcataacgcaatgcttcttctttacgcaaatctccatcttcccaaatgccaccttcttctaccgtcttataagcaaaaggagtcggaactagaaagtcgtaaccagagaaagagcatccctgaccaaaccaagagtcacatgcacgagaaccacaatcaaactcccaataattacaatcaggatatacattattaaattgcaactcaaacaatgactcttttgtattaggattatcataacgatacaagtcagcataattattcagcaattcatatcgccccatattaataatagtcttaaaacattcatcagccttggcaaaatcccgtaatcctgtctcttccggagctgccatataagcctttcctaacatggcccatgcagccccaacagtagcacgctgcggttcactattataagactcaggcaaattattggtagcagtaataaaatcattaataatatattcccatacagtctttaaaggttgacgtcccaagcccaattcatcagtacggttcatatctatcacagggatttcaccccaatacatacttaattcaaacattaataaaccacgaataaagcatgcctctcccatcaactgtttagcacgttccggttcttcagtggtcatacccaatgcatatatagctttagcagctgaaacgacagccggccaacggttgttccaaatagaactaacctgagtagatgtaggattcaactgtccattatatttatccataccggcttgatcgcctgaagaaatcaattgataattaccctgctgtgtttcatctgtccccaaataaggcatcaatccattacgtccttctttacagcccctataactcttatacaatccaagaactaaaggttctacattatctattttttcaaatacttgttcttcagtcaaagatcccgtaggttctacctgcaaaaaatccgagcaagaggaggttttcagtgcaaaggtcaaagccaaagcatatatcgcactatatctatatatctttttcattgttgtgttttcttttaaagttagactatttattctatccttccattaaaaagtcaaattaagaccaaaagtatacatacgtgtaggaggataccaatcaccagtttccggatcataaccattataattagttaagcaaaaaagattagaaccagtggcataaacacgcaggttagtcagtttcagagcatttatcactttagttgggaaagtataggccaatgtcagagcagacaaacgcaagaaagaagctttctgtacactaaaatccatagaacttgcaccataatgattataatcaaagccagccaacacacgtggaaattcagcatctgtattttcaggagtccaacgatccaacaaatccgttgatgcgactccagatccagtacttccaatcaaagtttcataccaaggactcaattttttagccccataagaataactgaatactacatttaaagacaatcccttccaagaaaaatctgtagaaaaaccgccataaaacttaggatcagtggaaccaattacaacacggtcattttgatctatctgtccattattatcataatccaacggatacaaatcaccaggattcacattatatccattccaatttattttattcaaacgatccatatcaatttcttgggcgattccacctgttttccaaatataaattgtgttacgagactcaccaaggaataaattaccttctttttgaatattacgatcactatctacattatatacaacatcattatcaccatataattgagttaccttatttttatccatagacaatgtagctgcaaaattccattcaaaatctttagctcttaccaaattggcattcaaagcaaattccaaacctttgttttcaatcgcacctatattttcaatagtactgctgaaaccagtagtcgtaggcaacgaatggctcattaacaaatccttattttttatcaagaaagcatcaacagacaaacgcactctattctgtaagaaagccatatctactcctaaattccattgtttttgtttctcccaactaatatctggagtaccacgtcgcccattggaaacaaaagaattcgtataacctgtatcggaagtacccgtatagctgacattatataaagataaataggcaaaatcatcaatattctgattaccaacgataccaaaaccagcacgtaactttaactgatcaaaaatcgtctgatttttcatgaacttttcttctgtaatattccaagctgcagacacagacggaaaaataccccactgatttcctttagcaaatttagaagaaccgtcgtaacgcgctgtcgccgtcaataaatatttacccgcatagttatagttaacacgagcgatataagataataatgtttgctcggaccaagctgtacttaagccgcgctgatcttttttataaccagatcccaaactatgatatccaaataaattagtgccaaaccctgttgccgtagcattaatataattatacatagtccgtgtagcactggtaccaaccatcgcattcaacttatgtttaccgaaagaggcttcataagacaatgaattatcccattgccatacagtacgtgtatctctatcatctttggcttcaccttgtgttccataacgttccgactcataaatatcattcggggtatatttattttgctgcttttgagcataatcaatagagaaagtagaacgcaagtttaatccttcaataggattgatattaatataattagagctcaacaagcgattatacaccaaatcattatcgactttcaaagaacgtaatggattaaaattattttggtcaaaaataccttgccaatttaaagtttcaatctcatcagaaatttccaacatcggattagcacaacgtgcacgattcattactccatcatcaaccaacgtgttctcggtacgtgtaaaagttgtattagtacctactttcagccaggatttaatctgttgatccgcattaatacgtcctgtgtatttttcttgttcagacttctcaattacacctttattgtctgtataaccaaaactaatataataagaacctttatcattgccattcgaaagacttactacatgattgtgttgtactccagtacggctcacagcatccagccaatcataatttttattattgttgtaggcatcgaattcataatcagcaaaaacagtattcgatcccattatcacatcattgatataagcattgacatctccatcaggatttgtttgcatataaccattcgtataggcctcctttctaagttcaaataattgacgagtattcatagtttttggagtattagcataggtctgaaagccaatccagccatcataagaaactttaccttcgccttttttacccttcttagttgtaataacaacaacaccgttggaaccacgtgaaccatacagagctgtagctgatgcatctttcaagacctcaatagaagccacatcattcaaattgactgcattaaatccagagaatgaattatccataaccataccatctacgacataaatagggtctgtagatccattaattgtattaataccacgaattttaatagatgcatcatccgtaggacgcgtaggttgagaaatgaacacacctgcgacacgaccttgaagagcttgatttacatttgttactggtttttcttccaatactttagaactaacactggcaacagctcccgtcaaatcactcttcttcatcgcagtgcctacaacaaccacttcatctaatgtttcagtatcctccgacatcacaactttgactggttggttacccattattttaacatcttgtgcaacatatcctatataagaaatatgcaatgtttcccctttctgaactgataatgtaaatttaccatcaaaattggtaatagtcccattggctgtaccttttaccactacacttgcaccaatgataggttcggatgtaacatccaccacctgtcctgtaaccgttatgttctgtgctagcatattgcagcaacaaaacatgataaggattaaattaataagcctaattcttttcataatttgtaaatttaagtacgatttaaagtttatattggtttattcttccactttgaaaattacaacatcacatgcaggaaccgttacttccagattggttttagcagtactttcaatgccactccataattctttcagcctatattcctttgacgaatccaaccccagacgctctaaagctgtagtcatcttcaactcttgatccatatagttgaacacagcataataagccttaccatccttatccatgcgtacaaactgattttctgacttttcaccattcccatctacaggatggaaagattccccattggctatagcattgatctcagcattagtcagatatttcatcgccttctccttcacttctttagaaccgcctttgctgaaatcatctccagcaatgaaaattcctgtaatgacccccgaagtaacacgcgctctgttctcaccatctgtagcatcacgcaatacaatatggtcaggatcattaaactgataaaccttatcctgccaccaaccgtatgaaagtgcattcaaggtatattcagtatccttcatcttattccacgcatcacaagcaattcttctagactgagcataatgagcaggaaaaacaggagaaatagaaagattgatatacatatcgccaaaatatttgtcaagcaattgcattccatagttatatccctgaatacctgtttgtatttccggattataccatttgtcagcctccatcgccccatgtgtcataaaatccattttcacatattcaaaacctgcccgatgaaagagttccgatgtacgcttcatcatagcttcaatagctggatgggtaggatcaacagcatacgctccgtctaattcctgcggttttccatttgcatagagatacacatctttatatttataccccggaatttcttttatttcacgttcaggatttttagcccaatcagtaaacggagtccaataaacgccggctatctgaccgtttgccttacatctatccacaaaagctttcaactcctcttctgaaaaactattccaaccagaatccaaacctgtataaaccagattatccgaattcacaaaatgatgggactgcaaattctctttataaaaatcagaaacttccaatgctttcggataggtcagattaaattgcaacgctccccagctgttccagccaaaaggaacagctttatcccaagctttgggcggagcaatcacagcattagcctgagcgtattcttccatgccttcacgccagtcttcaaaaaatcctactaaaatcttaggcgacttgattgtcgtacctttcaatgcaccgtgaggtttcgaatcacgcgttgtcttatcagcaacacccccataacataccaatgaacctacattatatatattacctttacctattgttatacctgttttccaagaatcgtgttccacagaacctatcaccatagcttcacgatcatcattattaaatatggcagtaacttcataactagtcaattctgtaaatgtgagcggatgagattggtatctgatccaacagtcattatcgaaaggaatgaaaagcgcacgattattttcaccctggttcaggacttcaggcattcggtccacattgaccggcgccatataattcgaagccatttcagacgtactttccaaagtaaaatctgtcaacacataatcctttgtcggatatacataaaaagattgaaccagtacaggcaaattattcccagtataagtcacctcataatgatacccttctccaaaatgatcattgattttttttgtagaaacatgatgctttgcataatcacgagtcgaaacaacactgtcggccaatttataagctgcatatacattatcataaataagcttagagcctttgctgatatcaataccattagcgtgagcatcgtactccaaagaccattcaccgacatttagatttgcattttcagtacacccggacaaaataagaccggaagcactcaatgcagaaacacagagaaacaatgattttaaagttaaccaattattcttcataatattattagtttgtcaaagagataaatctacttaaggtttgctttactgttcggaattcttttcctttcaagcatggtcaaaagtaggcatatcttgacaacctgttaatatacaaacgcagcaataaataggatttttgcagcaatgactcatctgcgtccgaagaatccgcaaatgtgtcattttttgctgcatttctttcaatcagagattctccgtcaaatctattttagctttttccttggatgtttgatactgtttctcaaactctttcggagtcattccgaattgtttcaggaataatttactgaaataagatgaagagtttattcctaccatataacagatatccccaatacggtatttaccttcctgaatcaattcggccgcttttttcaaacggatcaaccgaatgaaatctatgggtgaaagattaaacagaatctttattttcctcaataagctggaacggctcatacataagatatcagccatacgttccacattgaaattttcatctgaaatattctcttgaattacattaattactttattcataaattcttcatccgccttgttcatctgcatattatgcacaggaaaaaaaggacgtttagagaatgcctcacgttcttttctacgattgctgagtaaagacaaaatctgactcttcaaataattgaaagaaaaaggtttctccacataagcttccgctcctatcttcaatccgttaattttactctccaaatcattcttggcggtaaggaaaataaccggaatatgacacaaatcaatatccccctttatttccttacataattcatagccattcatcaccggcatcattatatcactgattaccaaatctatgtgattactacgtaaaacatccaacgcttcctgtccattcacagcagtttccaccgtaaacaaaacttccaatcgttcaaagataaaagatctcatactttcattgtcctctactaacaataaagtataacctttcatctggtctgtttctgttgatgtttcctcatccaatacttctatattttgctccactaccttctctatttgctgccttacttcctctttattcaaaggaatgatcaaaacaaatgtattctccggttgttctatatccaaataaagcctgcctttatgtaaagtggctagcgaacgagctaaaggtaatcctatgcctactcccatccgaactgtatccttcttctccatctgataaaagggttcaaaaatctgttggctggacgcttcaggtatcttttctccgtcactgacaatacgaactgtaaaatcagcttcatcttggaataaatctatcgtaatggtatgacgggcatatttcaaagcattattcaacaaattactcaatacttttgtgatagcctcgttatctatggcagccataattctttcttggggaatatgctgcaataactctttctgcttttgcagaatagtaggctcaaaacgagcaatcgtttcattcagcaatgccgttacatcaaccgtttcaaatttcagttcaaatttgctcgcccctattttctgaaaatcaagcaactgtccagtcaaatctaataatctcttggtattctgcccgattactttcaaattcttattcaatttctgatccttgatatccatttcctcaattgcttccaacggaccatttatcaatgtcaagggcgtgcgcacctcatgagctatttcagtaaagaaactgacttttgattcatagagttctttctccttctcaatttcaaataacttctgcttttcttccatctgtttctcttcgcgtcttctataccaaaagaaccagcaaagtacgacacagattccccatataatatacagaaaataagcccagacggactgccaccaaggaggcagaataacaatggataaagaccgggtagcataagggccttctttggcactattggtagcccgcacttgcaagatataatctcccggaggcagtttagcgtaagaaatattctgattactcgctgcccgtatccagtctttgtccaacggaactaatttataataatactgattggactccgtagtagaataacttaataaagcaacatcgaaactaatatttgcctgatcataaggtaatataatttcatctgtatgttctatacactttttcaaaggagaattaggagtgtgaactgttatttcctgattataaatgctgaactttgaaatataaacaggtggtaagaaatttattttctctgaagagttaggatcaaatgcaatcaatccgtctataccaccaaaataaaacttaccgtcctcacccttcaaagctgacttataattaaactgattccctaatagaccatctttagtggtatacacccgtatatcttttgattccggattaaatctaaccagtccacgatttgttccaaaccataaatttgattgttcatcttccaagatcttataagccacatcatctggtaaaccgtctttgatagaaaaagtagtaaaatcatccgtttgagaattataacaacaaataccaccacgatccgtagaaatccaaatacggcctttacaatcctgcatgacagaactcacagaattagagctcaatgtattttccttaccttcctcatgagtatactttttaaaaagattcttatggggatcatacttccataacccacttcccatggaggcgaaccacatcattccatctttatcttgaaatacatcaaaaatccaatcaaatcccacttcttccactttgtcaaaatgaaaacttgtaggagcagctttataaagtccccagcctgtaccaatccacttatatccttcattatctataaaaaaagtataaacacttccttctcctatatttaactcctcaggagtataatgacaaactttattctcgggtaattgaatcacatccaatccttgcttaaacaagccacagaacaattggcttcctttgacaaacattcccaaagtaaccatatagttccctttatcataatcgttcaatctcaaccgccttacctttccggaagcaatatttaatatgttcaccccatcatcttcagtgccaatccatatgttacccttattatcagaagctatctctcttacccgtttcgttgttaatgagttcccatcactcccaggtacatatttatcaaacaataaatcatgatgaggcagataatccaccccgccaaacatggttcccagccaaattcccccttcccgatctcggtaaatagtataaataatcttatctgacaaactgaacggacgcatcagatcttgcttcaaatgaactattttattcttcctctcatttacaacaaacaaaccttcgtgagttcccacccatagttcattgtcaaaacaggctacattacgtacaaatgtatggttagcctccggtatatctatttttaccagctgattcgtaccgggattatatttcattagttccccttcatgaatagccattgcaatccaatcaccataattacaaataaaattaatattctttccctttaacgaacgcccggttttatcaacacaatattgttcaaatttatccgtatttctatcatatcgaaaaagtccgactccccatgtaccaacccaaacatcaccatcagggcgtaccaaaatacaatccggagcttctgttttaaaatgctctttgttggttacttcataaaaataaagcttctcatccttatagcgaaaaactccctgatcaggaattacaatccaaatattcccaatagaatccgccacaatattagatacccaattattcatattcaccccttcttctgtttccatattcattgccgtgaatatatccaaggcaggattataacgatagactcctctatccgttcctacccataactgacgttccttatcttcaaacaaagcagaaatattatggtttcccgtaccggctacatagtcatcacagttcatctgtacaatagaagttccatcaaaacggttcaaaccattttttgtaccaaaccacataaacccgtaactatcctgaatgatagccttcacattactttgtgatagtccattctcacccgttatatgagaaaaataaaaattggacaatcccctatcaactgcctgtaatgtaaatacaacatacaaacaacataaaatgagcaaagtctttttcatagcttgttcaaaatttgagtcaaagataaaagaaaaaaaggataaataatgccaatataaaagaaatagagggttgcccctctatttcttttcacgaatgactattacaaatcccccaccagaagccataaacatttcaataatattcttattatctatatccattattttatgttcgtataaattagcattcttgttacttctttttttatcctgaaaaatttcaatggtatatttcttatcctgaggcaggaaagagcaatccacctgaattgttctctctccccaagcattcaatccgcctatataccaagtatttcctttttgcttggccaacacggcatattcgcccacacgggcagctaagggaatcgtctgatcccatgaagtcggtacttccgctaaatactttaaaatatcaggatacttacgatactcatccggagaatcacataaactggcaaatggtgcggaaagtacaacaaacaaggccaattcatgtgaacgagtccccaatgaactaggcaaccccggatcgatcggcttaaatttctccaatgtgctgttacgcatcgaacccggagtataatcaattccacctcccagcatacgggcaaagatacattgaagctgataatccggattagaagtggtatcccacttaaaacattccgcacatcgcatggcttcataagaaaggatattaggatatgcccgatgaagtccggtaggcttgctgcatccatgaaaatccaccataagatgccgctcagcacaagcctttgccagattttcatattgagggattatttgggcatcatcacgatcaaaaaaatctatttttaccccaacagcaccccatttgctgatagaatccaaataacaatgcggatgttggaataaagtagcagcaacagtccaaagccatacacctacttttttttcttttccatagcgtatcacctcttttatatcaatattcttattcaaatcagcatgattaaaaacattgctccaaccggcatcgaccagcagataaggtatcttgttttcggaagcgaaatcaatataatacttgtacatctgcgtcgaaaggttttgatgaccggaagggaaaggagctttttccaaaatagcacaatgccaccattcccaagttgctttaccaggacgaatccaatccgtatcctttatttgttggggcttggccagtaagtaaatcatttcattagtcagtagttccttatcatccttggctacaatagctatacgccaagggaaagcatgattaccagcagtacgtgctaaataattctccctctctttaactaccgtaataaaatttccccaactgcccatctctatttttttaggataggccgcccaataacctttcatcttgccatcttccttacgaagatacatacccggatagttattcaaatctgattcagccaccacaacacgcacattctgcatcttgtttgtaaataaagttggtgtaataccatatttatgttcttctattttagaaatgccctcgtaaagcacattgctcaactcccaagctgtaaaattagttgtttcgggtaaaataactgccggatcatcgcccagattaaaagaagcttcttcatcagctacaatcaaagaatcctgctccggaagatttccacaaaaacgatatgccattccttcattatacatccggaatataactgaataaccatccttgaatttcaaagaaagttcattataatggtctgttaattcacgatagttaccagctaccggataaaccttctcggaagtactccttgtagaagctcctaccacttcaccattctttccccatatatttccattttccatcgtcatacaaatagcagagggatgaatgacaggcttaccttccaaacttaaagaatattgtaatacccttccattctctacagtaagtgccaattgcccgtttggggatgataattcataagctgacggtgtttgtgcctgtgcaaaaacacacagacaccatgttaccaacaaaaggaaaatattcttttttttcatacggcacacaagttacgatggatttgtccaccttgatgattaatatccaattctcgcaccttatccaaaaaatcaatggcttttcccatttcacgcaatcctaaacaacccagtcccatcacataattgcaatgaatgcggttacgtttatccaagtcatcttcccaaatagccaaatcaggcagagaaacagcaaaataatcaatccggcagtggtcaaataaatgcttttcaccatgctttatcaatttgttaaagcaaccgcacgccttgtcttccctgcccaatgcacgccatgccaaaccttgatagaaaatcttgtcgggctgttggtcattgtaaaagaaagcctgttgtggttctgacgagccaatggttgctttgatgaagcaatctatagcttgttgctcatttcccaatccacgaagcgcctcacctttataataccagatatcattctcttcagcatttgccaattttccctcacccaaattaaatggataaacattcgtttcatccaaaaggactaaagcatcggcataacgtttttcacttaaagcaatctttgctaattctatacggcacaatacatattgtccggtgatttttccttctcctccttcccatggatggaaattacgtgcggcaatcaattcttttgcttcagtatagcgccctagttgattatacaaagtgatacgctcaatggacagatcatcacgctgttccacttcagacagatgtgcttccaaaaaagccaaacgttctgtatgaggtcggcctaaacgtttataaagttggtccaactccattaatatacgagaatcgtgctcatccaatgcataagctttttccagagtttccaaagccctttgtttatcattacgcttattataataagctaaagataaattacgccatacggtagggaatgttggctctatagcagccgaatgttcccaacaagcaatagcattatcatactgacggttagcataccaaaagtttcctaaactatatgccgcttttgctccatgaatattcaaacgtacggcatcttgaagaatcaatacttcttctatacgattcgggaaacaatatgaatgattttccttttctgctcgctgataatattccaatgctttactctcatctcccttacaggtatggaaataccccattgtataataaacgacaggatatacttctgtaactccggttacgtagcattccaacaaagaaagagcttcctcgtacagtccggcagcagcaaaatccaatgcatattctatatatccgtgagcccagccacgcatcaactttttcatttcctccaacacttccacatcccgggtcaacaaataatgttcaaaacggcatcccatattaaaacgatctatctgcaatgattcggctacgagcgccaaagcttcctctttacgacccaatttgcgtagaatggaaattttcaactgacgcgctttgtgattatgccaattacgaatcaatgaacggtctatcttgtccaaagcactttcatactttcctttacgagtgtcaagttgtgctagtgcataataagccgcatcctgccaagcagcattccatgccgacttaaagaaagcatcataagcctcatcccatttctgttgcatcatacaactccaaccccaattataataaggttcaccgtcataaggattcggattacgttcagtcaaggtttccaccgctttccggaaatagctctccgccattgcaaattgtcctttacgcatcaacaataaccctaccgcattgttacaacgtacatctcccggttcacgtcttaatgcttccatataataatccatcggattataagtagcatggcgatattgttccaaatgtagtccggtcaaaaacagttgttcgacagaagcaatatcttgaggatctttagcagctttagcaggatcaggaaccggcttgatttccggcttatccgcttgataagaaagcaaaatttgtccttccttatcacgaacctctacacatacctcctcttcttttagtccttctgccgcaaaagtcgtaataaacggttctgatggcgaaatttgtgtagtcttatccaataaaacagtgcctttaatagcttttactataatacgtactccactattcactcccgtagtataaagcaccaaacgggctttaccttcctttatttccaaattcagcaaagcatctttagttgcattctttacataacccacttcactataaggcataaaatactgtacccatgatttttcctcatagggctgtaaccaagtaaagtccggttggttatccgtatacataccggtcatcagctcaatgtaaggtccatcctcatcggtcagattgcgatcccacgccttaccgaaatcaccattcccccatgtccattgtttctttcccggagaaacatgatgatcggccacatgcagcagaccgccatgggcatcttcttcataaccacctacaaaatcatatttagacttgatagccatatatgatgtaggaaccggaatatttttatatttagagatatccaccccagcagaataatcctgtttataataaactcctgtagcaataggaaaagaagaaacatcgcgcttgccatgatcgaacaccgcattcacatcaggtggaaataccgaatgataatggtcattgactactactgcaggattggcccaccacaaaaaagtctgagggaaagacgtacgattataaatcttcacttttatttctatataagctttgcccggataaagcgtaaatccctgcatacctttggtgcggaacattctctccacttcattgcaccatactgtcttactgccatccgcattttcctctatcaaaaaatcagtaggcaaaaaagtagaaggacggtgatgctgaggccagttaaattcgatgcctccagaaatccaaggtcctgtcaatcccaccaatgccggtttcactacttgattgtaataaacaaaatgacgtcttttcaccttatcataagccatgtgtatacgaccacccagctcgggaagtatcatcaccttgatgtattcattctcgataaataatgcatgatacctcttgtctacttttttatctgaaatcttctctaccaccggataaggatagactgatccgcaacttccctgataaacccttttttcaagaaaaataggattcttctcttcctttcctatctcataagtaggaagcatgatatcttcctcccatgcacgcacctcactgccatgaacggtactttgaattaaatattgagttattttctccataataaatattgttatttcactaattctttttcaatttcttccaagctcttccctttggtttccggcaaacggaacacaacaaatattcctccagccaggcaaatcaatccatacaaccagaatgttccggcagctcccaaaccactattcagcattgggaaagtataggtaagtataaaacaagccgcccacaaagcgaaagtgcaaacagacatagcaactccacgaatacgattcgggaaaatctctgagataatgacccacatcactgtagccaaagtcatggcataacaagcaatggccatcacgacaataatcaatagaacaactcctgtgatatgaaaataataagcggctcccataaaggtataaattactgccaagccaaatgatccgatcaatgtcaatgccttacgtccccagcggtctaccacaaacatagctagaatagtaaatatgacattcgtaataccggtcaccacaatattcatcaaaacatcagacacgccataacctgctgccataaatatttcctgtgcatagttaaaaataacattaatgccacaccattgctgcaaaatagccataacaacacctatagtcaacactttatacatagcaggatttaataattgacggtagcctccttcttgcgtctggcaggctgaagcagcttctatagcagccaactcagtaacagcatattcctttcctcccatacgagtaaaaaccttgagtgccgcctcccgttttcccgaagaggctaaccaacgaggactttccggtaatataaaactaaaaacaaagaacaaggcggccgggacagtcattgcccaaaacatccagcgccatcccatctgtccgttccatgattcacggatcatttcatgagtagctcctaatgccacaggctcagctatctgccaatttacaatctgagaagtcaagatacctaatactaccgtcaactgattgatggacacaaaccgtccacgcagatgcgccggagcaatttctgctatatacataggtgacaaactagaagcaatccctatagcaaagccccctaccaaacgaaatacattaaagaaagtaaaagaatgaacagcccctgtaccgacagccgtacagataaacagtcctgccgccaaaatcaaaatcggcttacgtcccaaacggtcactcagcttaccggcacttagtgccccaaacaaacagccaatcaaggcactgctcattgcccacccctgcatgacaggatcatttgctataccaaagtattgttcataaaaaggttttgctcctccgattaccacccagtcatatccaaacaggaaacctcccatagcagaaatcaaagcgataagaaatagataaaaattagattgtgttttcatgaatatcatatattagttagttttataatgcaaagtaacaaggattcaaggacttaaagaatagaaaaaattactgagaacatggacaatattactatttcatcactttgcaggttgtcttatcataaaacgaggactacacctcaatatactaagatgtaatcctcaatcaagctatgcaaagtagcctgtttttttacaataactccagcaaatctccacgtttcatatccaccgttattaaaccctttgcatcaggatttgcaattgcctccttaccatttaaaagcactctatattttttcccttgaggaattttcacttttaaaacctgatcagcagtagcttttaaagaagctttattgatgacagcattcgtccattcagcagttgcttcagctcctccctttaaacacagacctttaaaactaccatctttccattcaacaggcaaacagggtaagaattctacataaccctcatgattctgtatgagcatttctgccataccagctgtaccggcgggattcccatcaaacgaataaatatcaccttccgcaccagcaatgccaccaggagatacagtcattaaattttcacgtgaaagcttgccctgtaacaattggacactcttatatgcttcctgcgcatctttcaaccgagcatacatacaaatcatattggcacggctccattctgtatcttcccagttttcggcagacaaacgattctcgatagtcttacgggcagcttccgccaattcgggagtcttctccaaagtgatctgggaaaaaggatacaaagctagcagatgggaagtatgacgatgattgggatgcgcttcttcaaaatcttcaaaccactcacggatagcaccattggcacgtaactggataggaggaagctgagcgatagcggtacgcaggctatcggcaaactcacggtctgtatctaatatttctgaagcccggacacaattcgacaagatctcgtaggccagttcacggtcacaggcaggcatcatggaagcaaccatttcttcaccacctgctgtacggaaccagttttcgggtgagatgctcggtcctgtcatcagataaccactcttcgggtcttttgccaagaaatccaaaatgaactgtgcattacctttcaaaagcggataggcagtttcggccaggtattgcttatcttgtgtaaattcgtattgtgtccaaagatgagaagcaatccatgagcctgccataggaaacagtccccaaataatcgtgctggatgcgggagtatatccccatacattagcggtggtatgggcagtccagcctttacatccgtagaccacttcagcagtcttcgcaccgtgatgagctaaatcctttatataggtaaagaggggggcattacattcggcaagattaccgacattggctgcccaataattctgttcagtattgatatccaaatgataatcattcgtccaccccatattacaagccttgttatcattaaagaaaccttgcaaagctatgggcaggggagagttctcgcgcgaactggcaatggtaagataacgaccatactggaagaacaaggcatccagtccggtatcggtcttgccttccttcacttgtttccaacggacatccgtaggcatcgcccggttagcgtcttgcccgaaatggatagaaacacgattgtacaacgtattataatcctttatatgcgcctgcttcaattcatcataagatttagctgcagccttctccacaccgtcagcacaaagagtcttgtaatcaggacttttataatcagtacgcacatcgacaatcaaagtcacggcatcagcttctttgatacttaccccagactgttccatctttacctctccgttatcggccaaaacggctattcttccttcaaaacagactccgcccggaccatgcaaaggaaaatctacttttccggtaaacaccaattggttattttctacagaaagatcagcttgacgcatcaaatccaatcccatgttcatagtaatggacttttgcttatcagcggtcaagcggagtacgagaacattatccgggtttgtagcaaaatactcacgtttatagttcacaccaccggagttgaaagaaacgctgctgacagcctcatccaagcttaacgaacggcggtagtcggtcactttaccttcggggtaaatgaattgcatcttcaaatctccaatgggaagatgagttccgaaagaagtctggttgccatgaagattatctccggctatacggtttccttccgatagttttccctcaaaaaacaactttctgagctggttcattttctcccgtccgaaaggtttgttctggttctcattgtactggccggaccacattgtcgattcattcaatgccagtttctcttcctctattccaccataagtcatagctcccaaacgcccattaccgataggtaaagattccatccaaacttttgccggttgggcataccacaattctgtagtttcacaggaatcagttgcactctggcatccggaaagggccaaagccattgctgctaaataagtcttaaaatgtttcatatttttcatgattaatagtttcttctgaaacaaaagtagatatacctctcccattaggtagagaaaaactcgccatttttagactcttttgcttcaatcgtaacctataaaagggagttattcaacatttagaaatctttcccggcacaaattccaacacttcaccatttgttatcattttcccggtgaggcagtcataacaaactccaatattccgcccttcatgatatcctgatgagtaatataattcttcgtatatttttcaccattcagtttcatggaacagatataaacctcattgtcctccttacgcggagcttttaccgtaaaagtctttctaccgggtaactgaatgacagcttcttccaacataggagtaccaataacgtactccccacttaccggatttaccggataaaagccaagtgctccaaacacataccaagcagacatctctccacaatcatcatttccggcataacctgaagaagaatcgttatacagttcattcatgatatacgccacgtatttctgtgttttccaaggttcccccgcacaagcatacagataagccacatgatgactcggttcattaccatgcgcatactgtcctacaaaaccggaagcattgtcattcaatgcaccactttggtagctaaccgtaaagaatgtatccaactttgcgacaaaggctttgttcccccctgtcagtgaaatcaaatcggggatattctggggtacataccaaaagtattgccaagcattcccttcagtaaaaggataacctccattcgccccatacttataagggtcaaatggctcaatccactcacccttatcattcttaggctggaagaacccggttttagaattgaacaaattccgatagaaagcagatcgtttcataaaatgattataatccttttcttttcccaatcgcttagccaactgtgcgacacaccaatcatcaaaagcctgctccaaagtaatagaaacagattgtgtctgaatattctccggcatatatccatatttctcccatacttcaaaaggagagttcggatgagacacgatagaactattaaaaaccgcttcataggctttctcttcatccaccccggcaacacccttcagaacagcatccacaatgacaggaatggagtggttgccaatcatacaataattatcctgtccccataattgccatacaggcaaatagccataataatcgtattgcctcatcatgctcttaacaaaatcgggaatgcggtgcgtgtgtatcaaagtataaagtggatgggcggccctgaaagtatcccataaagaaaaagtagaataatgcacctccccttttgccacagaacgagtgacgtaatcggatgccatatattcaccattaacatcactcatcgtattgggttgtaccatagtgtgatataaagccgtataaaaaatctttttctgcaaatcggtaccttgaatgataatcttcttcaattctttctcccaactagtttcggcagcacgagcaatatattcaaagtcccatccggggacctcagttgccatattcaaccgggcattttcaatggaaaccggagataaagcgactttacatatcaattctttattccacttcttatcgaagcaaaacaatccacgcagttccgtaccattaatgacaggagtattctcatacatccgattgccatcatataactgattggataggatcggttgggaaaattcaagatgaaaataaatctttctcagctttgcccatcccgtaataatacgatatccctctactacggtaggagaaaccatgcggagttgtgattgaataatccggcggttccaactccccttatttgccgagtggtccaaatccaaccataatttcaactggtcaccatcagaacaggtatagcgatgcactcctacgtgtacagaagccgtcaactccgcttgaatcttctcatctttcaataatacctgataatagcccggacgcgcctgttcgtgttgatgagtgaaagtcgatttccttttatcactgatggtagggaatagaagtatatctataaaatcagaagcaccggttccgcttaaacgcgtatgactgaaaccataaataatagaatcattataatcatatcctgaagcttgcgcccaatcaggagcttcacgagtgtcgggactcaactgcaccataccaaaaggaacagtagctcccggataattattcccagaaagactagattgaacagcaccggttccaataaacggattaacccaacgagtaagattctgggcgctaatacaatttacagaaagaataaaagcagccaataaattaacaagtcttttcatcatagatttaagtttcatttattggcaaaattagtatatccacgctccccaaacagataaattttcgtctattttagcttcatttgcttcataaagtccggtttcttagcctcatcaccacaaaatattacaattatcccgttttattccaattcatttaccgccaacaaggactactctaacattttccaaataaaacttataaattcaggaatgttaccccaattatcatatttttttcacctatttttctatatttgtgcattattccatcacacaaacgtaaagacaaatggaccaaaccttgctaaaatactggaaagcctgccttcaagatgcagaacgcaaagccattgctcccaaaggagcacgaatcaccttaaacatcggtgataaaatacttaaattcgttcctctcaaaagtattcctgttattttccctgattggaaagcagaagatagcaatgaaaaacaaaaagtaatgattgctccttgtattcttttgcccgaatttgaaaacggctggacttcccaatcagaaagaccggaatatccctttttgattactgccaccatgttgcctgacggtaaactaaccgtatgcgagaacgaatcagacagaattccaatctttattcgtaaatttttggaacccaatgcagccaatgaccgcaccataacctctcttccaaaagtagaccgactactatccgatttcaatacagaaattacagaatgggaaacctattggcgagcatgcgaacagcttttcaaaaaagcaaccggcaaaactttcagaacgatgaattaccatgataatccagaaatcattatcataaaagcctccgaacgtaatatggcacagcccataatcacactatatgacaagctcttaaaagataacgataccactccgcatcctttgttgaatttattgatacagaccaaaccaaccaacgttcttcccagtccaaccacccgaaaagtttattgcaaccgagaacattgggcacaaatgagtggcgacttccctttgtctgtatctcaacgcgaaacactggcaatgtatactacaccggaatgtactgatatttttgtcgtcaacggccctccgggaacaggaaaaaccactttcctgcaaacagtcatagcaaacagacttgcccataatatcctaaacaatccggaagaaccggaaattatagttgcaagttcagctaataatcaggcgatcaccaatatcctgaaagatttcaaagcggaaacaactaatgacacggcacatccccggttatccaaccgctggctacccgaactagatacgttaggcttatatctgtcaggaaaaaaagaactacaagaacaatacaaaatgatgttcaaccccatgggggatggatttccagcaacatacgatactcccgaacgtcaagaggaatacaaaaacttttatctacaatgtttcaataacttttttggaaaagcctatcaagatgaaacaaaatgccaacaattcctccgtaaggaaatgcaagctctccaaaaaaagattatcttctgtatccaagctgccgaaacaacagaatatggaaaccggaaggaaaacaatatattacagaagtttatccgcaaattccatgagccattaccctcctatgacaaagtaatagaacagtgggctttgacagaagaattcaaagaacgttacgaaaagatcagttccaaccctgagtatggcaacttgccttatacagaagacatggcagtaagactggatatcagttatcggtatcaaatgttctggtatgccatacattatcgggaagccgagtttattcaccggttaagcaagtgcgatgaaggtaaacagcgtacacaggaagcctatacccaaagactaaaacgtctggcttgtgtaatgcctgttttcatctctactttccactccctacccaagtatatgacctatgcggagaacggaaaatgggatgttcccttatacaatggaatagacctgctgattgtagacgaatccggacaagtttcacccgaacttgccgttccctccttcagtttggccaaacaagcgattttagtaggcgatattcaacaaatagaacccgtatggtccatttctgatgaatattcattcattaatttaaagaatctgggcattgtttccaaccagtcctcggaaaaataccgtttcttggagaacaacggtttcctttcttcttccggaagtataatgaaactggcacgtaaaagctgtaattttacagtaaaaggtgaaaaaggagcttttctgaccgaacacagacgatgcgtagattccattattgcttattgcaatgattatgtttaccacggcaggttacttcctaaaaaaggtaacgaagtaaaatacaagtccctcccctctaaaggatatgtacacatcaacagttacagcagccccggaaaaacaggaagccgcctcaaccgggctgaagcggaagccattgtctgttggctggagctggagaaagataatttggaaaagacctataaaaagcctattcatgaaattgtagccgtagtaactcctttcaaagcccaagaggccgaaatacggcatcaaatacaaaaaatatcaggaaatgagaaatataaagagatgatcatcggcacagtacattccctgcaaggtgcccaatgtccgattgttcttttttcaacagtcaactctcctgaagaccattctctttttatggagcgtgatggaaaatacaatatgctcaatgtagcgatatcacgcgcccagcatcatttcattgtttttggcaacatgaatattttccatccggaagaaaatactccggcagggaatatggctaaatggcttttcgatgctccatccaacgagatttccaacaactttatttaccaacaggaaatcccactgtgcacctaccaccccacccttcgtctgtccaccacagaagagcatgttcagactcttcgtcaggcttttgagaaagcaagacgccgcctgctgattgtatctccattcatatctatccatgccatagaaaacgaccagctgattccgttgatacggcatacggtacaacgaggagttgatgtcacaatctacaccgattcgtccctagattatgatatgaaaaataaacatttactcagtcatgccaaggatggacggaacgcattgatagaaagtggtgtaaccctcattgaagtaaaaggtatccacaataaatcgttggctattgataaccatacattaatcgaaggctctttcaactggttgtctgccaatcgccacaaagaatactctcgccacgaatgttccatcattgtatcatcttttcaagccgatgaatacatcaacaatctaataaaagaactagaaagcagagagaaaacctttcaatccctatctaagactataatcaatcttggcattgaccaaaaacatccggggttctttacaaaagaatcttttaatgattgtacagaagaagatatttgccgtataaaacaaaaagtccaaaagttaggtattcagaaaacagtccttccaccttatatccgtaagcaacgtgaaactttcccacgtgcttatgaaccttggtgcacagaagaaaaggaaattatatgtgagttgatgcagaaaaccaatcatctttctatttttatagaatgtctgcaacgtacaggacaagctattcaaattcagatagaaggcaaaaacaattgattataatcctgaactgatatcctttttatgatattcgggaaacttgggaaacaagaatcagtccctatacagaagagaggaaaaggcaaaaagtaatttgccttttcctctcttctgtatagcatatgcaactcctgtcagagttcctcattttttggaacacatccaggtccatttatgccaaatactctctaacggtccctgcttgtgtcctttcaaccaccacttgcagaactgtacttgcaacaaaaagagtacaaaaccaataaacaagctcaacgtatacccacaatacggagccagataaagtccgaagggaaaataaataatagctccggcaatagactgggtgatataattagtcagactcatcttaccataataacgaagatttgatacaaaatccttgaatctgttccgttgataaagcaacacaaaagaggcaaccagcacaaatgtaaaagcaaacttctgccacatatcaaaagccgttccggcagtctggcgaatgagctcactgtcactagccataatcagctctttcagttggaaaagcggagcaaaagcgatagcggaaatgataagagccttcacccaaaaacgagtatgtttttcggaagttacaaataattgtttgcgtccgatatacaaccccatcaagaacaagccggcagtctgccagaaacgtcctgctccaaaagcccaatataaactggctttctgaccaaaggtcatattcttacccaaaaactcccacaagttcccctctttggtatattccgccacttctttatacatcgcgcccactccccaatcgggcaaagtatgagaaggatcaaacagacctactatataatgataccactcaacgggctgcaatagaaacaaaatagctgtaacaagtatggcacagtcactccacttacgcaccacgaacaatacgattcccactactgagaacagcaacaacacatctcctgccggaaaaaaagctgcattcagcgtagcaaaagctaccaataacagcaaacgccacagaaaacgataaccaaaatcttttcctttacgctgttggttagccgactgaatataaaatgtaaatccaaacagcaaagcaaaaatggcatacgattttccagccaataaagtaaatgtaacattgaataccccgtcattcagtatattcagccatgcaggctggtctaccggataaactggaaagatgaaatgttccaaactatgcactaaaagaattgccatgactgcaaatccccgtaaagcatccaccacctcaacgcgtggcagtttttctgataattgtttttccatgaactagttattattgtttgtttaaaattcgttttacccagcggttagccggtttctcaaaataataataagaaagcaggctcagcccgatagtgactgcaaagataagcggaatactgatatacagactgatatgccaatcgtatgtttgcgccaactgcacataagcaaacagtatccacaaatgaatcagataaaagctataactgatatcaccgcctatgaccagatatttattggatagaatacgggaaaggaatcctttctgcaaagagaatatcaacagaaccaacgaaatcggcatccaataataacaggagtaccgataaactttcggcaccaaatccgccgaaaacatataaaacagcaggaagatacataccgcccctacttcgagcaatgacgctgtagagaaagacagctttttggaacggcaccattcataaacccgataaagcaacattcctaccagaaaatcggggaaacgtgccaacggattcacataccaataaccacggatgttcgcctcatccgtcattgacatcaaaacagggactaccacagcgcatactaaaagtgctcctatcaacttctgttttttagcaaaaaacaacgctaaaaacggaaacaagaaataaaacaactgttcacatcccaaactccaggaaggactgtcgaaataaaaaaagtaatccatccggggaacaaaagggtgcaaaaggaacagcgcaggaataaaatgtttcaatccttccccccaacccatcgggttcaatagattacctatcacggctactcccaataaggtcgctatatgcaatggatagatacgggcgattcgtgccacccaaaactggcgtttcgacactttccgctccaccagcttctgctgataattataagcgataataaaaccactcaatataaagaagaaactcacgcctacaaaaccctctttatagaaatgagttgaaaaggtggaatcaacgacatagcaatgtgccccgaaaaccatcagtgcaaaaaagagccgtaaggaagttaatgtattaatcatagtagcattcttttctcaattgaatgtaaaggtacatttcttttccgaactatttattcacatagaacggaaaaacagattggaccgcattattcaccaataaataaaaatatcatccaataaccttatatcacgaacgggcttatatcacgcaacaaaatcatatctttcacagaagcgacgtattgtttttctgactcgacagtgggcaagttgtacaattcggacaaaccgcctttctgtaaataggtcaaataagaagcccggccggcaagttgctgcatcaactgtaaatattcaacataactatagggcaatatatgaaattccacataacgtccccacaaaattgccaatcttgtcggtataagctttccatttatcgtccatactcgaatcttttcccacaaagatagttttttttcgagtataatcggaaaaacatatctatctcaaactgaattaaagaaaacgaatacaatccggcagtatgtaaaatttaacaaattacttaaacaagcaaactattattttcctacatttgttaccagtgaaactttaaatacgaaagaacatgaaagcaaatcctgtatttagtttgtacatccctaccaaattagtatttggttgcggagaaatcaagaaattatccagtgaaaaattaccggggaaaaaggcactagtcgtcatctcatccggaacttccatgcggaaatatgggtatctggaaagagtactcgcccaattaagactgaataatgtagaaacactggtttacgataaaatccttcccaaccccatcaaagaacacgtcatggaagcagccgccatctgccgggaagaaaaatgtgactttgtagtaggcctgggaggcggaagttccatcgactccgccaaaagtatagctgttatggcctgcaacgacggtgactactgggattatgtatcagggggtagtggcaaaggacgccccgtaaccaaagcacttcccattatcgccatccctaccaccgccggaaccggaacggaaatggatccatggacagtgattacccacgaaacggctcaagaaaagataggcttcggttgccagctgaccttccctaccttatctattgtagacccggaactgatggtttccattcccccgcacctcaccgcctatcaagggttcgatgcattcttccatgccgcagaaggttttatcgccaattgtgcaacacccatcagtgatctttatgccttagaagccattcgtttgatctacaaatatctgccagtagctgtagccgacggaaagaatttgaaagcgcgtgccaaaattgcttgggccagcaccttggcaggcatggtggaggccacttccagttgtacttctgaacattcattagaacatgccatgagtgcttattatccacaacttcctcatggagcaggcctcattgccttgtctgagacatacttcgaaactttccggcatgactgtacaaaacgttacatgaaaatggctgaaatgatgacccagaaaaagagcaaccgtccgtccgatttcattgatgcattgattacactgcaaaaagaatgtaaagtacattctatcaaactgagcgagtttggcatccaatccgaagatttccccaaatttctgcaaaatgcaagagatacgatgggaggactgttcactctcgacccacgcccgattacagacgaagaaatcctgcatatctttaaaaagtcttataaataatggataaagaactagaccttgccgtaacctgttacggcaaggtaaaaccattgaaatatgatttggtcctcctcccttggggggctaccgaaccgcataatctgcacctgccttatctgacagactgtattctgagccacgacatcgcactagatgctgctaaaatggcaaaaacacattacggtattcgttgcatggtcctgccttacgtcactgccggttcacagaatccgggacaacgtgaactggatttctgcatccactatcgctatgaaacgcagaaagcgattttaagcgacatagttgcctctctatacgcccagggataccgcaaaatggtcattatcaacggacatggcggcaatacattcaaaagtatgatacgtgacttgtcactggactatcccgacttcctgatagccagcagcgaatggtttgcctttgttcctgctaaagagtactttgatgaaccgggtgaccatgcagatgaattggaaacttctgttatgatgcattatcatccggaattggtaaatttagacgaagccggaaacggagattataagaagttcacctcacaaatgttgaatgaaaaagtggcatggattccgaggaactggcaaaaagtttcgcaagacaccggtataggcaatcctaaaaaagcaagtgccggaaaagggaagaaatacgccgaagcagtcgttgcaaaatatgcattgctgtttgaagagttggtacataaagaactttattaatagttttagaactaaataggtttattttcttcataataaaaagcataaatttagcacatcatataagtcacattcaattatatcactgcatataaaccagttacccaacaatatattctgaaaaatattccaaaatatatttgatataataaaattctaatgtacatttgtgaagttaactatatactaacctttaaaagcagatcttatgaaaaacaaatcactttttttagtcctagtcattctttgtttgactagcgtagagatctattcttcccgacaagaattaaagtttgatgcacctcttccgagcaacacagaaaacggaaatgctcgcagtgattacggacctcccggtgaaggagataaatgctggtatttcgatggagcgtcttcttgtgtaaatttttcattcaataattgttatgaagacccaaaccaaaggtgcggaagagatgaaggagctcccaattaatttaaccgactagcaaatcattccatagggtatttaagatctttcctattcataattagttgatccaatctacaaactgaagataattaaataccctatatttaatctatagtgtatgaaatattttttgtatatcttcacttatctgcttctaggagcatcgtgttcatctccttctcgtccaatagactatggtacagaattaacagctacagactccatctgcctgtctatagatgaacatacacattatgaaagcaaatctatattccaatttgaagaaaacggacatgagtatctttcctttttgaatgaaaaagcaagctataaagttcatatctatgatttggataccaaacaagttattaaaacaattcatctacaaaaagaggggagaaatgcaatgccatcaactaatggctgttttccacttagctcaaagcattttttaattacaacttggaatggagtttttggaattatcaatgaaaaaggagaagtggaaaataagaatagcttttggaaagacagcgtaaactttcatgctttcgaccacatttgttgcatgagttatacatatcgacctgccataattaaggattctattttatatttcagtcaatcattattaaaatatccccgtaaaaaagatgaatgggataaaatacccatatttgcttatgcagaccttcataaaaaaaaactagggtggacagaactacgatacccatctatttttaacaaagatgagatagactacattctgtatgaccctgaaatcagttacacatatacaggtaaagaagttgttgtttcactgggacaatatgacagcatatttgtatcttctgatttcaaacataaaaaagcgtataatgctaaaagccattatctgccccacgtgcgtccagtctcccaaaatttacaaattgatttattcaaaaccatacatgacagaggattacagccccattaccaccacttgatgtatgataaataccgaaaagtattctatcggtttgccttaatgccggatgataatataaaaccattctccaacaatccgcatcaaagtttctccatcatcattctaaacaaagactatgaaattattggtgaaacaaaatttcccggcaacacctatgcccatcacttgtgcttcgtaggtaaaaaaggcctgtatatttcagagaataatgaaaataatcctcagtttgacgaaaacaaactggtattcaggtgtttcacacttcaaggccggaaaaaatgaagaaaaagaactactcaatcattctatgtggaggactgttcctggcaagctgtatgtccaataatgacaaatgccttcaaaaactgtttgatgaagtcggagttgagaaatcacaaatccacaatgccacccaccttgttaccatattgggtaatggttgcaaaggatgcatacacaaagctctgtcagaaatacataactcgaccgatactatttatataattgcatgtaaaagtaaaaagactttcaatttaattgtcaataaaaatatagatgactactccaatgtatatctagacactaaatccatattagtggaattggatatggctaaaaacacacctagagtctaccttttaaataatggtaaatatgtgtcgcactctttttatggaaatgaatctcccagcgaagaagcgaacaccaccattacattcaacacaaatgagatagatttaggcaaaatcagccgcacggaaaaggcaagaatcaaattcacaatatggaatacagggaagaacatagtaagaatcagtcatatagatctttcatgcgaatgtttgaatattgaaaatgaaattactgaaataaatccgggagacagcacttgtctgaatatcattttccatcccgatgacataggaaagtttcaaagagaaattttattatatggtaattttgactcatctcccaaacttttaaccattacaggagaatgcttttaataaaataatacaatctcgctataaataactttttagctatttatagcgagtataccatccatttctacccttttgacagctcctccaatgttttttcctcgtacctgcaaatggccttcttataatcctcggaaatcaatttcggttctttggtggccagatcataacccaccatcacggttttacactcacacttcacctcatgggtatccgtagtcacggcacgctgcaacaaggtaaaactcttatgccccaaatgtaccacagccgtttctatcaccagatgatccgagaaaaataccggcataaagaagtttgcattgatattggccaccacaatagccagcttactccagtcggcactgccaaatacatcttttatataagtagtctttgccaaatcatacaaagaaaagtaaaccgaattgttcatatgaccaaactggtccacatcgctgaatcgtatctgcaccggcatagtatgcctgaattttatatcctctgccatagttaagcttattaaaatcgttcaaatataacacttttctcaataattgaaccctaaatgacagattattcttaattttgctgcgaaataaatgaatatgtaattttaataacaatataaacatggataagaagtatagcagggagaccttatgcgtacaggcaggctggactccgaaaaaaggcgaaccgcgcgttttgcctatttatcaaagtaccacattcaagtatgacaccagcgaacagatggcgcgtctgttcgatctggaagattcgggatatttctatacacgcttgcaaaaccccaccaatgacgccgtcgccgcaaaaatcgcagcattggaaggtggtgtgggtgctatgctgacctcgtccggccaggctgccaacttctatgccattttcaatatctgtcaggcaggcgaccacttcgtatgctcgtctaccatctacggaggtacattcaacctgttcggcgtcacgctgaaaaaactgggcatcgagtgtaccttcattgacgccaatgcatccgaagaggaaatagaccaagctttccgcccgaataccaaagcgttgttcggcgaaaccatctccaatccgagcatcgatgtgctggacatcgaaaagttcgcacgcatcgcacacaagcacggtgtgcctttgattgtggacaacaccttcgccactcccatcaattgccgcccgtttgaatggggagcggatatcgtcacccattctacaaccaaatacatggacggtcatgccaccagtgtaggaggcgccattgtggacagcggcaactttgactgggaagcccatgcggacaaattccccggtctgacccagcccgacgagtcttatcacggactgacttataccaaagcgttcggcaaaatggcttacatgacgaaagcaaccgcccaactgatgcgtgacctgggctccatccagtctccacagaattccttcttactgaatctgggattggaaaccttgcatctgcgtgttccccgtcattgcgaaaacgcacagaaggtggccgaatggctggaagccaacccaaaagtgaaatgggtgaactattgcggactgaaaagcagcaaatactatgatctggcacagaaatatatgccaaacggctcgtgcggtgtcatcgctttcggcttgaacggaacccgtgaggaagcgatagaatttatggacaggctgaaattcatctgcatcgtaacccatgtggccgacgcacggacctgcgtactgcatcccgccagccatactcaccgccagctcaccgacgaacagttgcgcgaagcgggagtagctccggacttgattcgtctttcagtgggcatcgagaatgtaaacgacatcatagccgacattgagcaagctttacaataagacgaagcggatgaaaaaaatcattatcattggcgccacttccggcatcggactggaagtggcgcgatgctatctgaaagacggctggcaagtaggcgtggcaggacgtagagaagaagaactggaaaaaatccggttatccgcgcccggacaggtatgtactcagacaatagatgtcacccgtgaggacgcccctttctcattggagcaactgattactaaaatgggaggtatggatgtgttct

SEQ ID NO: 14431 - DNA, 90645 bp, Unknown
  gut microbiota DNA sequence
gctatgttaaaacgactaaaatcagtcagtatgttgctgttcctaatgggtgcctctaccggagcagcatacgcggtcgccaatcccggcgttaccgatgtgaaaatcacacaacaaagtggtacatgtacaggagttgtcaaggatgctacgggtgaaactgtcattggtgcatctgtagtagtgaaaggtacgactaatggtactattaccggacttgacggtgacttttctttgtcaaatgtaaaaaaaggagatatcattcagatctcttttgtgggatatcagacacaggaaattaaatggaccggacagcctattgatgtaactttaaaagatgacacgcaacagttaggtgaagttgtggtaacagctttgggattgaagcgtgaagaaaaagctttgggatatgcagttactgaagtgaagggagatgaattaaaagctgccaataccatttctccggtagccgcattgcaaggtaaagtagctggtgttgaaatctcaggctcagatggtggtttatttggtggtaccaagatacagattcgtggagcttcaaccttaagttccaacaaccagcctatctatgtggtggatggagtgattttagataacggtgtatctggtaatacgacagcagactgggatgcaggtgccaacaacgccagcgattatggtaatgagttgaaaaacttaaatcctgatgattttgaaactgtatcagtattgaaaggtgcggcagcaacagcattgtatggttctcgtggtttgaatggtgcggttgtaattactaccaaatccggtaaaggtacgcaaggactgggtattagcgtttctcaaacatttggtattgaccatgctttcaagactccggatattcaaactttatatggtcctggatatatgccgggacaatctgatgccgaccaaaatggaagtatatgggatgcacatcagtttacggtaaatcagaatggagaacatacattagtaggggtacccaactttggttttggacctaaatatgatggctctcaaatccgcaattatgatggtacatggactacctattctccacgtaaaaataatatgctggatttatataaattagggttcaatacaaatacgaatgtttctattcgcggtggtaatgaaaaaacatcattttatacatctttatcttataaaaatgccaaatcaacaacagaaaacaatacttttgagcgttactccatgttgttgaaagctagccataagttgaacgattgggtggacgttgccgcttcttttagctttgccaactcaaaaccgcgtaatgcacaactgaatgcgggtgaattatttgtcaatgcaaataccaatgtgattaacccgctatttgacgtagattatttccggaacaaatatttaggtgagcatggtggtatcgctagtaccagctatggtgaccaatatggttcggttccttccagcgctaaaaattatttcttcaaagtagataattatgattatgtgcggaaggaaactgttattcgtcctacatttgaagtaaatgtaaagatgacagattggctgaaatttaaagcagacgctaatatgaaccgttattatacttcaatagaagataagcaattaggttccggttatgcaaacgaaggagggtattatggtattacgcaagatataaaagaacaatttaccgtagggggaacttttactgccagcaagcagataaaagatttttcactcggtggattcgcacgatttgagtattacaacacctcttccaaacattcaaaagtatcaactgacggaggaatggtggtgcctggagaatggttcgtggagaactcaaaaaagactaaaaagagcgaagcgacaatatcgggtagcaaaagaattatttctaccatttttgctttaaatttaggatggaagaatcaagtctatttggatgttacaggacgtaatgactggtcttctgcattggtatatgccaatcgtacaggtaatcactcatacttctatccttccgtatcaggttcatggttgattaatgaaactttccgtgaaagtatgccttcatggattaacttggcaaaacttcgtgcatcatgggcacaagtaggtaatgatacagacccatatacagtcaatcagacgtattcttttgccacaatggaaatgtatgacggcaatatctataccaatgaattggacaaactgatgaagattgctgaccttaaaccggaacgtaagaattcatgggaaataggtttggatttccgtacttttaataatcgtttgaatttggatttcacttattataaggaaaataccacagaccagattatgaaaatcaatgttcctgctatttccggtgttacccaacagttggtaaatgctggtaatatccaaaactcaggtattgaaatcgcattaaataccactcctatcaaaactaaagactggcagtgggatctggacttcacttatacacgaaacagaagtaaaattgtatccttgcatcctaatgttgccaactatattgaattgtccggttatgtaaacgcatacgactatcatatcggctctgtagcaaaagtcggtgagtcttatggtgtgttgatgtcagatgtcactcaggcacgtaatgaaaacggtgtacctttgttggagtgggatgacagttggagaggcgcatatagagcacaaagcaaaacagcggaagtagtaggtaacatgacaccggattttctgggatctgtagcaacaacattaacttggaaagatttaagtttgaatattggactggatatgcgttttggaggtttggtggcatcttactgtaacttatacggaactcaggccggttggacggaaagctctttgcaataccgtgatccggaacatggaggtatgacttggactagtcaatatgccgattctaaaggtattcaatatactgatggtatgattccggaaggtgtttttaaagaaggaacaattgcgaccttggtggatggaacaaaaatggatgtcagcggtctgtcttacgcacagttggtacaggaaggaaaactggagcccactcatgccggttcatggtatggaaataattatgcatggggagcacagacaattgatgacatttgggtacacaagttgagttatatcgctttgcgtaatattactgtaaattatcgtttgcctaatagcatcagtcataaattgggtgcaaaagggttgaacctatcattcagtgcacgtaatttgggatatctgtataattcattacctaataatctaaatccggaatctgtacgttctaattcagcttcagagttccgtattcgtggtttcgagccttatacagcaagttacatatttacaattaatgccaatttctaattgttaactttaaaagaattatcaacaatgaaatatagaactttagcagccgcactgcttttaggaagtgtaatgttcacttcctgtgtagatgaattttctgaattaaattcagatccgtctactattacaaagcctgatatccgtttcctgttcactaaatgtgaagcttccttccaaccgggagattatgcacaatggtttggaggatttaatgacctttctacctggtcgcaaacaacagtttcatcaggaggtaatacaactcgttcaaatcgtccgactgatgaagccaatggttgtggttatgaagtaaacgaagtgcttcgttatgctaatgagattcgatatcaaatcagcctgttgcctgaagaggaaaaagcgacttatgaatacatccaatatctttgtaatcctttgttggtttacttaagtatccaagatgctgacctatatggatcacgtcaatatacagaagcagaacaagccagatataccaatcctcctttgttattgcctaaatatgacactcaagaggaacttttggaagtatggctgaaagaactggaccagactattaattatctgagcagtaatgaaatcaaagatgttttgaataatcaggactttatttataaaggtgatttgaaaaaatggggcaaactggccaattctttgaaattgaaaattgcagcccgtttgataaacaaagatcggaaccgcgcttttgaaatagtaaaacaggtagcagaaagtcctgttggcttaattgctactacggatgatgattttgtatataacaagggtaagttcgataacaattggaataatgatttttctgtaggagtaggtacgcaacatcttatagactttttagtaaacaacaaagatccgcgtttgctttatttcttccaaaagaatgactacaattctaatgttgtacaggcttattttgatcaaaaaagagaaatgccggattttgtagagaagaatgtaatttctgaggttaaagacggaaagaaagtctttaaagaatggggggggccaggtgaaccttgggtacgttattatggccttcctgtggaaataggtgcagggcagatggacaaatacgaggattattttgatcccacaggacaattgtttgtcttgtactcggcagctggtgccaagaaaagctattatccgtgtacttaccggaatcaagaaatggtaaaaggtctgttgacatatacttatccggatgccccggatgttactccggttcaagacactcaacaatatggttggtatggactgtatttttcggcagcggaaaccaatttcttcttggctgaattcaccctgttgggagccacttggaatggacaaaaaagtgcccaagagtattttacagatggtatcactgcttcagtaaaaggatatgattatgttgccagtcagaatcatataccttattatgacagtccctacgtaaatgatcctcatgatgtatctattaagctgcaagatgaatggctgacagaactgcttaagaaagaggcttatattttaagtggagataaagtttctgatctggagaaagtgtatatccaagaatatctccattattttaatgcaccgattgatcaatatgttaacattatgcgttctggtgttcctatgaaaaatagttcccttttaccgcgtaaggaatttgacgaacaattgggtgattcctatcctattcctagaagatttgctgttacggagcctttggaatcagatcagttacatgacataactatcgctgcatataaagcacaaggttatacatatcaaggtacaaatgcaaagaatccacaggttttgcatgacgaacgtgtatggatggataaagaaaatcctgattttggtaacggaccgaagaactgaaaataaaattaaagaatagcagttccccttgtttttcctgtaagaacaaggggattgttttattttgaccctcaggactatacatagaattattttgcaaatattatttatatgcaagtagagaattgattcttcttgaaaaagataaggaccttttaaaacaatgaaccgatgctattttcatttgtaagatgaaaaactttcccaatcaattattggaagttcttattcttttacggaatataatactcccttatttgtttgtacaaagtagtgatttcggtagaaaatagatagaaaattgtatttaaaagcccttctatagacttttaaatacaatttttctttttgagatacaaaaataaaatacactgatattcagatatatagctgtaagagtagttctgaaggaactaagaagatgtaattatctgattttcaataaatattaaaaaatcacagctatgttaaaacgactaaaatcagtcagtatgttgctgttcctaatgggtgcctctaccggagcagcatacgcggtcgccaatcctggcgttgccggtgtgaaaatcacacaacaaaatggagcttgtacaggagttgtagtagacgctacaggtgaaactgtcattggtgcgtctgttatagtgaaaggtacgactaatggtacgataaccggacttgatggcgacttctctttatccaatgtgaaaaaaggggatatcattcaaatttcatttgtaggttatcaaacagtagagattccttggaatggacaacccatgaatgtaactttacaagatgacacacaaacattgggcgaagttgtagtgactgctcttggtatcaaacgtgagaaaaaagcgctaggttatgccatgcaggaggtaaagggtgacgcgttacttgaagctcgtgaaacgaacctcgcaaatgctttgacaggtaaagtttcaggtgtccagattattcgttcaagcaatggtcctggtggctcttccaaaatccagcttcgtggtgcgaattctgtaacaggtttgaaccagccgttaattgttgtcgatggtgtgccaatggataactttacaggagcaagtaataatgatattgataacccgacattggatatgggtaatggactttcagatattaatgctgaagatattgagtccatgtctgtgttgaaaggtgcgtcagctgctgcactttatggttctcgtgccggtaatggtgttattttgattacaactaaaaaaggaacaaagcgtgaaggtttgggtatcaccatctcaggttcagtttctgctgagacaacatttatgctccctaaacgccaaaagacctttggacaaggtgagaatggtgtgttcgattcaactaacggctatagctggggacctgaagtaacagggcaaagctatacaaaatgggatggtacaactgcaaatatgcaaatctttgataacgtaaaaaatttctttgatacaggtgtgaacttatcagaaagcatatcattccagcagcaatatgataaaacatccatttacacctcattgaatcgtatggatgactccagcatgataccgggcgctaacttaagccgtacaaacttaactttgcgtgcatcttctacttttggtaaagatgatcgttggagcatcgatgcaaaagtacaatacatcaataccctcgcagaaaaccgtcctatcagtggtgcacgtgggaataatgcattttatactattttcaatatgcctacgactattgacatccgtgacttttccagccctgtcaaagacgaatatggcgaaatgatctggtggagtaaagggggaatcaacccttactggtccaaagattataatccaaataaagatagccgtaatcgtttcttgatgaacggatcattgaagtacaaattcacagattggctggatgctgaaatcaaagccggtagtgatatgtatttcactgagggtgaagagaaattgtatgcaggaagtcctactaataataagaacagccgttatagcactagcgagaaaaagttcttcgaaaataatttcagctttttgatcagtggccataaagatgaattgtttggaaaatttggtggcaatttctcttttggtggtaacttaatggaaagaaaatctacaggtttggacaatgctatgggaaaattgactgcgcccgatttattctctctagccaatggtgacaaaaaagatttgtcaataaccgaaacctatattcataaaaaaatcaattctttgtatggaactcttggaatcaactataatggttgggcattcttggatgcaactttccgtaatgactggtcatcagctttgaataaagaaaaccgttcattcttctatccgtctgtttcattgtcatgggtgatcagtgatatggtgggtaaagtcggcaaaggtatgcccgaatggtttacttatgctaaagcacgtgcatctttcgcacaagtaggtaacgatatggatgcatatcagttatataatacatatagtattggttcagaccctaatggcaatacaactgccggacaaggaaaaactaaatacgatgcagatgtacgcagtgagttgattacttcttgggaagccggtgctgaattgaaattcttcaataaccgtttaggagttgattttgcatggtacaagacaaacgcaaaacgccagttaatgaatattcctttaaataacctttccggttatgataacatgaaagtaaatgcaggtaacattcaaaataccggtatcgaaatcatgttgaatgcacgccctatcgaaacaactcaatttagttgggatactcaattgaacttctctcagaacaagagtaagattattgaattattgccgggaaaaccaggtatgcagtatgctttaggaggttctgacgcattgcaggtctatgcagttgcgggaggtgcttatggtgaaatctggggtaccaaatatcaacgagtagaagaaggagaatttaaaggacaattattactcaatgaatcaggactgccacaggccactagtgacaagcataagattggtgaacaacagcctgacttcttattaggatggacaaatacatttaattataaaaacttcacacttagtttcctgattgacggacgttttggtggtgatattttctcattcaccaatatgaacttgcaacgtagtggtatttctgaatgtactgctcctggcggtaaacgtgaggatatcgttgtagcgggagttatcaaagatggtaatggttataaggtaaatgatcaaagtgtttctttagaacgttattataaagctttggctacaggccgcgccggtatttcggaagcttatatttatgatgctaccaacatccgtttgcgtaacatcgccttgagttatcgtttcccgtcatctatgttgaaaaagactccgttccaacaggttaagcttggtttcactgtgaataatgtatggatgatttcaagccatttggatggtattgatccggaatcagtatatgctacaagcactaatgcaacaggtttggagaactcgtcagctccgacatcacgttcttacctgtttaatgtgactcttggtttctaatcataaaaaagaaaaagaacaatgaaaacaatgaataaattatttttggggcttggcttttgcgccggattagtttcctgctctgactttgatgaagtcaataccaatcccacagctgccggtgaggaatatgtaaaacctcaatatgcattgaataattctataggacaggcacagatgaatcccggtactgcagaacgtatagtagtctataattgggctagtgctgccagaatttgtggagaaatgagttttctgaacgtaggccgctatagtgatgattatacatctgcttattattatcctgatctcagcgccagtattaaaaatgcgacgttggctattacagcagtagagaaccaactcgaagcggccactaccactgcacatgaaaaagaatttttcccgaacgtaaagcagtttgcccgtatttggcgtgcctatcttatcagtgagtttgtcgataatttcggaccttatcctattgaaagtttcctaggggaaaatcctgttttcaactcagagaaagatgattatgaattcattttaaaggagttgaaagaagccgcagcagctatcaacacctctgtcctacctgttgaggcagaaggtaaatgcgacccgtttgacaatgtaaaatatgatcctgtgaagtggcagaaatatgcaaattcactccgtatgcgtctggctatgcgtttatcaaacatcgacaaggcaactgcgcagaccgaatttgaggatgcggctaaaggtaacaagattttaacggctgatgagatgtttgcagtaaaagaaaatgatggatgggatgtcttttccggagtatatacccgttcatttgacgatcaggttctttcctcaacagttgctaatcttctgaccaatttaggtggtattaaagtaacagaacaacgttccgatttggctagttatgttaaaccagctaattatttaggtattaaatatgacagacattatgttgctaatacagataatcctactaaacaatattggctggatggtatgccggaaaatcttgatccgcgtgcattaaagatattctgtttacctgatgatgaaaatgctgagaactacatagataaatataatgatagaacagctaaagatttcgttctttacacagtagacgaaaacgggaatccgattcctaataaggataatcctggggaaataaagattgatgcaactcgttgttggaatggttatcccgctggttcgcgcggtggatggtcgccaaccttggcttataaccaactagtgacaaatggatatggccccggctgtactcttccaatgttgggtaaagactattgtcagggcaaatctcgcatattctttgcagcatgggaaacttatttcttgttagcagaagcttcattgtatggttggaacactggaacaacagcaaaagaagcctatgagaacggtattaaagctagttttgaatactttggtgttagcgaatatgtgaatgattatctgaattccaccaactacaatcgtgtaggtacttcagtcaaatttgatcataccactgaaccgactgctgaacaaatgacttatgtggatggatacagcaaagaacagaaaactgttacttatgaatatcctacagcttctaaaactttatatggaaaagcattgaatgaccacttgactaaaattatcactcaaaaattcattgcacaaactccgtatttggtattggaaatgtggtcggatttccgccgtttgggattaccattctttgagattcctgcaaacgaaagttcaatgactggttcagacatggttaatgcttggaatcctaattcttggaaagacggacagaagtgggaattttatccacaacgtatgcgatatccttccagtctggagaatgcagatcccgaaggctataaacaagctgtagagttgttaggaggctcagataatatcatcactcctttatggtggaccggacgttaatgtcttaacctaggacattcatagaataatataagttagccagctaattcatacttaaagtattgcgaattagctggctaacttatattctatgagtgtcccttattatgcccaaaatcatttgattttctgatgccggcaaagcatattacacatggatcatagagtcccttaacattcataactacacaaaaaagaaggactaccttctcacgaagacagccctttcatttgctattaataatctagtaattttctggtaaattttgaacgctctcttatctaagaaacaagcattaacgctcttttgtttattcctccattataaaacttttcagtattttttcggcaatattttcattttccttgctatagataatagatatataaaatccactacctgccgtcttagtcatcaaacaagcataaaggcaatgatctgtttcgcagctccctcttaaataagtaccgaaaaactgtggtaactcaaactcctgcactgccgactggtctttcaccccgtcatcattggcatagtcttttaatacacttttcaagtcactttttgtcataccatccgaatccaaagactgaatggtgatataaaacttggaattgttcagaagaaaagtctcctctgtatcctcctccaccaaaatcccttttggagcctcaaaagtcagaccataggctgtccatgtaataggaaccaaagcttgcgcacttactgatagccaagccagacttaaaaacacaagaagtaaaacctttttcatttttaattattttaccaataaaactccgatcagtccacaactgattatttatccttttcacggatttccacgcgacgaatctttccactgatggtctttggaagttcttctacaaactctatgacacgtgggtacttgtacggagcagtcacacgcttcacatgatcttgtaactcctttaccaactcaggtccttccttacccttaaaagttttagaaaggacaatcgtcgcctttaccacctgaccacggatttcatcaggcacaccggtaatggcacattccacaacagccggatgagtcatcaaagcactttccacctcgaacgggcctatacgataacccgaactcttgatcacatcatcagcacgacctacaaaccaaaaataaccatcctcatcacgccaagccacatcacctgtataataaataccatcatgccaagcatcttccgttaattccgaagcacgataatattctttgaacaatcccaatggtttacccttatctgtacgaataacaatctgaccttgttctccatcttcagcagaacgcccgtcgtgagtcaacaaatctatatcatattgaggattaggtacccccatacttccaggtttaggctccatccagggaaaagtacctaaagtcaacgtggtttccgtttgtccaaaaccttccatcagacgaatacctgtgattttcttgaacgtttcatatacagaatagttcaaagcctctcccgccgtagtacagtattccaaagaagaaagatcatatttactaatgtcctccttaattaaaaaacgataaatagtgggaggagcacataaagaagtgatatgataatcctgaatctttccaagaatatctgccggtgtaaatttctcatgatcatacacaaaaatattggctcctgctatcatctgtccataaagttttccccaaacagctttcccccaacctgtatcggcaatggtaagatgaagactgtcacgatgcaaattatgccagaaactggcagttacaatatgtcccaaaggatatgtaaaatcatgtgccaccatcttaggttctcctgtagtacccgaagtgaaatacatcaatgaagtatcttcattcgtattaggatgttccggtttaacaaaaggagtagccttctcaatacctttatgaaaatcttcaaaaccctccggaatatccagtcctacactgaccaacttttttactgaaggacaatcgggcatggcatctataatatgctttgttatcacatcttctcctgcagctacaatcatcttgatatcagcagcattacaacgatacacgatatcctttttcgtcaacagatgagtcgcaggaataaccacagctcctaatttatgcaaggcaataatagagtaccagaactcataacgacgctttaaaataagcatcaccatatcgccatgaccaataccaaggctctgaaaataagaagcagtcatatccgtatactttttcaagtcagcataagtatattgtatatgctcccctttatcattagtccataacaatgctttcttatcgggttcttcggcagcccaagcatctactatatcataaccaaaattaaaattttcagggattttaatctttaaattctttataaagtcctcttgtgaggtaaatgtggtctgttctaagaatttttctaccataatcttattcaattaaaaattgagaactaaaaattagaaatattatgcggtcaatgacaacacagtctttttaatctcaatttattataatattactgccaagaatttcacagtcttatcgtccaatgccagcataccatgtggaatagaagaatcaaaataaagactgtcacctggattcaagatcaattcttttccatttatattaagtaacattcttccttcaataaccaaattgaattcttgtccctcatgtgagttaaaatgaatcggagtattttccggtttcggttctacagttacaataaaaggatcagccttacgcccacgaaaaccggaagccaatgactgatatttatacgccttggtacgctctaccgacactcctgaaccacaacgagtcagaaaataagaactcatcttaggttcttcaccaaacattaatacatccaatgcaataccgtatttacgggctattttctgtaaagcactgacagaaatatctttctccccgctttccatacccaaatactcttccactgaaagctggcaacttttagccacttcatcaggagtcagttccagaacgtctcttaatccctggagacgctcagctatttgttttatctggtcactcataatcttattgttttatgcctcaaagataatgaagatttgagaattcctagcaaagtttcattaagtttcgaagaaaactatctaacagacaataaaactgcacaaacacgcttacaatgagcacaaacaaaccttttacagaaagtgatcattcaaatactttcatttgaaactataaaataatctttgtcccataacctttcttataaccatatttatacttactttgcagaaaaatgaaatagaatgaattatacgaatgaacaaatcagacgccaagaccgtctgttagaaaaagaaaaagctatcagcttattgaaaaacggagaatacggagttttgtccatgcaagatgaagaaaacggcgcttatggagttcctatcaattatgtatggaacaagaaaaattccatttacattcactgtgctcccgaaggacgaaaattacattgtatcaaacgctgcaacaccgtttctttctgtattataggaaagactcatatcatatccaatcaattcacaactgaatatgagagcattatattgaaatgtcgggcatacattggcttaaatgaagaagaacgaataaacgctttacatttattaatagaaaaatactctccaaacgacaaagtaattggtaaccaatatgcccaaaaatcttttcacagaacagaaattatccgactagatatagaagaggcaagcggaaaatgcaaacatatacctatgcaataagtattaaaagttcattgaactattcctctaatattctcaactattattcccccgataaaagagagttaaaaggagataattgagaaagacgaaaagaaacacgatacaacttttataaaggatcattgagaaaattacatgctataaaaacattattccggcaaaacaatattaccggaataaattttctttatgttatcctttttcagattaggtatttggaaaagcaaccatcttaacaaccataaaagttgtacacattataaattatttctcattctttctacaaaatcatgaataatggaatacaaaatctccaaagaattctcctcataacaaagagtttccaaaggacaccaacctgtccggtccctattctgaatacgaggaactacctgcatacaatctagctttatattcgcacgccgcaataaaaccaatgcaggttcactgataatatctgtataaacttcctgtactctacctaataccatcaaaacagcagcagcttttcctatcaccttgtcagcaatctgagccccacgcaaaaaagccggatccgtattcaacaaatcatacaaatcagttattccacgctgtgtaaaagtgctgatttccttattctttattacacaagaataattaccttcatgcaacagtttgattaatttatccattttttatttcattcaaataacacgatgcatttcgtgtccttccacataaatggcactgaacggacgtgccggacaaagattttcacaagcgccacaaccgatgcaacgttctgtattcacaaccggtattttaggtgaactttcatcattctcatcttcaggtatcatttgaatagcaccagtaggacaatgacgagcacaatttccacaacttaccttatccgtattcactatacaattttgagcaatccacacggcatgccctatttgaatagccgacttttcagccaaactagtcaaatgaatggcatcagtaggacatacttctgcacatttcgcacattcggggcgacaatatccacgttcataggacatctcaggctgcatcaaccgcttcagatcacccgatggacgcaatacctgattagggcacaccgacacacaaagctgacaagccgtacaatgctgtgcaaaatgacgaagacctctcgctcctgcaggaacaatagaagtggcacgtttaggattctttttatcaataagaggcgccaatcctccatccactttcttttcctgcgctttcattacggcacttgtagcaagtaaagcagaaaccgtaaaaaaatttcgccgcgacgtattcaccttttctgaatttgaagacgattgagaagctgactgacctgtttcttctcttctcaaaacctgctttttctgaattattgctccagatacatactttatcgcatcctgacgacatttacctaaacaatccatacaagcaacacaacgggaataatcaatctcatgtgctttgggattaatgcaggaagacttgcaattacgagcacaaagtccgcaaccattacatttagacgtatcaataaccggtttaaaataagaatatctagataagagtcccaatactgtacccaccggacaaatggtattgcaataagttcttcctccacgccatgccaaaataaaaagcactatcacagtacccactgcaactacaaaagtagaaagacctttcatccaaacatctaccgaataaaaagcataactgtctacacgctccgcccacagggcaagtacattgttcccccactgatacaaaggtgtcagcaggttagaaatgatacggccgtatgcactgtaaggagcaatcaatgccgtcaatgaaactacccctgctaccaaagcgacgataaacaccgccaataccccatagcgcaaccacgacaaagcaggcgagtagtggaaacgattcttctttacccttcccgaaacccaggaaataatatcttgaaacacacctaacgggcagacaaccgaacaatagacacgccccaaaagcaacgtcaacaaaacaagggctatcatcacccccacattcagtgccagcacggcaggaagaaactgtattttcgccatccagccaaaccaactatgcacagttcctgtaaaatccagaaacagcaacgtgatcattgtaaagaacaaaagggcggcgacgagtcttattttacgtaacataagcattcgttattttatcatgtttatccattccattataaagtctcttgtttcaactgctccacatatgcgtctatacgatgcagttctttgggaatatcaatactttgagggcaatgcgggttacactggttacatccggtacaatgacttgcctgccgcagtttgggcacactacggtcataacctatcaggaaagcacgccgtgcacggcggtaattctcatcctgactgcttttaggcacatttccttcgttgacacatttattataatgcaccagaatcgccggaatatccaagccgtaaggacagggcatacaatatttgcagtcattgcaaggaatcgtagggaacttcagcatcaattgggctgtttcttccaagaactctttttcctcctcattcaaaggttctaagggagaataagtccgaaggttatcctgcaaatgttccatataagtcattccactcagcacacacaacacattgggatacgtaccggcaaaacggaatgcccacgatgccacactgttctccggacgacgctgcttcaagcgcgccaccagatggtcgttcagtttagacaaacgtcctcctaacagaggctccataatcacagccggaattccacgcttggccaactctccatacaaatattccgcattaacatttcgacccgaagcatggcgccaatctacatagttcatctgaatttgcacaaaatcccatttcacatccagcgacagcaaataatcaaacacttccaccgatccgtgaaatgaccatcccaaattacgaatacggccttcttcacgctcttttagtaaaaagtcaagaactccattgtcaatataacggtcatggaaagttttgatcccttcccctccacctacagaatgaagcaaataataatccagataatccgtctgcaattctttcatcgactgatggtacatcttgatggaattctcacgagtataattttgaaaattagacatctttgtcgcaatcaacagtctttcacgaggatgacgtttcaaagccacaccagtggccctttcagaaaatccctggcaataaacaggagatgtatcgaaataattcactccgtgagcgatagcataatccaccagctcattcaccgcatcctggtctatcacatttccatcactgtccggcgctggtttcaacggccagcgcatacatccatatcctaaaagtgaaacatgttctccctttggagaagtacgataagtcattttatcaacaggcacttcgcctaaaatagaagcctcagacgcattcgacttctcgccggatgcacaaccatacattgccaccgtagatgcaactgtactaacacccacaatttttagaaattctctacggttcatttcctttttgtctcttttgtccatagtcttttacttaaccttcctttatttactgtaaaccaccactatagcctgatcatcagttaatgcaaagttaattagaattcatgaaattccttgcaacacaaccttaataatcaaaacaactttaattacagaaagcaaatcactttttaattcacatagatcactattgaaaataattatttaaacaactgtatcatagggcggcctatccaaacctgcggttgtttcaagccaaaaataaaagcaactgtagaagcacaatcaaactgcatcatactttcatcaaaaattcctcctttttttacattctttccagcaataataaatggagtttccatttcttgcatcgtttttccaccatgccccttatttattcctccatgatcggctgtaacaataataatactattatcataaatacctgcctccttgatagcatctactatccgacctacatatccgtctaattctttcaattttgcataataagccggagtatcatgtccatccacatgacctacatggtcaggattatcaaaacaaattgcagtcaagaccggcttcttttctgtaatatacttacatgccatctcacatagagcagcgggatatagattatagccaggagcctgcacatgataattcaaagccaaagtatctactagatatttaataccatcccactcatacaacactcctatttcagcatcaggaacagctttacgaagttcactgaaaatagttggaaatatatgatgctcatttactacacgtgaaggaagttcgggagttttagacccccattctgtatatccatggagttcaggtcctgcccccataaacatagaagcccagtttactgcacttgaagaaggaagcacactacgttttttcaaagtatagcaacctgcatccattaaagttttaacatttggcatctcagccttttccacactataagccccccaaccgtcaaggccaatcaagaacacatggtcggctttccaattctgagcaaagcaagaaaaagtaaagaatgctatcaatatagcaaataaacgattttttttcatagcaacttatatttttcagttatacatattatcttaacaattctccacactatgaaatgattggatactctccatcggataaacttccacttacacacaatatttcatcaagaaaggtggaaacgatatctaatcccaatattgggagatatccctataatatgaaaaattaaaagatgagcaagcgctggtttcctttctccaaacgcctgctcagttcaaatagagacataaaagctgatttccatcacagctccatcatacctattatctatttcagacaagccttcattgctttaatgatcgctgagtcaaacccttcgtgatccaattcattaatacccttgatagtcataccaccgggcgtacacaccttatctatttccacactgggatgagtatcattattcaatatcaaggaagcagcccctttcacagattgagcaaccattttctgtgcatctttcggataaattcctaattcaatacctgcctgcatagctgcctgaatatatttcaaaacatatgcgataccacatgaagtcaaagccgtagtagcagccatctgactttcaggaataagaatagccaatcctaattcattaaagatatccagcatcagttgttcttgttccttactggcgttacgactggatatcaaggtcatactttccagctgagatatagcagtattgggaatcagacggaatatagtctgttccgggcctacactcttcaccaattgctcaaaggttacaccgcctgcgatagaaactaatacttgttgaggagtcaaatgaatcacactcaatacctgatctatcaaccacggctttacagccagaataacgatatcagcatcctttatcgctttcgggttttccgttgttacattaatctccggataatccgcctgtagagtttccagacttccgctgaacggatcggctactgttacatcactcgcaggaatgatagtgccttgggcaaggccgcgagcaatagcccctcccatatttcccgcaccaataattgctactttcatattattaaagattaagtctatagctacaaagataagggaaaaaaaggagaagaacgtattatgaaaagctaaaaataaaattactttaaagaagattaaatcaaaaagcctcgccggaaccgaaatgtttcctgacgagacctcattttctttcgtagattattatcccttttgaatctccagcttataccaacactttacgaaagcgttcaagaaattcatcagcctctgccatagtaaggcacaaaggcggaagcagacgaatcacattagtaccactgactccggtaaatactttctgttcgaacagcaaacgctgacgcaattccttaatcggttcttcaaattccataccgatcatcaaaccttcgccacgcacctctttaatctgtgagaattgtttcaattctttcagcagatgagcacctaccttggcagcattctctaccagattctcacctttcataacatcaagcaccgcgatagcagcagcacaagctaggtggttaccaccaaaagtggttcccaattgtccatataccggcttgaatttcggactgatcaggacaccagccatcggaaagccattaccaatcccctttgctaccgtaattatatcgggacggatacctgcatgttggtgagcaaaaaatttaccgctacgcccgtagccggattgtatttcatccaaaacaagggctgcatccacttcttcgcaagccttactcagttctttcaagaattttacttccggaacctgaataccgcctactccttgaataccttcaataatcaccgcacagacatctccttttgccaattccgctttagctgcttctatatcgttcaaaggcagataagtcacatgcccattgtcattgattggggctataattttcggattgtgggttacctccactgccagtgaagtacgtccgtgaaatgctttgcaaaaagaaagcacacggttgcgaccattgtaaaaagaagccagtttcaacgcattttcattagcttcagctccactgtttatcaaaaacaattgataatcatcataacccgaaagtttccctaaacggtctgccacttcctgctgtagcttgttaaccaccgaattggaataaaatcccaactgtgcaacctgcttgcttatcatttccacataatatggatgtgcgtgaccgatagaaataaccgcatgaccaccatacaaatcaaggtattccgtaccttggtcatcccagacatgacaaccttttcctttgacaatatttatgtcaaaaagaggatatacatcaaataatttcataaactcttctttattaaaaagcagacggtttcaacctcaaccctacggtttcttccaaattgaacatgagattcatattatgaaccgcttgtccgcttgcccccttcaacaagttgtcaatgcaagagataaccagcagcttatcgccatgtttctccaaatgaatcaaacacttgttggtgttcaccacctgcttcaaatctatatttttgtctacaatatgaacgaaagaatcctcggcataatagtcttgatacatcttcaccagttcttccagttccaccttgcatttgactaccagagtagcaaagataccacgcgggaaatcaccccggtaaggaataaaatctatttcagcattaaagctgttttgcaactgtttcaatgattgcttgatttcgggaacatgctgatgagaaaacggtttataaatgctcatattattattacgccaactgaaatgactggtagcacccggtttcacccctgcccctgtacttccggtaatggcatttaccattacatcctcgttcagtaacagatgtttggctaacggcaataaacccaattgaatacaagtggcaaaacatcccggattggccacgtgcttgctatggcagatagcacgacggttcagttccggcaaaccataaatgaagtcatggtcatcactcttgatacggtagtccatactgaggtctatgattttcaaatcctcgggtacattgtgactatccataaacttctttgtatctccatgagccgtacagaagaacaatacatcaatctcatccagaggaagttcgtctgtaaaaaccaaatccgtttcaccatagagtccctcatgtacgtcggtaatcttattgccagcgttactgctgctatttataaactttatgtctacatcagggtgattaatcagcagacgaatcaattcgcccgccgtataacctgccccaccgataattcctgctttaatcatacttattaaatttcttcgtccttatggttattataataaacacgcaaaggtgtagaagtcactttgataaagcctttagcatcttctgctgtccatcccttctgcatttcaccatattcaccaaatttggtcttcaccagatcgtcttttgattcaacacccacagtagagaatgaaagcggacggagttccaagatagctgtaccatttacattacgctgagactcctgcaacattgcctcaatatcgcgcattaccggttccagatactgactttcatgcaagaacattccgtaccaattggcaacctggtctttccaatattgctgccacttgctcaacgtatatttttcaaggaaacgatgggcaccgataatcagcataggagcagcagcctcgaatcctacacgccctttgataccgataatggtatccccaacgtgcatgtcgcggccgataccgtagggcgcaccgatctcctccactttttgaatagccttgataggatcatcaaacttctcgtcattaacagctttcagttcacctttttcaaatgtaagacgaagttgttcgcttccttccttggtcacctgttttaaataagcactttcgggcaaaccctgcgcagagtccaatatttccccaccgcagatagaagtcccccaaagacctacattataagaatatttcaattttgtaaagtcagcggcaaaaccatgttcgttcaaataatcgatttcctgctgacggcttaatgccatgtcacgggtcaatgtaatgatctcaactcccggagccagtaccaaaaaagtcatatcgaaacgaatctggtcattacccgcaccagtcgagccgtgtgcgatagcgtccgcacctatttcattagcataacgcgctatagccaacccttggaagatacgttcagaacttacagaaataggataagtaccattacggagcacattaccgaataccatatatttcaagctcttctcatagtattcccgggtcacatccaatgtcacatacttcacagcacccagtttgtaagcgttctcttcgttctgcttcagctgctcctcactgaaaccacccgtgtttgcacaagctgcatacacttcataccctttttccttagccagatacattacagtgaaagaggtatcaagccccccgctgaatgccactactacttttttcttcttttcttccataatgatattattttaattgagaattaaaaattgaaaactgagaaataagtacatgaatgcgcagccatcttttaatttttaattcttaatttttaatttattaaatagtgtcttcttcgtgcaaagccggatcgtaaagcatggctgtacaaatacagaacttacggttcttcgccactaatatatcgtgattgatacagccttcacaacctttccaaaaggcctcatcatcagtcagttcattgaaagttacaggaacatatcccagttctgtattcattttcattaccgccgcgccactggtcagactgaatatctttgctttaggccatcgtagacgtgccaatcggaacgaagccgcctttatacgcttggccaaacctattccacgataattaggatgcacaatcaatcccgaggttgctacatattgcttgtttccccatgactcaatataggtaaatcctgcaaaatcatctccacataaagcaataatcgcctttccttctttcatctttgtagtcacatattcatgtgtgcgttctgcaatgcctgttccgcgtaccttagcagcttctctaatagtatctaaaattttatcaacgtaaacttcatgtgaggcatctgccaccatcacatccacttgtttagcatccatctccttttttatctattattatgttattgtatattcggtataatcaatgaaagtgcattcttcactcccgctcttgtgcaaccttcacgaatgacaagcataatagtatcatcaccagcaatagttcccaatatttcatcaaagttccggttatcaatatcataagccaaactactagcatatccgggacgagtcttgattactgccagattagccgaaaattcaatggaaataaatccattatgcatcaacatctcactggccgaatgttgctcagtcatacgtttgtacatggtattgtttggtaatacatatacataatttccgttcatactggctgccttcgccactttcaactgcttcaagtcacgagacaaagtagcttgggtcaattggaatccttctttcgccaattcctgcaacaactcttcctggctacctacttccttactcgaaataataatcttaatggcatcaagtctgctattcttgctcttcatactgcataattattctaattcggctgcaaaattacagaatattcgggaatatagatacaaaaaagagaatatttttgcgactttatgcatattttcaataaagcttttatctatcatcccaagaataaaccaaaatcataccaaatttttcttttcaatgcaatcttcttaaaaagacggtaatattatgttttacgacaggtacaaccaaatccaacagttataatatcaaaaaaacaaggacgactttcggggaataaactatttttgcatcactattaattccttaaaatcaaaaaataaaggcatggaacacacttatttctttgcggtagacctgggagccaccagcggacgtaccatcttaggttgcctgggagaaggcaaaatggagttgaaagaactgactcgtttccctaaccatattatagaaaccagaggacattgttattgggatatttatgccttatacaatgaaattatcaagggactgaaagtggtagccaaagacaatctgcctatccagtctatcggtattgatacttggggggtggatttcgtattagtgggcaaagatggagagttactccgcaatccttattgttatcgcgaccctcacacaataggtgcacccgaagaatattttacccatattccccgtgaacgagtatatgacatcactggaatccagattatgaatttcaattccttgttccaattatcaacactccaccgcaatcattgctcggccttggaagcagcagataaaatactgtttatgccggatgctttaagttatatgctgaccggtaaaatggtaacagaatataccatcgcttctacttcccagatgttgaatccgcgcaccaaatgcttcgaaaaggaactactggatgtagcagatatcaagaaagaacagttcggccgttttgtttttccaggggaacctattggagtgctgacagaagaagtgcaaaaaattacaggtctgggagctattcctgttattgccgttgccggtcatgacacaggttcagccgtagctgccgtacctgcacaaaacgaaaaattcgcatatctgagttccggcacgtggagcttgatggggattgaagtgaaagatgctattataaataaggaaagctttgaacagaacttcaccaacgaaggaggtgtggaaggaacgacccggttcctgaaaaatatctgtggcatgtggttgttggaacgttgccgcaaagaatgggaagcaaccaacaactattcttatacagaactgatagatgcagccctggcagttcccgctttccgcagtgtcatcaatcccgatgctccctgcttcgccaatccgtcatctatgattcaagccatcggacattattgcaaagaaaccaaccaacctgtaccacagagttatggcgaaatcactcgttgtattttcgatagtcttgccctgcgctacaaacaagtattcggctatttgcaacaaatggccccgttccccatcgaaaagctgcacattatcggtggaggctcacgaaacaatttgttaaaccaattcacttgcaacgcagtgggcgtacctgttatagcaggtcccagtgaaggaacagctatcggcaacattatgttacaggcaaaagccaacgggctggtaaacgatattgcggctatgcgccaactaatcagcacttccatagaaaccgtttcttttgagccccagcaagcagaagaatgggaagaagcatataagaagtatttagctcattatagagaagatatttaatattcaccttgaaatttattcattaaataaacaaataatatcatgaaagaagaattgattaataaagcgtatgagattgcaaaagaacgttatgccgctgtaggtgttgacacagaaaaagtaatggaaaccatgcagaatttccatctgtcactgcattgctggcaagcagatgatgtaaccggtttcgaagttcaggcaggttcattgaccggtggtatccaggctacaggtaactatcccggcaaagctcgcaacatcgacgaactgcgtgcagacattctgaaagctgcttcatatataccaggtactcaccgtttgaatctgcacgaaatttatggcgactttcaaggaaaagtcgtagatcgtgacgaagtagaacccgaacatttcaaaagttggattgaatggggtaaggaaaacaacatgaaactggatttcaactctacttcattctcccatcccaaaagcggtgatctgtctttgtcaaatcccgatgaaggtatccgcaacttctggattgaacatactaaacgttgccgtgccgtagccgaagaaatgggtaaagctcaaggcgatccttgtatcatgaacctgtgggtacacgatggcagcaaagacatcactgtaaaccgcatgaaatatcgtgctttgttaaaagactctctggatcagattttcgcaacagaatacaagaacatgaaagactgtatcgaatccaaagtattcggtatcggactggaaagctatacagtggggtctaatgatttctatatcggctatggcgccaagaacaacaagatgattaccttggataccgggcacttccacccgacagaaagtgttgcagacaaagtttcttctttattgttgtatgttcccgaactgatgctgcacgtaagtcgccccgtacgttgggactcagaccacgtaaccatcatggacgacccgactatggatttgttcagcgaaatcgttcgttgcaacgccttggatcgtgtacactatggacttgactacttcgatgcttccatcaaccgtatcggtgcatacgttatcggcagccgtgcagctcagaaatgtatggtacgcgctttgctggaaccgattgccaaattgcgcgaatacgaagcaaacggacaaggattccaacgtctggctctgctcgaagaagaaaaagctttgccttggaatgctgtatgggatatgttctgcttgaagaacaatgtacccgtaggcgaagagttcattgcagaagtagagaaatacgaagcagaagttacttctaaacgctaatcaatatccaaccacaatatcgtcctctgtaagggtcgcctcatgtatctgcccctacagagaacgtatttgtggttttaaagaatataaacaatggaaatcattatcggattaatcattatcgctataggaagcttctgccaatccagttcatacgtacctatcaagaaagtaaaagaatggagttgggaaagtttttggctgatacaaggtgtattcgcctggttggtgttcccactattgggcgcattgctaggtattccccaaggaggcagtctgtttgacctttggggagcgggaggtgctccaatgagcatcttttatggtatattatggggagtgggcggccttacctttggtctttccatgcgttatctgggagtagccttaggacaaagtatcgcactgggtacttgtgccggattcggtacactgttccccgccatctttgccggaaccaacctgttcaaaggaaacggacttattcttttactgggagtatgtatcactttgtcgggcattgccattataggatatgccggcagtcttcgcgccaaaaacatgagcgaggaagaaaaacgcgcggcagtaaaagattttgctctgactaaaggactgttggtagccctactggcaggtgtgatgagtgcctgtttcgctttgggactcgatgcaggaactcccatcaaggaagctgcgttagctggaggtgtagaaggtctttatgcgggacttcctgtaatctttctggtaacactaggcggttttttaaccaatgccgtttactgtctgcaacaaaatgtagccaacaaaactatgagtgattatgccaaaggcaatgtatgggtaaacaacctgatattctgcgccttggcaggagtactgtggtacatgcaattcttcggactggaaatgggtaaaagtttcctgaccggaagtcctgtactgctagccttctcatggtgtatattaatggctttgaatgttactttcagtaacgtatggggtattttattaaaagaatggaaaggtgtatccacccaaactatcactgttctggtaaccggactggtagttcttatcttttctcttgtattccctaatttattctaaaagaattattatatttgtagcatactgttattcagaataaaaaaatgaataacaataccctatgaacaatcaaataaaagaagatatgaaatcaatcttagacaatcgccccgaattggtcaaagaggtgaataaagtagccgaagtagccggatatttgtggcaaaaaggatgggccgaacgtaacggaggtaatatcaccgtcaatatcaccgagtatgtagacgatgaaatccgtcagatgcccgctatcagcgaagtaaaacaaatcggtgtaacactgcctcacttgaaaggctgttatttttattgcaaaggaaccaatatgcgtatgcgggatttggcacgttggcctatggataacggttctgtcatccgtattttagatgattgtgctagttatgtcattattgccgacaaaccggttcaacctacttcggaagttccctcccacctgagcgtacacaattatctcattagcataggctctccttataaagcatccgtacacacacaccccatcgaactgattgccttgtctcacaacaaaaagttcatggagaaagatgtggcaaccaacctgctatggagcatgattcccgaaacaaaagcattctgcccacgtggattgggcatgattccttatcagttgcccagttctgtagaattagcagatgcaactatcaaggaattggctgattatgatgtagtcatgtgggaaaaacacggtatctttgctgttgactgtgacgtaatggccgcattcgaccaaattgatgttttaaataaatccgcattaatttacatcgctgccaaaaatatgggatttgaacccgacggcatgagccaggaacagatgaaagaaatgagtgtggcttttaatctacccaaataatatttttatggtcttcccctaatggggagattttgaagatgatttgaacccacatggggacaaatcatcttttttattatcggagcttaaaagataaatgagatccagattgccacttaagcttttcatcacacgatattcatcacaaatgaacaagcatataaaatgaccaatttatgtttttatctcattattctattgattaaaaagattaacactccctatatagcaaacacttcctagataatcgcgtacttaactcattgacagtttgagtatcttatgttttttttagaacaacgagtactctttttggctatctttgacaaagacagattcactaaacctacagagatatatgaaagcaaataaattattccttttggcaagtttctttctatcaagcagcctgacacctatagcggctcagagtaagaaagagaagaagcaacagacagaacaagctgtacgcgaagctgttgacgcaaagacatacaaaatcaatgtggaccgggtaatgcctatgaaaggaggcagcaaacacctgacttccgattattctttagaaataagaaacgattcggtttattcctatctgccttatttcggagtggcgtataacgttccttacgggggtggaaaaggattaaattttagtgctcctttatcagaatatacttcagcatataataaaaaggggaatgctaaaatcacactaaaagtacggaacgaggaagacaattacctttacaatatcatcatttatcccaatggcagcagtaacatacaggtcacccctacaaacagacaatctatttctttctccggagaaatggatctaaagaagaaagaatgagccataaataaaagggggtcaaaactaaaacaacctatcgtgctatatgatcaggtcattttagttttgcccccctgattaaattacagctattatttacttatttctctaaccggctaaagaaattctcaatggcttccttattgacaaaaactccttttactccggtcacttccaccgtatccatcaacaaagccaagccctgataaccgttttcatcctttgccaatacttcctgctgataaatttcagctgattggcaggctttaccatcttcaggtaatttctcgaaccgaccaaggtaataattgccttcaaagaaattatgtgtagatcctgtcaattggaatctgctggattctggagcataaaaaatatttccactaataaatgtactatccggatatccgccccatgaatccaaagtaatcatagtacgatcgatatcagccgcaggtttacggttcacatgaataatgttacgggtaatgcgactgtcctttacaggacctgccagatgaacagctggtgagaacatcccggcacgagtcggttcaggccgcactccgtcacctatactcacattgtaacggacaatagtgcccaagttacctacattaaaagatgcgtcggccgtgccgtcattgcaaaccaatactaagccaccatagttatcatgactataattatactgaatgaccgttccccggcaattccagtccgaatcaaacccctgtgcatcccacggagccttatgaccacttacctcattgaattgcaccaaagtattatcacaactccacggccaaatacctgccgccgcctctgtgtcaggaagcatatcaggacaatcacgcattacgttgtattctatcaaggtactgtcacaaccgataggtacaataccatcacctggtacttcctctatcaaatttccccgtatcacggtatgcttgctgggatgccagttctgccgatcgctataagcggcccaaatcatagcattacgggtgcatctcaaaatatggcagttctctatggttaacctattgaatgttgaaattttcttttcaccgccattcactatataaataccgcaccctccgcctttttcttttaccaacgaaccattgacatcccgtacagtcacattattgacaacaatgttctgcgatacgccataatccatacactctatcttcaagcccgaacgataaggcagaggctgtctacctgtattcacgatttccaaattctgcatcgttatatagtccgaattacagatacgagctgcatacaaggaagtatcatatcccacaatgcaaggtttccgttcaccatcaccataagcatctatataaatacgatcttcgggtataccgtgtccggtgatttcaagttcgccattaaaaacctcaccgcgcttcaacaaaactttattgcccggcagtaatttcactccacgtagtttttccagacttttccatgcttcatccggggctaacccactattattatcatcaccgccggtagcatccagataatagcacactggactatcagaacatgctgccaacaggaaggaaaataaaagaaggatcattgtttttctcatttctcttccgtttttaaaaagttatctatttattccagaagttgtcagaacaaccaggattcaccacagattacgcaaattcacacagttttttgatttaaaggttgtttgcctcctacttctttgtgacaatccatgtaccctgtgatgaaaacctacactctacattacttccacaagtcgtgctgaaccagtttcttgttagtatccagttcggcagttggcaaaggccatacataatccctctcaccgttgaacttacgtgcttcataagccaagccatacatagtgcgttcattctctatattagctaccgccttatccaattccttccaacgataaaggtcaaacaaacgcaaaccttcaaaggccagttccacacgacgctcatgcttaatgacttccaacaattcatctttagaaagagaagtgccttccacttcctctactgtgggcatgttcacatctgcacgttgccgcacttcattcactaaagcagttacatcactataagcatagcctcctttctgtaccattgcctccgccaaagataataaaacttcagcataacgcaccacataaaagtcttgtccattatcccaagagttagaagtatccgtaggatcaaaatacttataaacatatatggtagacagggaagcggcagctccaccatatacattgacatacggatttgaagccgaagtatctatacctcctttaccgttccaaagcataccgggaacaaacaaagtactatacaaacgtggatcacgattctcaaaatgagcaggattaggcttgctaacatccaagccaccctcattgtttaattcggctatcttcgtatcggtagtcggcttaccgtctttgcaataataagcatccgccaaatctatagtaccattcattgcttccagcggagtattccaatgcgcattaaaagcagcaccttcactcatacccggtccttcataacggactgcaaaaatgatttcaggagaagtttctccactttgagtaaacagtttggcataactcggatcaagcgagtatcccaaaccttgcacctgcttataagcagcaattgcgtcatcccatttttcattatacaaagccacacgccccagtagggaaagagcagctcctttggtgatgtgtccccgtgaagacgcgttttgcggaagtacttcagccgcgtcctgcaaatcagtcataatatgagccacaatagctgcacggtccgtcttttcacattcagcctcgtcaatggtcaaaggggcggtcaggaaaggaacatcctgatacgtcatagtcaagtttatatacatcaatgcacgtatggtctttgcctcagcctgataaatcgccttttgggaagcatccatatccactctatcaatattagcaatcagcacattacaacgactgatcacttcatagcaatctttccaataactgccaataatagaagaacttggggtatgaatccccatagccatatcataaccttccatccagccactccaattaaaatgaccgccattatctgatatacaatccatatataaagggcccaatgaatattggtcggaattataaagctgattgctctgcaaagcatcataacaagatgccaacgccatcaaagcatcatccggtgtctgccaaaatgtattggatgaagattctgtcaatgagtccctctgcaaaaaactgtcagagcaagaagtcagcaaagctcctgacaacagagctagccctataaatttattaattgatttcatagttgttgcttttaaaatttaacgttaacaccaaatgaataagttcttgtattgggatgcacatcattacgggaatctgtgctcagtttctcaggatcataatcatccaaggaagtgaaagtaagcaaattagttcctgccaaatagagtctgagactctgaacgcccaacttggtcaaaaactctctttgcctgaaagtatatccaatttccaagttcttcaggcgcaaataatctccttttgtcagccaaaatgaagagtagttattattaatagttcctcccaaacgaggcatgcttccatccggattactttcagaccatctgtccaaccaacggctagtcttgtttccgccattggaaatagtagtttcatcccaattataacgatatacacctgcaatgccttgccaaaatgtattaacatcaaaatctttataagagaatcccaagttaaaagaatactgcattttagggaacggatttccgataacagtacggtcagcatcatttatgttgccattattatctatatcttcatacatgatatcacctaattgcggttcctggttgttttgcagaatcttctgtccgttcgcatttacacgatccaaatctgcctgggtacgatagataccgatagctttcagcccataataagaaccgatggcttcaccttcacgattgatggtattattacttatatcttccacccctttcatatcagtaatctcatttttcacgcctgaaagtgagaaacctgcctgccatgcccaatcacctttttggtcgaaatagttagctgccaattcccaaccacggttacggacctttcccgcattctgataaggagcatccaaagatcccaggaaaatacccggcatagcgagtttcatcaaaatatccgaggtatttttctcataccagtcaaaagtgacattgatctttccaccccaaaaagcagcatcaaaaccaaagtctgtaatagtagttgtttcccatttaatgttctcattaggtatcttggcagtcttcataccaatctgtttgctatcaccaaaatagtaactaccactagccgccaatgtagccgcataagcatagttaccaatttcctgattacccaatttaccccagctaccacgcaatttcaatgagtggaggaacttcacattctccataaatttctcatttgtcatgatccatgcacccgaaaatgaagggaaggtagcataacgatgtgccttgggcatacgtgacgaaccatcgtgacggacattcatctctaacagataacggcctccgtaattatagttcaagcgtccgaagaatgactgcaaggaactttcttccgccgatccggtcacatgatcattcatagtacctccatccatttcataaatattatcggtagcaaatccctgcttggacgcctcattcttgtcccaacgggtagcctggatagaatggcctgccaacagattgaacgaatgttttcctacagaaaaatcataagtcaggatattttcattaatataagtcgtttccagataatgataatctgtcagtttattggtaccaaccgtggtcagcgcatttccttcagcatcgtatcttacattattcttcggattgaaagtagtcacatcattcatataatatttataagccaggcttgaacggaacttcaatcctttcatgatgtcaatctcaccaaagaatttaccatcaaaacgataatgcttgttatccttatatcccatattcaaagcttcaatcggatttttgaatacggattgggaaatattgggatttccatccaggaatccataatgtccgttagaatagcgtacaggaacagtaggacgggtaaaccaagtaaggtagcgcatcaaaccttcgccggtaacactggtcgtaggctcatcaatgttctggcggcttcccgaaagattcaatcctaattttacaatacccaactgcgcatccagattagaacggaaattgaaacgttggttagctgtctcacgcaagataccatcttgctggaaatattgagtggaaatcatgtaatgtactgccttactacctccattcactgacaaatggtgttggtgcatagctgccgtacggaacatttccttagcccaattggtattggcaaaatgatcgggatctgatccattttgcaatttctgtaacatatcatctgtatatgccttggaaggccaacattcattatacatcttcgcccactcataagaattcacataatcgggcaacacggtagcctcctgcaaagcgatgctaccagaataagtaatagtaggtttctgctcaccgcctcgtttggtagtcaccaaaataacaccgtttgcagcacgcacaccatagatagaagccgaagccgcatctttcaatacagaaacactttcaatatcatcagcaggaatttccgcaatctggctcaccgagctttccactccgtcgatcaggaccatcggatcattgtgttcaaaagttcccacaccacggatacggatttcgggactgtcatgaccggcctgggcaccattgttggtcaacataacacccggcaaacggccctgaagcatattggcagtattagctaccggcatagaagctacatccttgaaatttacagcagcaacagaacccgtcagattttccttcttctgcacaccataaccgactactaccacttcgtcaatcatttccgtatcttccttcagatttacattcagtaccatattgtctttcgaaatatgaaattcctgatcggaatatcctataaaagaaatgacaatagtagaattagaagccaccgagagattgaaattaccatccaagtcagttaccgttccattggttgttcctttttcaaccacactagcaccgatgaccggttcgcctgtggcatcttttacaataccggaaactttaaacttgtctgcttgcagactggaagcgctcacattcatcgcagggatgaagaagcagaaacacagcaataggctcagtacccggaatgtactggtttctgtcagagttttcatgttcataatactttttttaaaggtctaacaaataaagataattcgttttatttgccagcaaaagtaagaggaacagaaaagaaacagggagaattattaccggaaaaaggctgtttattccctatagagcctatttccggtaataatcagccatcatacttcatcatatactctgtaggagaaagtccgaatttcttcttaaagcaggaactgaaatatttagggtcgttgaaacctacagcatacgccaaatcggctatacggattttctttttctcgtctatcagccgacaagccgcttgcaaacggacattgctgataaatgcagagggagtaagtccggtcaacagtttcaatttatctgctagtgtagtccgggccatacccatctccgccataaactgtgcatgttcaaaatcacaatcactcaaatgggcattcacacaatccaccgctttccgaatgaaagcttcgtccatcgaggtgtaatttaattctttggcttcaaaaaccaactgcttacggaaatccacccccatacgtttgcgccgtttcaacaagttatctatcttggcaaacaagacagagaggcggagcggtttacagatataaccatcggccccagactcatacccttccacacggtcttcatcactagtcttggccgttaacaaaatcaatggaatatggcaggtctcaaattgagtcttcacccggcggcacaattccataccgtccatttcgggcatcataacatcagaaacaattaaatccacttcctgtttggcaagtatctccaaagcttccgttccattggcggccttcagaatatggtattttccatgcaacagacgaaccatcaaagccaataattcctcattatcctccaccaacaaaatagtcgatgctgccggtttctcttccaacatatcaatctccgagacattctccatttcatctgccgataaaatagcattgtccacattttcggtattctcgtctacctcatcctcatcaaaagcctcacgtcttataggaatttcaaccacaaaagtattcccttcctccttatcgctaaatacttgtatcgttccatgatgcaacaataccaagtctttagtcagtgacaaaccgatacccgtccctatggtatggaatttgcgatactccccttcataaaatctctcgaacatatgatccaacttctcttttggaatcaactcgccgggattgttcacactcaatttaaaagttcccctttcctcatcatgagcctgtgacaccacaatagttcctccttcaggagtatatttagcggcattggaaagcagattgtacaccactttatccaatttatccacatcaaaatatcccgaatattcttcagacaaatcaaattgtatggacaatttctgctttttaaccaaaggtgcgaaagccgacactgattttttcaagaacatactgacatttccatgcgagactttcagccgcaacttgccattctccacttttctgaactctaagatctgctgaatcaaccggattaaccgcacagtattatcagctatcacaggacaaaccgacgaacttgccggtacttcttgtttcagttcatccaccgaagccgatataatagaaagcggagtcagcaactcatgagtgatattggtaaagaactgtaatttagcatgattgatttcctccattttctgccgttctatcttccccatctctatggcctgtttcatccggatacggtttctgacaatccgataagtataccatgccaatgaaacgaacaacaagacataaaggcaataagcccaccacgataaccaaggcggcggaagaatagttatacgcagacatttcatatccggagaccagattccattctgattggctccctttacacaaaaagtataagtacctgccggaagattgttataataggcaaaccgacgtccagcctcaacggacaaccattccttgtcatatccctccaaccgatataaataacggttcaactcaggattgatatagttcaatattgaaaaatcaagactgaaattattctcccggtatcctaatacaattttatcaataaaatcaatagccctgtttgcaacaatcccctttctgatggaaagagggtaggtacgtaccgatacattatgtacctttatatctgtaatcactaccggagaataagcagtatcctgaacaattttatcaggataaaagctgttcaatccccggaatcctccgaagataagtttcccatccgcccccttgaagcaagaattccggttaaacatgtggtcttgcaaaccatcatctaccgtgtaagtatgtattttcggtgcagcaccatccaaagggatatcaatgtgatacatttccgcattggtagtaagccataaagtatgctcatcatcctccagcatactgaaaacaacatctccattccggaaataatcattcaagactgaaacaaaacgatcattcttccggtcatacaaatcgagtccattaccattcgaccccacccatactctgttgtatccatccacacaaacactcatcgccccgacagtggataatgtaccatccgaaggcgtataaaacttaaccttatatgtttctccggatgtatctatccgccataccccttcattgctagtcgctatccagataaaaccatcttgatcttccgccattttgaaaatagaaatttggggcaatgcctgatttgtcaaagtcaccagttcattcaaagaatgaagcctttgttccgtatccaaaataaacactcccgaacgtgtccccaaccacagattccctttcgaatcctccaacaaagaataaatacaaatatcactcagttccgggttggttacggtatttaccacgtgtgctttcccggctttgacgttatagaaccacacaccgtcatcccaagtggcaaaacacaattcatttgtccttttacgataaataatatcattgaccgtcgatgtatatcccatattcttcaatacaggatgagagcggtaaggaacaatggtatgctgttccatatcataaaaaaccagaccgaatcccatgattcccatccacagattcccattatcctcctgatagacactgcggacagagctggtagggcaatgctcacgcaaagcctccaaagaatcataattaaaccggaacttatttgtatttacagtacaaacacctccccccaacatacccagccacatcagcccgtctttactgcacaacagagaattcacttcattaaaaggtaaatctccttgaaggttacccggaacaatattggtaaaattcccgtcccccgattcatcttccaaaatactgactccactgcgtgaaccgatccagagctttccggaatttttatcctgagcaatggcgtagataatattatccaacagagaatgagaatttcccttgatgttccggaatgttttaaatgagaaatgttccggatcatacggattaatgagtttcaccaatccataccgccaggtaccgatccaaatattcccggcttcatcctgaaatatgacatgcgccgaattaccagggttaatcccctcgtaagtataatacaattcctcttgaggattataacgcagcaacccctgttcccaagtaccaatccatatttgtccttccctgtcttcgataacggactttatgtccatgttcttttcacaatcgaaagtacgtcctccggctttcctgcgaaacaatcctttgttgcttcccacccataagtccccgttgcttgcataaagaatactttccacattgcttacctgtaacaaaggactgattattttttctatctcatccgtttccttatgcaatacatataatccattgtgcgtacctatccacaaattattctccttgtcttcggccaccatattcacaaaactatcaatggaacgtccatgattcactccatcgggtttatacaccacaatagaatacccatcatagcgcaaaaggccattgtaagtcgatatccatatatacccctggctatcctgaaataatttccggacttcattggtcggaaaattcaccgaagtggaaatagatttaaaatgataggtattgaccttgttatcagcccaaagccaaacgggaaaacacaaaagatatattactccaagaatatattcacagttacggtgtgcaaagtgcatagattcaactttaagatttaatgcaatattcgcaaaaaaaagcattttaagcaaatattccataagatttgttctaaatttccctcatccgcatacataagaaactaaaattatacctccagaaacacttaggacaaaaaggttagaggcagttaagataaaaaattgtatatttgccgataagtgtgacctaattttaaaacagagaaacatgcattacaacgaccaaggcgctgattttaaatacctaattgtcaatgaacgtgacaagcgtttcggcttgtcggtgactaccgtcggattccaggccatcagggccgggagcgtttatccaccacgcaaccacccggacgcttattatttcacggcccagaaaggacgtgtgctgcatgaatatcagttggtatacattactaaaggacggggaactttcgccagcgatactactccgtctgtcgacatatctaaaggacagatacttttcctgtttcccggacagtggcatacctacgcgccgctgcaaaaaacaggatggaacgaatattacatcggttttgaaggtccgattatagacaatctggtaaaaaacagctttatttcaaaagaaaaccagattttggatattggtatcaatgaagaactggccagtctttttgcccgtgcactggaagtagcggaagcagacaagaccgcagcgcaacaatatttgtccggcattgttttacacattatgggagccgtacttgctatctcgcagaacaaacgctatgaggtggacaatgcggcacaaaaaatagaaagtgccaaaatcatcatgcacgaaaatgtgtacaaggatatagatccggaagaactggcactgaaattaggtatcagttattcctggttccgcaaagtattcaaagaatacaccggctatgcgcccgccaagtatttccaagagctgaaattgcgcaaagcgaaacaattattgattgaaagttccatgtcagtgaaagagatatgctatgaattgaattatacctctactgaacactttttctcggtatttaaaaaacgtaccaacttcacccctaccgaatatcgtaacttcggacggggaggaaaagaaaaagagaatgaaaacgaataaaggaaaaatgagaaaaataaccatcaatctggctgctgtggcagccttttgcattgtagtcgcctcacccgccttagtgagcagcagttgtgctactccccaaacggaacaggaagataccactatcatacgagaagatttaggtattacggcattgaaatacagtagtcccgaagttccctccagcattgaattttgtggtaaagtgattgacttgagccgctttgaccgccacgagcgtatggaccgtgaattattggcattcacctatatgcacagtacttccctgcaaatgctgaaaaaagccaaccgttatttccccattgtagaacccatactgaaagagaacggaatccccgatgattttaaatacctgatggtcatagagagtaatatgaatcccaccgcccgttcctctgccggagccgccggactatggcaattcatgcaaggtacgggaagggattacagactggaggttaacaacaatgtggatgaacgttaccatattgagaaagcgactcgtgccgcctgccgttatctgaaagacgcgtatgctaaatataaggattgggtggctgttgccgcctcatacaacgctggtcaggcacgtattgccagccaactggctaaacaggatgtggacgattcgctggatttgcaactggtagaagaaacagcccggtatgtgtaccgcattcttgccgccaaacaattgttcagtgcccctactactttcggtttccgtctgcgcgcatcggatttgtatccgcccattccctatacggaagtcactgtgacaaaaggaattgcagacttggcacgtttcgcacgcagcaaaggaatcaatctggccatattaaagaatatgaatccctggttgcgggaaacatccttgtccaaccacagcgggcggacttacgtgataaaaatccctaccaaagaaggaatgacttatgatccgaaaaagacggtggcgcatgataagcgatgggtgatagaataactttctatcatacagcattccataatcaatttaccagttttcctccacagtatttacaataagcagccccgtcctcatgtccgtccttaccacagtgcggacatttcagggccaccctgcgtctatgttcctggatcatagacgcagaaacaattcctgtggggactgcaatgatggtatagcccagtaacattacaatggccgaaaggaagcgccctagcggagtttccggagtgatatccccataacctaccgtcgtcatcgtcactatcgcccaataaatactattcggaatattattgaaagaagtgcccggccgctgtccctcaatcatatacatcaatgtaccgatcgaagtcaccaatatcagtacaaacaagaaaaaaacaataatcttccgactgctgaacaccaaagagcgcaacaagaaattaccttcattcagataattgaaaagtttaaagatacggaacacacgaatcaaacggaaagtgcggatcaccagcagataacgtgccgtgccgaaaagccagcctatatataaaggtaaggtagccaacaaatccactataccgaaaaaactaaaagcatacttgcgcggtttaggagaacaataaagcctcaacacatactccaacgtaaagaagaaagtaaaaacatactccgacactcgcagataaggcccgataacagcatcccaactcttgatactctcggcaacaaccaccagaatactcaagacaataaaccctatcaacgccacatcgaataactttcccatcggtgtgtcactctcaaaaataatcacatatattttatgctttaatttctcatcatgcagtaaattctgccacctgttccaaatatgcttcaagaatgccataattttttataatagaacgcaaatcattcataattataacaaatattgcccgatttatgtcctattggtcactattattttcactatatttgcacaaaaccaataaaataatagcatgaagaaacaacttatgacaggtctgttcacagtcctcgcccttacagcaggtgcgcagaccttccaagaatggcgcaatccggaaataaatgcggtaaaccgtgcgccgatgcacacgaactactttgcttttgaaaatgcagatgcagctaagaaagcgaacaaaaaacaatcaaccaactacatgactttgaacggaacctggaagttcaactgggtgaaggatgcggattcccgccccactgatttctggaaaaccggtttcaacgacaaaggctgggatgacctgcaagtgcccgccgtatgggaactgaacggatacggtgatcctatttatgtgaacgtaggctatgcctggcgcaaccagttccagaacaaccctcccgaagtgccgacagaaaacaaccacgttggttcttaccgacgtgaaattgtagttcctgcctcatggaatggaaaagatattatcgctcatttcggctcggttacctctaacatgtatttgtgggtaaacggacgttatgtaggctacagcgaggacagcaaactggaagccgaatttgacctgactccgtatttaaaaccgggtcagaagaatctgatcgctttccaagtattccgctggtgcgacggtagttacctggaagaccaggatttcttccgctacagtggtgtgggacgtgactgctatctatatgcccgcaacaaaaaacgcattcaagatatccgtgtaactcccgatttggacgcagcttatcaaaacggtagcctggctatcaatctggatttgaaaggcagtggcaaagtcgatttggaactggtggatgcacagggcaagcaagtggcaaccgctaccgccaacaaatccggtctggtaacgatgaacgtagaaaaccccaaaaagtggagtgccgaaacaccttatttatatacgttgcgtgccagtatgcagggcagcaatgaagtaattcccgtcaaagtaggtttccgcaagattgaattgaaaggtgaccagatcttagttaacggtaaagcagtcctgttcaagggggccgaccgccacgaaatggatccggacggaggctatgtagtatctcccgaacgtatgctacaggatatccagataatgaagcaattcaacctgaacgctgtacgtacctgccactacccggatgacaacttatggtacgatttatgtgaccaatacggtatctatgtcgtagccgaagccaatatagaatctcacggcatgggctacggcgaaaagactctggccaagaacccctcttataagaaagcccatctggaacgtaaccagcgcaatgtacagcgcggattcaaccacccaagcatcatcttctggtcattgggtaatgaagccggcgacggccccaacttcgaacaatgctatcaatggattaaagcagaagaccccagccgtgcctgccaatatgaacaagcacgccagaaagaccataccgacatcttctgtccgatgtattatggctacgaaggaatggaaaaatacggtcaacgtaccgatgctaccaaaccattgattcagtgtgaatatgcccatgcaatgggtaactcgcaaggtggtttcaaagaatactgggatttgattcgcaaatatccgaacctgcaaggtggatttatctgggacttcgttgaccagtcctgccgttggaaaggaaaagacggtgtgatgatttacgcttacggtggagacttcaaccgctttgacgcttctgacaacaacttctgtgacaatggtttgatcagccccgaccgcgttcctaatccgcacatgtatgaagtaggctatttctatcagaacatttggactactcccgccgatttaagcaaaggggaagtaaatgtgttcaatgagaacttcttccgtgacctatccgcctactatatggaatggcaagtactgaaagatggaaaaataatccgcaccggacgcgtggatgatttaaaaatcgctcctcaggaaacagccaaaattacgttgaatatcggcaagacctgtacctgcaaggaatggttgctgaacgtttcctacaaactgaaaaaccgcgaaggtttgctgcctgcaggtttcaccgtcgccaagaatcagttgacactgaatgattacaaagcaccgtctatggatttgaagaacgtggaaacaaccaatgtagccaccgttgttccgcaaatcatcgacaaccaatatcattatctgatcgtaaaaggcaataacttcgtagccgagttcaacaaacagaacggttacttaagcaaatatgcagtggacggaacggaaatgctgaaagaaggcgcagccctgacccctaacttctggcgtgccccgacagacaatgatatgggagccggcctgcaaaacaaatatgcagcatggaagaacccgggattgaaactggtttccttgaattccaaaacagaaaatgaccagatagtagtgaatgcggaatatgacatgaagaatgtttccgccaaattatatctgacttatgtcatcaacaacgaaggagccatcaaagtgacccaaaagatgacagccgacaagaatgccacagtatctccgatgttccgcttcggtatgcaaatgcagatgcctaagtgttttgaaaccgtagaatattatggtcgtggtccggtagaaaactacagtgaccgcaaccacagcacagacttgggtatttatcgccagagtgtgaatgaacaattctattcctatatccgtccgcaggaaacaggaaccaagaccgatatccgttggtggaagcaactgaatgccggtggtaacggcctgaaggtggtaggtgatgctccattctccgcatctgccttgcattataccatctgttcactggatgatggcgaacaaaaagaccagcgtcactcgcccgaagtacagaaagcagacctgaccaacctgattatcgacaaggctcagatgggattaggttgtgtaaacagctggggagctctgccgttgcctcaatatatgttgccttacggtgattatgaatttactttcatcctgactccggtaaaacatcagattgaaatagaataagacaagaatttaaacgatagaaacagggtggctggatttggttctcagccaccctattctattctctctgttcttcatagctaccgccatctacaatttcctatgcaacaagtgtaacacaagtagctggcctaatcatctcctttcaagatacattttccaccttttttcccttcaaatccttcatacacaaccaatacactgaatatcaaactattacaatgaatcattcttattccaatccttcataaattcttcataaagttatatccgttccctttgcatgaaccaaccacgggaatccattccgacaacccatcgaatctttttccttattttaccgtacccgattacaaacctcggttgtattactcataaagaacaattaaacactagtaaaatgagaccagacggctatttgaaaacagcgtggatcatgaccatattattcagcatcatccttccgcttcattcacaaacaccccggcaattctctatagaattaaaggacaaaccacttcccgctgcccttaaactaatcgaaaaggaaggtggaaagaatattatcttctcctataacgaaactgaaagttaccgggttacagcctccatccggcaaaaaactgaacttgaagccatcggcactgtcctgaacggcactcctttcatttgcaaagaacgggaagaatacttcgtcatacagaaaaagggaaagaatgtacccaccaccgaaatacgaggacaagtaaccaatgaaaagaatgaaccgctgccctactccaatgtactcttattgacccccggcgattccacctttgtaaacggatgtgtcacccgtgaagacggaagtttcctgatgatagcggaagaagggagaccttacttgatacgggtttcttacataggctataagacagaagtgcaaccttaccaccctactcctacgtttcacctgcttcccgacacccaactgatgcaggaagtcaccatcagcgcccgacgccccatgatagaagtgggtcccaacggactaaaagccaacgtggcaggaacttccctggcccgaatggggtctgccgcagaaatgttgccccatcttcctttcgtcaccggccgtaacggcgaatacaatgtaatgggatgtggttctcctgtaatctatataaataataagaaggtacgcgacattacagaactggagcgtatccgagccaacgaaatcttatccgcggaagtcatcaccactcccggagccgaatatgcctcggacgtagcagccgtcatccgcctccacaccatccgccggcgcggacaagggttgagcggccatttcaatacgacttattcacaaggacattctgccaacgccaacgaatatatggcattaaattatcgcaccggcggtctggatctctttgtaaaaggctatctggcacaacaaaactcgtatggaaaaaccacaaatatgaaccgcatcaagggttccgccatttggcaaaccaacaaaaatgatgtgcaaacccataagagccaacgtttttccggtgagctgggattcaattatgaaccggatgaacaccattctttcggtctgcgctatatgcccgaaaccggaatagggaatgcagacagaaattcatccggtagaaccgtcaccagacgtaacgatgaagaaaccgaccggataaactttactacagcagaacaaacacatacaggttgggatcacgcggcaaacgcctactacgcaggagaactgggcaaatggaatattgacttcaacgccgattatctattcaaacgctcgcattccgaccagaacgccatgaataatgacgatgcaaccgtgcaagcagacagtcgtatgcgcagctccctctatgccgccaagctggtagtcagtgcccctttatggaacggacgtttttcattcggtacggaagaaacttttaccaaccgccatgatatctttacccaaaacggtttctctgccgatgccgacgaccacatcaaacaatccgtatatgccacatttgctgactattcaaaatccatccgccattggaaactgaatatgggaatacgttatgaacatcaacaaacagattattatgaaaaaggaataaggatagatgcacaaagccctacctataatgatattattcctgtattggccgccagttggtcacacaatggcaaaagtttcagcctctcttaccggttaaggaaaaataatcccgactatagtttattgaccaattccatccgctatcgcagcaaatatgagtattctcaaggaaaccctttgctgaaaacacaaaagacgcaccgtttttcggccagtacctcttggaattggctctatttctcagcctatttcagccgtattctcaatatgtataccaatataattatgccatacaaggaagatacacatccgggcgtcctcttatttgccacacagaccattcctacaacccataattacggcattagtctcaacgcctctcccaagctagggtattgggaaccgcaactcaatgtgaatatggcttttttggatatgaatgcgaataaaataggaatcaccgaacgccggaaccaaccccgtttctatatcagtctggacaacaacttcaaccttcccaaaggctggttcttcaatatagaaggatatctctccaccgcttcccggcaaggattttttgtaacgcgcacggaaggacaaatcagtgcacgcttatccaaatcatttttaaatgaaacattaaacatagcacttaccgccaatgacattcttcataccggttactatcatttcaatttatacggcataaacgcttatatggaaaatcggatttaccgcgacttccaacgcttcggcctccaagtatcctataaattcaatgccaccaagagcaaatataaaggaaccggagccggacaaagtgaaaagaatcgtctgtaaccccagcggagaaaaggaaatttccgtacctttgttcacggaagacaaagaaacatgcagattttattcaggagaagaaaccataaagaagagcacttcgaacgactgttctcagagatgtacccacgcctcgtccgttttgccaccaccttgatggacaatacggaagaagccaaggacatagtaagcgaaaccatggaacaagcctggaaggagttcgaccaactgaaggaaaacacccgtagcgcttggctctatgccgccgtgcgtaacgggtgtctcaaccgtttgaagcatttgaatgtggaacagcaacacatcgaccgcctcaccgaagccacccgtgcggaaatgaatcaaggttatcgtgcacacgaggcactgttgcagcaagcggaaaacatagcccacagtttgcccgaaccgacttgcaccatcttgcgaagctgctattgggagaaaaaaacatatcaacaggtagccgaagaactgggaatcagccccgacaccgtgaaaaaacatatatcaaaagcattgcggactctacgcgaagcgatgctgggaaaggaggagaaacaatgaaaaaggagttttcaacaaatgaccacatccatccggacagcggaaaggatacccataaccaaagctcccaagaaaacgggacttggaatgaccatcaattggaacagctcttcggtgaagcattgggggatactcccaccgcggacgaaacccggaaagcctggcagacattcatccgtcgtcaccgtatcagacaccaatctatccgccggataatgatactaggtatagccgccgctgtcatcgccttggcacttgtattccagcctttactgcaacctgagcagcaggaagtggaagtcttcacttcactggaagttcctgaggaaattacttttcggaaagaagggaaaaggataattgtaaacaccccgcccgctaccattacctccgttcaattaagcgacggaagcaaggtattgctcagcgcaaacagccgtctggagtatcagaaagagtttacagataccattcgcagtgtcaaactaagcggagaagcccgttttgaagtagccaaagacgcttcccgcccctttatagtctgcaccgagcaactacaaacacgagtattgggaacggtgttcgatgtgaaagcctatccccgttactcgccggatgtcatcctctatcaaggacgagtgaatgtaagtcataccaagcgccgtcaaagccgggaaatgcacccgggggaacaaatatccttggataaacaaggaaaactccaattgaaaagagtcgatacggagaagagaaaaggatgggcggagaataaattttcttttgacaataccgacttgaggcaagtcatgcaagaaataggttcatggtataacatcagcatcgtattccgttcacgtccgttgctggacgaacgcatctatttccatatcaaccgccaactcccgatgaataccgtactggatgcgctgaatgatttgaaaatcgcacagttcaccatgaaagaaggaaaaataatagtggaaacaccacaagacaagaaacgataacatcaatgggagttcaataaacaagcctatattttcatctggagattaaaatatcagcgttcttttcatcttcaggtgagaaccattcggtttatccccctgtgctaaagaacctacagcactatctctttttccagtcccctcgtgtgaaatcgggaatctccaccggaacactgccctgccgcacggaacgctcgctcagttccgtaatgcaggaccattcggcggcatcatacacatcctgatccaacggcaaaccgttcctcaaacaatgaataagccgatagtccatgatataattcatttcattcggcatattcttccgccgggcctcttctccgataacagctgtaaaaggatgtttatactgctccatcatccgctcaaactgctcgccggacaaaggctcttttccgtatttatccagcataagacagggaacgggatatttctgcatgaatcccttcgtgccgcacaccgtctgatggcggctgtacgggcgaggagtggtcacatcatattgcaacaagatagttcttccttttgcggtatgaatcagcgtggtattcacatcccccatctcataattctgtgccgcttcttcggaggatgcgccaaacgcctgtccggcataagcagaaagaccggcctgacgcgaggacatggaaaccagatattccatacggtctccccgatgaatattcatccattggcagacaggacccaaaccgtgagtaggataaggattccccgtatgctgctgactgtaaagctttatccagtgattgtgatacccacccgccttttcatctgcaaaataatgcttgcgcaagtcatgtatgtatgccccctcggcatgagtgatctctcccaacaccccctgctgcaccatgttcaatgtagtcaaggcaaacgcatcgtaacaacagttctccagcatcatgcaatgacggcgggtttcttcggctgtatccaccaaacgccagcaatcggccacactcatggcggcaggaacctccaaagcgacatggcgtccctgctgcaaagcataaaccgcaatctcggtatgagtcagccagtctgtacaaatataaacaagatctatctctttacattcgcacatcctgcgccacatcccctcttccgaatagttctcagccttggggcggccggactcctgcaaaatccgctctgcacgctctatgttttccttccgcaaatcacaaagcgctttcacctcaatgccttccaggtgcatatatctctcgagtgcaagaatgcccctgtttcctaatccgacaaaaccgatccgaactacggggatggcagggcaggttaaattaagtacgttgggtcgtttcatggactgctttatttttctgacaaagataaagagaaaattcgagaatgggagcggattggagcaagaaggttgtaaacaagggatttagagagaatcgaactgcgatatcgaagccaaaccgaagccatcgaaaagccaactgaaaccgggcgacaactatgttaccgccgagaaagttcgcaatgcctatttaggtttgggcatgaaccacgagacgcaggtcggtaaactcaaaagtctgcgcagctattggaaatactgcgtcgtttacaaacacctcgcggagttcgtcgaaaagcggtacaaggccagcgatattgcgctgaaagagcttactccggcattcatcaccgacttcgagttgttcctcaaagtggaaaagaaccactgcaataacacgatctggtcgtatacagaggaataaaaatttaagtaaaaaacagccgtataaaacggttgttcttatttgtatcttgaacaaatatcttgttgtttagcggacagatatatctttcctatactctgacggtgttgtcttcatcctcttttgcacataccgactgaaataagaaacagaggagaaattcattcgttcggcaatcgtagttaaagacaactctttttgtcgcagcaagcgggtaatctcttgaagagtaaaacggtcaatccaataagtggcaggtttgccgcttacctttttacatatctccgacagataatgaggtgttatgcaaagccgggatgcataaaaatcgagatctcgatttcggatatattcgccgttatataacagttctatgaaatttcgcagtaagaccgtaatacgctccgatacctgcatggtattctgactgcgtgcatgaatatcataaaggtcgaggatgtgcgccgtaagcaggcttcccatcaattcttcccaaaacagatgctctttatctttcagacgttgccggatacagcgcattgcctgctcgcatacttgaaaatcatgagaggaaagtttcatgaccggattctgcaagagtgatagatacccaataatgccgtaattgctgcgaatagcaatcgaggaaacgaacgcatccgaaaggttcatcaggataccttgaaagtcttcggagtccgaaaattccgatacgagtgtggcgttgggcagaattacataatccccggccgcgatgttataacgggtatcctgaaacgtgaaacccatatttcctccgctgcaaagaatatggattactcttcctgcatatcgtaaagcattaaattcctgcaatgtatcagcaaaaataatcccgtcgaagtctgtatgtgtcatttctctttcatttcctgcaaaaataacgaaaaaccacgaatagtgaaaattcttccccgaataatgaaacaataaaatgataggtaccctgtaactttgcatcagaattaaaaaccataaaggatatgaaaaatgtaagattaaacaatggagtaatgatgcctgctatcgggttcggtgtctttcagattcctgaaaatgaaacggaacgagccgtaaatgatgctatcgagatcggttatcggaaattcgatacggccgctgcttatttcaacgaggaacagttgggaaatgccatccggcaaagcggtatcaaacgggaggaattcttcataaccaccaaattgtgggtgcaggactacgagtacgacgatgctctgcgcgctttcgacctctcgatgaaaaaactcgggttggactacctcgacctctacttgatgcacaaaccctacgggaattactatgccgcatggcgggcgatggagcggctctataaagagggacgcatccgggctatcggggttacgagtttctctaatgaacgcctgcaagaccttttcttgcataacgaaataaaacccgtcgtaaaccagcttgaaacgcatccgtttttccagcagcaggctgccaatgctttcttacagcaggaaggcatccagcacgaagcatgggcgccttttgccgaagggcagaatgacatattcaatcatcctacattgaaagcgatagcagagcaacacgataagggggtcggagccgtgattcttcgctggctgaaccagcgcaacatcgtagttatcccgaaatccgtacataaggaacggatgatcgagaacttcaatattctcgattttacgctgtccaaagaggaaatggatgccatcgccctgctggagacagggaaaagtcctatctacgatgacatggatttacttacggtaaaaggtatcgggttgcacaaaatccatgaatgatttcaaaaaacaaatagaatattaacccttaaaacagaatcatatgcagactgtaaaattgaacaacggcatcgaaatgccggtattaggatatggtgtatttcaagtatcgcccgaagagtgcgagcgttgcgtactcgatgccatcggcgcgggttatcggttgatagacacggcgcaggcttattataacgaagagggcgtgggtaatgccgtcgccagatgcggcgtgtcccgtgatgaactttttctcacgaccaaagtgtggattaccaatgccggagaggaaaaggcaacccacagcatcgacgaatcgctccgtaagttgcgcaccgattacatcgacctgctgcttatccatcagccgtttagcgactatccgggaacatggcgggcgatggagaaagcggtaaaggccggaaaagtccgtgccattgggctatcgaatttctatcccgaccgcttcgtggatatggccgaatgtgccgaaataaaacctgccgtaaaccaactaaaaaccaatgtattcagtcagcagtgggatgctgaagctgaaatgaagccctatgatacacgtatcatggcttgggccccactggcacaaggcgatcccgaccttctgaccaatcccatactgacggctttggccgaacgatacaataaaacggtacagcaagtcgccctgcgttacttggtgcaacgcggcatcatcgccatcccgaaaagcacgcatatcgagcgaatgaaacaaaatctggatgtattcgatttcacacttacaccggaagatatggaaagtatccgtccgctcgacaaacctgccgacttccgctggtcgcaccgtaatcccgaactcgtaaaattccttctgaattacgacaagcaatttaaccctaataacaaataataacccatgtataagtcattgaacaacaaagtcgctcttgtaaccggagccgggacgggcatcggaagagctattgcccaacgtctggccgatgaaggtgctaacgtattgattgtaggccgcacggaaacgacacttgtcgaaacggctgcttacagtgataaaatctcctatcttgccatcgacctcgaatcggaagacgggatacgcactatcatccgtactatcggagaacggtacggtcgtctcgacattcttgtcaataatgccggatgggcacccgtcaccccgtttgcaacgatgaaaatcgacgaatacgacaaggtattcgccatcaacgtgcgtgccgttgtcatgctgacacaggcctgcctgccgatgataaaggcagcaaaaggcaatatcctgaatgtcacgacaactatgacaaccaatcctatcgcgacgatggcgaactatgccgcctcgaaagctgccgtctataccatgacacgtgcatgggcgaaagagttggcaaaagacggcgtgcgtgtcaattcactcggcgtggggcccatcgaaacccctatttacggcaagaccgagctttcggacgaggccgcgaaagcccacaaggatatggtaacgaagagcgtgcctctcggtagaatgggacagcccgaagaggttgccgccgtcgtcgctttcctgacgagcgacgaagccagcttcgtaaccggagccgactataaagtggacggtggtgtaggtgcataaaacaaataacaataaaaagaatgaatatgaaaaatgtattgattatcagcggccatacaaaccttgccgcatctgtagccaataaaacgattctcgaaaccctgaacgaacggctgccggaagccgaaatcgtaaagctggatgaactctatcccgatttcaaaatcgacgtggaagccgaacagcagaaattgctccgggcagacatcatcgtattgcagttcccccttttctggtactccgcaccctccatattggaacgctggatggaagagactttccgtcacggattctcgcacggaagtaccggagacaaactcaaaggcaagaaactcgttctctctttcacaacgggagcacccgaagcattgtatagccacaagggggcgatgggctacaccatagacgaatttttagcttgctacaaagcaacctgccgactgacgcacatggagtatagcggcagtgtttatacctgcggcgtaagttacggcaaccgtaccacaccggaacttatcgagcaacaaagaaatatatcagtagcgcacaccgaacgtcttatcgaattactcgaaacgctctaatgcttgaagacagactacataatctcgatgatatagtattcagttgcttcctacccgatgactggctgaatgaatttcgtatgccgcaacacgtactcgtgtatgtttatgctggttttctactttgatggcctgatgctgttcgctttataaaaaataattctccaccgagttccacttaaacaaactcgaagaaacggatttatttacttataaaacgaacatttatgatacatcataccatgcggatcgttttggtggaatccgccacccaaaccgtcatggaagaactgttccgcgacttcggcaatacactccgcatcctctgcgacgaagacgttcaacagtaaacataagcctttttatccatacaactaaggtctttattcctattatcttctatagtcttccggtgcagaccgtacagtccactataacagaccgtacagtccattacggcagactctacaatccattacaatggactgtagaaggtttcagtataaaagcccttaatcatccggaagaaaacacttagccaaagagaagatggcacttaagaaccgctttataaccagacaggtcccttttccgggaaaaaacaaagaggatgtgtccgggccgaagtgacagccacaggacacatcctctgttttctaatgagaacagtacaaactgtgcttaaataatagaagtacgcttggtaaattctataatttcaggaatataaccgaatgccagaccggtcaccgtatcggcacaaccataataaacggctacccgtcccgttgccggatcatgcaaagccgcacaagggaagcatacattgggcacatcacccatacattcgtaaggttcacgcggagagaggagataaggtcccgaacggaacttcaccttccaaggctcatccaaatcaagcaatgccgatccaaaggcatagacataaccattgcaggaacgaagcacaccgtggtagaacaacaaccagccttcactggtttcgataggaataggaccggcacctattttcaagcactgccatgcactctgttcaaaaggcgcaggcgacatgacatgccgatggcgtccccaaaactccaagtcgggcgactcgctataataaatatctccgaaaggagtatgcccgttgtcactgggacggctcaacatggcaaaattaccattaatcttgcgagggaacagcacgccattacggttgaaaggcaggaaagcattctccacctggtggaacgtcttgaaatccgtagtccatgccacgccgatggtgggctggcccttatatccgttacaccaagtcacatagtaacggtcatcgataaagcagacacgcgggtcataaccatatacccattcacctatctcgggaatatcacactggaactgcaacttctccggattgatgtcccaatgaacggcatccttgctgaatcccacatgaagcgccatccggcggtttgtatcatcacaacggaacactccggcatacccttcgccgaaaggtactaccgcactattgaatatactattggatgtaggcagcaaatcacggggaatgataggattcgcactacatctccacattacatttttacaaccttcgggacgctcctcccacggcataccgggcaacggattgcccgcaatcttcaattcactcatattctcttttttgttaggttaatagtttttctctatttcttgtcttcgtgtgtgaagggtacaaaccaggtcatcagaaaggccggaatggtagccaccagcacaaagatgaaaaacagtttatagcccagccagtcgctgacatatccggacatcataccgggcaacatgacacccagattcatgatacccgatgcaaaagcataatgcgccatctgatgaggaccggcagccacttgctgcatcatgaacaaggtaagccccacaaagccgaaaccatatccgaaatactccagcacaatggcccctccgataaggggcgcactctgcggttggaaaatggcaagcagcgtgtaagccataaaaggcagattgaacacacaacacaaggagaacaaagtctttttcaatccacgtgcggaaatataatatccacccagcaatgaaccgagtacgaaagctgccgctccgaaggttccataataaataccaatctcctgttctgtcaatcccaagccacccacatcacgaccggctttcaggaacaaaggtacaattttcatcacaaacccttcggcaaaacgatataaaataataaagcaaatgtagtaaacaatatgctttttcgtaaagaagttccggatgacattccataactcggtcatactctgcgaaaaagaggtgaccgaatgggcgtgcttgcccgaaggtaacatacgggtatgataaattcccaaggcgaacatcactactccgaggataatcataatgaccgtccaggaataaagtaccgcatcttctgcaggcccttcgtattcatctttcagaaaaccggccagatagaccagcaagcctgtaccgataatcttcgccacattataaaaagctccctgccaacctatatatttagcttgttcctgcgcattcaactcgtccatatatactccgtcacaggccacatcgtgcgttgctccgctaaaagcgacaatagcgaacaaggcaatagtgaccgcaaagaaagacggaagatgaagcgacaaagcgatcaacccgaaagtaactcccgacaccatctgagtgaggacaacaaagaatttcttggtacggtacatctccagcaacggactccaaaggggtttcagtgtccaaggaagcatgataagggaagtccagaaggctattttcgcatcactgactcccagacctttgtacatcagtacggctaccatattgaggacaacaaaagggagccccataccaaaataagcggtgggaacccagaaaataggactacggcgtctggacggagttggggtttcggttgttttcatttatatctaagttttaaggttgttgaattcggctataaccgaagataacttcatctccttctgagaggggatgaagttacctttcggaatctattaatgcaataggacgaagcatttggtaaatcagtcagttacaggaataaagcttaccgcttgtccaccaccttttgccatgactacagacaaggtatcggctgctgtcacctctctgtccttaatctgataagaagtaggatttgttttccagtcggcatcttctccatcagcataaatcaccgcatggtattttttatctttttcaagaaaatccaaaggaatggtcagcgtacgtgcttcctcattggtcgtagctcctaagaaataattatctttcgctttccgtactacggctacaaactctcccggttcgccctgcaaggcttcagaccagtcacagtccgcatcaaaatcccggaagaactggaaagcaggatgcccttcataattctcaatcatatccgatgccatttgcaatggagaataaatgattacccaattggcaatctgctttgccaaggtggtattcacacggctgtttcctttatccaagtcattccatttcttgcggcggggagaattgcgtgtcttttcataaagaatatcaaaagtacccggcgtataatccatcggaccgcccagcaagcgggtaaacggcaataactcgtgatgctcgggaggattaccttcactccatccgttccactccataccgcgggcgccttcccgtgtcatcatattggggtaagtacgacgaattcctgtatctttgataggttcgtgggcattaacggttgtatgataactggcggcagtctgcaccaccttgcggtaatggcgtacattgaactgtccatgatggctatgaccgcccggcagtcctccggcataaccggtcttcacgctgtgcactcccaagtcggcataccatttgtaagcattgtccaactggcgttcgtaattaaagatattgccacctgtttcgtggtgaccgattatttcaatccctttctccttggcataacgtgccacctctgccatatcaaaatcggcgtagggtttggtatagtcaaaagtctgcataccgccccaactttcccagccttcattccatccctcgaacattaccgcttctatgttattggcagcagcaaagtctatataacgtttggcattagcggtggtggcgccatggcgttcatccatcgtccacgtttcgactcccagatgcattccccaccagatacctacgtatttcataggacgtatccagctcaaatccccctccagcaaacaaggctcattcagattcagtatcaggccggagtttatcagacctaccgctttgggagctatctgaatactgcgccacggagtcacgaaagtccctccggcaaaacgggctttcaccccatcgggccaggaagccagttccgatttgaagtgacaaccttcggtatgcttcaaagtcatttcggggaaatcggtcaaagctgcttcgtggatactggcatataccccgttatctgttttgaaagtcatcggggtattggcattatccaccttgctgacgggcagggtgcgatacagcaattcgtaggtttcaaaactggcgggaatagaccatgacttgccgccttgtgccaaattaaatgaagtgagctcatccattacgaacacactgtccacttggggtacttgatattcatagcggaagcccaggccgtcatcgaacacgcggaaacggagggtcagctgtgtatttgcctggtctttcaaacgcacggccacttcgttataatggttccggattgatttattttctccccaaggttgggtccaagtttcatcctttgtggtgtactcggtactttctatcagaaaacctttggaaagatttaccccgtcacggccttcaaagcccataacggagggggtgatgaatggattccctcctacagaaactccgtaggtcatctctcccgcttcattgagattgaatactaattttatattgccatccggcgatgtcaattctgtggggcgagaacacccacaaaacacgactaacaaaaataatacatagtaactgtatgccttcataatattaaattggattaatgatacaaatataaaacaattaaataaggtattacacttatcgaaggaggaaaattattttaaatgggagagggaatgataagcttatttgtactgacagcattaattttgtacttttgtcacatataacaaagtgcaaatgaatataaatcagaattatagagaagcagtaaaggccataaaagaagctatcttacgaagccagtaccgtgcagccgcatcagtaaataaggaacaattatctctttattacggcatcgggcattacgtgtcggaaaattcccgtacaggcttttgggggaaaggtgccattgaacaaatatcttctctgttacaaaaagaattgccggggctgaggggattttcagcaacaagcataagaaatatgcgtattttttatgaagagtgggataaggttttaaatcatccgccattggctgatgatttggtgttgaatgaaaaattgcttcttgtagcaattcatcagccagtggcggatgaatttaattggtcagacttcttttcaatcggctttagtcaccataccgaaataatatccaaagccaagactttagaagcaagactattttatatacatgagtgagccattcgctattggagtaaatacacgttaagggattacttaaaagcagatctatacagccatcggggaactttacccaacaattttgcacaaacattgcctgatactaagcaagcgctaaaagctgtttgttcattcaaagatgaatacttgcttgatttcatcaatgtggaggaactgaatgagcaggaagaagacttagacgaaaaaatagtagaaaaggcaattgttgccaatgtgaagaagtttattatgaccttcggacaagatttcagctttataggcaatcaatatcgcatggaggttgcaggagaagaaatgtttattgatttgctctttttcaatcgggagcttaactccttagtcgcagttgagcttaaatccggaaaattccgcacttcttatttggggcagttgaatacttatctatccgctttagatacatatatcagaaaaccgcacgaaaacccttctatcggaataattctttgcaaagaaatgaaccaaacctttgtagagtttgccgttcgtgattataacaagccgatgggagttgccacttaccgtgcatctaaagatatgccggaacgacttcgtaacgctctgccaaacattgaagatttgaaaaagttattgtaatacaaacgccgataaagcccttttgaagactctaccggcgtaagttcacctattaaaaaaatcagaattccaagtcagccaactgaggattatgatcggaaagcaaagcttccggtacttcagccggtatctcacagttctttaccagaacttgcggagtgacaaagatgaaatcaatcttttcacaatcctcggccggaatacgggcaaaatcatgaaaagtataatcaacgccggtcacacgggcagccgtcttataagcatccttcatcacaaactcgttggtagtgatcgtttcgtatgcatcgctcgcatcggtcacattaaagtcacccgtaaccactgcggggcgttcgcctacgatctcttttatcttacggataatgagcaatgcgctttgacggcgagcctcttcacctacatggtcaaaatgagtattgacagccatgaatatctttccggtggccttgtctttaaatttcgcccaagtggcgatacggacacaaaccgcatcccatcccatcattcctacgctatcgggattttcggccaaccagaaagtattggagtccaacacctcatatttgtccttacgatagaatagcggcgcatattcacctgctgtcttcccgtcatcacgtcccacgccgataccatcgtattcgggcaagcctgcacgaagatcctgaaactggttatgcaaaacttcctgcataccgacaatatccagttcacggtccttaataaactggcacacacggtctttccgatattgccaattgttcaaactgtcttgcggattgtcataacggacattaaaagtagcccaacgaacgtcggtcttcttctcttccgcacagccgcccaataacaggacggctgccaataaaaatagaatttgcttcattttgtttctttttatgttccctaggatacaaagatagcaatttctatcggaaattattcggagtatgccactgacctttatcattcatcgtatcggccacatcccaccatacacggctaccctggttcacattgcccggtttattagggttacgggactcgctgttaggatagttgatgcgtttgataagcttgccggacgccacttctccattggaattgtttccattaaccggagccagcagataacgcggatagtcggtacgacgcacttctgcccatccttcatttccattcgggaaaacggcaatccacttctgagtaataatctgttccaattgttcttccttactaccaccggcaaatgcttttacgccatccagatgactgatgtattcattggccttgtccgcatcaatttcataataatccatagatgccttgatacctttcaaataaagagcttcagcagtttcatccaccaatgacggccagcgcaatgctgcttccgctttcaggaacaaactttcagaataccccatccagactatttcacgggccagattccaccaataatccttgttcatggcatcagatgacagaatacaacggttggcagagtatctgttcagataagagccacctacattggtttctccattcatcaccccgttgaaatctctcttcagattctctgtgggaagcggactggtagtcaacgaatcaaacggagtaggacggaaccataaaacttcacaacgagggtcgagataacaattctcagaattctcattgaaagtaacggcatcggctgccgcaccttctttcaaggcctgattcttataagcccgttccatttctttcgacaatacagcattgccggtccagctgaacaacaatgcgtatatattttcattaccgccggcgatatactgacgttttggagtctgcttcatattgtcatcctggctttgcatcagaccggccggatctgtcaaagctgcttttgcctgagtctgggccaattccggatttacattggatacacgcaaagcaaggcgcaaacgcagtgtgttggcaaaacgacgccatttgtccacatcacctccgtagcatttgtcattgtcacctaaatcatactgactgacagcaggaagattttcctggtgcaactctgttatagcctgatccaacagctggaaaaggatattatagacctctttctgaggcgtataagacacattttcttccggcggcatagctcccttcacataataagcgacgggaatatctccgtaagtatctgtctgcatggacaacaagaaagcataataaatgcgggtaatatagaatgccgtatgataataatccttattacagaaatagaatgtcttgaccaactgactgtattccgaagtgctgcggtcatcatagaaatgcttccatcggctggccgaccatccatccgtataagaataggtaggcgcctgattcacaaagccgctgacattgtttccccaataaccggcatagatatcatgagtcagattggtcgttgtctgataatcattgtaaagaccttcgtaggtgaaattggcaaaaatacttccgatagcgccttccatccctttcaaacttgccatggcattgtctgtcaaggtgtaatcaatgtctattccatcggccgatacattctccacagtcgggtcgtaaatcggtgcgtaaggatttgtattcaattcctcaaaatcatggcatccggccagagccagcaatgagcataaggctacggatttatataatttgattttcataatcagtttttccttttaattaattagaaacctaagttgatagaaataccgaaagtacgtgtaaacggcaacgatgcatagtcaatggcttgtgagaacatcgtagtgtcatagccgccttcggggcttgtacccggcgtgtgcttcatcagataacacaagttacgtgctacaaatgaaacattcagcgagttgacaggagtcttcttcagcatagatgaagggaatgaatagccgattgacaattctttcagtttaatgaatgaagcatcgtagatgaaatcctcagcctgcaatgagccgtagtattctgaggcggaaacctgttttgtattcacctcgcctgattctgtcacaccggggaataccatcatatagttgttttcctcaccacggttcaaggtacgcttagccaaaccgtttccggtagccagcatctcggaataagagaagatatcaccaccgaatttcatatcaaacagtgcagacagtgtaatccctttataagtaaaggtaggagatacagacatggtcagcttaggctggatattaccgataggtttgttcacatattcagactcattggtcacagtcatgggcaaaccattttcatttacgataatatcaccgttttcattgcgcttataaagcgatgtagcataaatctcgcctaatttgtgtccggcgcgtgtacctacttttacagggaagtttccatcaccgttaaagaacatatagttcacattttcttccggagccagttctttcactttcgatacgttgtgagccatattcacattcaaatcaaaagcgaaatcctttgtttctaccagagtggaatacaacataaattctacaccttgattggttaccatacctgcgtttacccattggccaccactccagggagctgctgcgggcactttcataatctggttctttgttttgctgtaatagtaagtaaagtcaaagcccagacggttgttcaagaacttcatgtccagacctgcttcataagaggtcgcgatttcaggcttcaactgatcgttcatcttcacattatccttggtcggagtcaatacaccattatcgaatttaaaagagtaggtgttgtataactgataagggcttgtgtccttacctacctgtgcggcagacagacgtgccttggcaaatgtcacccagcttggcaacggtttgtcgatggagcgcaaaaagtcggaaaccacgaaactgaggttggcagacggatagaagaaagaattgttacctgacggaagagtggatgaccagtcgttacgagctgtcaaatccaaagacagatattccttccatgccatctgtacagagccgaacactgagttcatggcacgcttgtaaccatcctcactaccggttctcagcaaattggccgcattcagcatccaattacctttatccaccatattacctacgcccacacccaaagtttccgaacgctggtacataaagttaccaccgacattgaagcccagacggaagttatcagtcaactgacggtcacccatcaaaatgacttcagcatttgactcgaagaagttttcttcactacgatccattgagtcattcgtaatcatggaagtattggcttctccattgataccatcacctgcattggtgctttgcactctggtgcggtagtagtcaaaagcgtatttggcagacagatgcagccaatctgtgaaattgattttcatgctataatatccgaaagcacgccagcgttcatctgaattctgacgctgatgcaatacataataaggattacggatactggcagtaggtcctgtccagttcacatgcgcatgagtttcatcagaatattgtttcaagtcatccagacggacgttgttagggattctcatcaactgggaaatagcaccgtaatcaccatacagtggacggttatcggcttttgtacgtgaaagagaaatctttccgtccatagacacccatttgttcaattccgttcctgcattcaggtcggcattcacacggctcaaactttcagtggggaatacaccgtcattatctgagtatccgaaagaagtacggaaatgtgatttctctgtaccgttgctgatagatacgttatgcgtatgcgagaaaccagtatcaaaataatctttcaacttatccccatagttagagtaagcgtaagtttctccgttccaagcctctttcatgcttccatccaataccggaccccagcttccgctatccgttttgtcatacaccgcagtcttggcatcttttgtatcaatatgtccttgtccgtaacggcgttgcatatccaatgtctcgccgatagctgtccaagtgaagttaccactataacggattccgaaaccatctttcttactgcctttctttgtcgtaatcaagataacgccattacctgcacgcgaaccgtaaagagcagccgcattcggacctttcaataccgaaatgctctcgatgtcatccggattaatgtccatggaagcgctaccacggtccacaccaccataacgagatgcgtcggatgtagtgttgtcgctgaaaggaacgccatccacaatccataacggctggttgttatcggtaagagaagagttaccacgaatggtaattttcgtagaaccacctaaacctgtagccgaagtattcatctgaagacctgccaccttaccttgcaaggcactggtcacagacgggtcacctgtcttgttcagttcatcacttttcagttcctgaaccgcataacccaacatcttcttctcacgtttgatccccaaagcggttaccaccacttcgccaatctgctgtgtgtcttcctgcatggttacgttcagtacattcttgccatcgggcttcaatgtttccgaacggtaaccaatgtatgagaacacaacctcgccatttccgggaaccgacaaagaatagttaccttcaaagtcagtaatcgtaccggctgtagggtttcctttcacttgtacgtttacaccaatcaaggcctctcctgtcgcatcaaccactgttccggtcactgtatgctcctgtcctgtctgttgaggtgtctgaggttctccgggtgctgatagatagacaatattatcctctatcttgtaggtgattcccttgccttgcaaagctgcatcaagtacagactgcaatgaaccgttctttacatcaatggcattcaccggcgtttcagccagtttgtcatcatagaaaaactgatagttagactgtgatttgatgttcttgattaccgctccaagagttgtcttgggagttgaaagaacaatttgtgcgcgggtccattgcatgggtgcagccacaaacaaaagaatcaaaagcgccctgagtaatttgggctttctcattaattgattgcctttcataatttattaaattagttaacactgacttatttttctccagtgaaggggttctcatgcccctttcgagaataaaaacaggcagctaaaagaaaacacttactccatctcgttcttttttctaaattttctagaaaaaacagaggaaaggcaaaagtagtgatatcatcggactttgacgtatagaagaaatatttaaaaacaaaaaggggatgtactcttgcaatgctgccaaaagagaacatccccctccaacctctctttacaagagagaaatgcatggtgaaacttttatttcattgtttcgtcttttgaaaatgaataaggcaaatcactttcttgtgttccacgttgcatattcggacggtcggtcatcttgaaatcgataacaccaccttgtaacaattcattgtgtttcaaataattcttggtataaacagtaccgtttacacgcatttcatctacatatcggttggtatcgctattatccggtgcggttattaccaagttctttccgttttcaaaatgcagtgtcgctttcttgaacaacggagcacccagaatatattcatctgtaccgggacataccggatagaatcctaatgcagagaatacataccatgccgaagtctgtccattatcctcgtcaccgcaatatccgtcaggtccggctgtatacatacggttcatcacctcacgcaaccaatattgggctttccaaggctgacccgcataatcatacatataaatcatgtgctgaatgggctggtttccatgtgcatagttacccatattcataactgtcatttcacggatttcatgaatcacctgtccataatagctatcatcaaagatagggggaaccgaaaagacagaatcaagcatggtaacgaacatttccttacctcccatcaagtcaatcaagccttggggatcatggaatacagaccaagaatagtgccagctgtttccttccgtaaagtcacctccccacttcaacggtgagaatttaggagcgaatttgccgtccttctgcttgccgcgcatcagcttgctttccgaatcaaacaggttcttgtaattcatggcacgcttggcaaagagtgcgatttccttcttcggacgtttcaattctttcgccagctgataaatacaccagtcatcgtatgcatattccaatgtacgggctgcattctcatgaatcttcacatcacaaggcacatagcccagcttgttataatattcatatcccagacgtccggtagaagaaacttcaggatgtacagcttccgttccatgaatcagtcctttgtataatgtttccacatcttccacacgtactcctttcagataagcatcgaccaagatagaagctgaattattgccgaccatgcaaccacgatgaccggggctggcccattcggggaagaagccgctttccttataagtattaatcaaaccttcctgtatttcctgatttaccgaaggatacatcaggttcaagaaagggaacaagcaacggaatgtatcccagaatcctgtatccgtatacatatatcccggcaatgtttccccattgtaaggactgtaatgaacaggctgcccattggcatccagttcatagaatttacgcgggaacaacaaggaacggtacaagcaggaatagaaagtacggtattgatccaatgttccaccttccacttctactttacctaagacctcattccaggcatctttacctttctgtaccaatacttcaaaactgtctccacccaattccttcagattctgaattgcttgttcaggactgatgaatgaagaagcgacacgggcatgaactacttcgcctttctttgtcttgaaaccgataacggctccggtatggaaatcagtctgctccagtttaccttctttcaaggttacaggaacactgccgtccggtttttcaggctgtacatcgttagagaacgtagcctcataagtaaacggcttatcaaactcaataacgaaataattcttgaagttggcaggaacaccaccactgttgcgagtggtatagcccacaattttgttttctccgggaatcaccttgatagatgagccacgatcaaaagcatcaaccactacgtatgagtcattttcaggaaaagtaaagcggaacataacggcacgttccgtaggaaccatttcagtcaccacatcatgttctgccaaataaaccttataataataaggttttgcaatttcagctttatgagagaaccaacttgcacgcttgtcttcctcaaattccggttttccagttacgggcatgatggaaaattgaccatagtcattaatccacggactgggctgatgggtttgtttgaaaccacggattttattagccgtatagacatactgccatccgtcccccatctttcctgtctggggagtccagaaattcataccccatggacgggatatggcaggataagtatttcctgtagagagttcaaaggaagactgtgtacctaccaacggactcacatagtctgcataatcctttgcctgcacaaacagtgtaacacacaggactgcaactgatagaaataattttttcatgatattgttatttgggttaagttatactttttaattctttatctgttttccccattccgtcggtacggagctcatggtaatctccatcgttcccccacgtactatgtcattatgggtaaagaaaggaacatccagtggttttccgttcaacagaaccgactcaatgtacttattggtcttcgagttgttgtgggtacggataacgaaagtcttgcggtcgggcagattaatcgtcacctcctcaaacaacggacgtccgatagaataaaccggcttgccgggacatacctgatagaagcccatggagttcaaaatataccatgcagacatctgaccgcaatcttcattacccgacaagccgtcaggagcattgaaatactggttatgcagcacactgtcaaccaattcctgagtacgccatggacggtttacatagttatacatgtgagtaatgtgatgactcggctcattgccatgcgcatactggcctatcagtcctgtgatatcagcagaggtagcctctccttccaactgggaagaaaccgtaaacaaagaatccagctttccaacgaaagcatcctctccacccatcaacttcaccaatcccggaatatcatgcggaacaaaccaagtccactgccatgcagttccttcacaataatcatcattacggtgattggaagaacggggattgaacggggtacgccattcacctttactatccaatccgcgcatgaaacgggtggcaggatcaaaataaaattcgtacgcatccgcaaaacgggcatatttctccttggtttcagtatctcccaggctgtctgccaacacggaaatacaccagtcatcgtatgcatattccaacgctttcgcaaccgattcattctcacgatcacacgggatatagccaagggtattcttatagtaacgagctttaggcattacataaggaatcagccaaccgggagcgacaataccggtcgtatcatattccgccgcacgcaaacatgccttgtaagcttcctgcacatcaaaatcgcgatatcccttcacataagaatcggctaccaacgaagccgcatgataccctaccatcgttccggtataattggatacacaatcccatttcgggaaaataccaccttcttgatgcttctttatcaatgaacggataaattccgtattcaactgaggatcgacaatagtcagtaacggatgtaacgcacggaaagtatcccacaaagagaaaatggtataaaccggatgtttcatgtcggtggtatgcactttcaaatccattcccaagtaacgcccgtctacatcagtaaacagattgggacttaggaaagcatgatacatagccgtatagaaaatggcacgctggtcttcattattggttttgactgcaatctttgacaggcattcattccatttcttcttagcatcggcacgcactccatcaaaattccaaccgggcatctcagcctggaggttcttataagcaccttccgcatcaacagaagagatagagaacttagccagcacttgttcgtctttcgccgtttcaaaatgcaaaagcattttgcatacaggaatctgtttgtcattttcctgaacagtatccgtgtacaaagtatacgtgaagggtttggaaaatacggcataaaaataaagatcctgccggtatgcccaataggcactgcgtttgcgcccccacaacacagtatcattcacagcctccacttccatgacctgattgatttgttgctgaatattatagtccatatccaagataaatcctgactccttactttccgggaaagtataccgatgcattgccgcacgctctgttgaggtcagttcggcttttaccccgtatgtatccaggaagacagaataatatcccggttcggcatgttccttttcatgagaaaaagccgatgcgaaaggacgcttctggctttctgttcccaaaaaatcagtgcgttgcacacctacagtcggcatcaacaggaaatctccgaaatccgcacacccggtaccactaagacgtgtatgggcaaagccattgatcgtagtatcttcataataatatccggaacaggaatcccaaccgtcaatacgagtatctggtcccggctgtatcatgccatggggaaccatagcacccggatgggtatgtccatggcctcctgtaccaataaaagagttgacataatgggtgtaatcattcatttcattgccctcagaatcacatgcggtgaaacacaataaccctagaagacagccgcttaagagcatgttgattttcatagttctttatttaaaaattatttcgtttccgatgagataaatatattgttatcatctactttcttataattgaaaggaatagagttacgcaaagaattcagcacagactctatattatctttctttttcagcactcctgaataagtattggtactgtctacatccggtgaaaggataatcttcaccccatagaaccgttccaatgctgccgcaatctggaaaatagatgatttttcaaatggaatcaaatcattatgccagactatctccatcttgggatcgacctgttttacctgcatccgccctgtcaccctgtttaaaacagccttttgtcccggtaacaaagtaattctgcctttatctgatttatcttttacctcaacttccccctctaccagagtcgtttcagcaaaactgttatccggacggcattttatattgaaagaggttcccaagaccctgacatccattgcctgactttttaccgtaaaaggtttctcatgattacgtgccacttcaaaataagcctccccatccagatatacatgacgttctttaccttcaaaagcacgcggatattttaaaacagacgactggttcaaccatacttttgtcccgtcaggcaacaacatctcacgcacttgtccatgagcagccgatgctaccaccaattcctccgctttattccggaaccaataggccaatcccgcagccagcactatcacgcccactatagcagctgcataacgcaacacactcttaagcttgaacacctcctgtctcttttgattttcctgttccaatcttctacccaacctgcgctctgccttcgctaccagattttcctcctcaaaggggaatttacctaactgataaatctcctccatacggaataactctccggcattctcatcagattctttcatccattcattgataagaacaaaatcctcctccgagcatcggttttccaaatacctgataataatatcttcgttaagtttactcatctttttccctattcatatagtaaacaattcaacttgtaaaaacacttagcagttttgctgaaaatataatcaatgacaataataaatggctgagacgttcgcgcaaaaatttcaaggccttatacatatgtgcctctacggtacgtaaagaaataccaagagtatcagcaatttccttgtttttcatatcatgaagataactcagtttgaacacctccttacatttatccggcaattcattaatcgcttcaaaaatttcctgacgtaattcctgattctctatctttttaataacttcagcatgatccggctggtaatattgcaattttcgttcatagatttctatcattgccgcactgtagttgttctctataacctgatgcttcaataaatttatagccttggtatatacagaacgataaaggaaagctaaaatctgctctcctatgacgactgaatctctccgcctccacaactccacaaaaacatcctgcactacatcttcggcttcttcggtaccgaccagccgtgtcgcataaaacaacagcttaggatagcattgacgaaagacggccttataggtgtcatcaagttcctcgttcatattatataattcacctttgtatgaggagggagccaatgttccaaataacgatccaatcatccactgcaggggtagaaagcttccgctcatcatacaattttcacgcagattcaacccgcctctacagcaaaacgataacaacaaatatcacttttaactcacctcctgtacaattcttaataagttgaaccaattattatctataccaaatatttcccggttccggacccatttcaaattctacagtagcaccgtccattatttgccggtgtgtgatatagctcttatcgtatggttgcccatttactttcaccgactggatatagatattttcacgacttactccaggggccagtactgtgaacgtttttccattatccaaatgcatctgtatttcggagaacaacggcgtaccaatctcatattcaccacttaccggattgacaggataaaatcccatagcactgaatacataccaagcagacatctgtccacaatcctcattaccacacagtccggcaggtgcattgaaataaaggtcatgcatgacctgcgccgcatacttctgagttttccaaggctgacgtaccttattatatagataaatcacatgatggctaggctcattaccatgagcatactgaccaatcatacctgtactgaaaagaggcaaatctgcattactagccgggatataagtaaacatactatccaacttttctgtaaaacgatccttaccaccagtcaaggcaattaaccccttaatatcctgctgtacagaccaaaagtactgccaaccgttactttcacaaatatgggcagtgtagtcatccgggctgaaattaggttggaatattcctttatcatctatcggctgcatgaagcttgatgccggattgaacacattgcgataattctgagaacgcttgtagaattcgtccgctaattgagtcctccccatcttccgggccatttcggctatgcaataatcatcaaaagcatattctaatgtcttggaaagcgaccaattttccgcattatattcatcctttatattataaggtatatatcctaactttttatacagaccaatgccgcgataattatccaaattagcagtagtcacacaagcctccaatgccttctcagcatcaaaatcaccaatacctttcaaataagcatcaacaataacaggcacagcatggtagccaatcatcatatcagtctcacttccccaaaagttccataccggcaaacgtccgttctgttcataaaaagcaatgaatgatttcaccatatcattgacacgttgaggttccgtataagtaaataacggatgtgcggcacgataagtatcccacaatgaaaaggttccataattcacccaaccatccgtctgatgaattttcttatcgggaccataataagacccgtccacatcactgtaaatagtcggggcaatcatagtatgatacaatgctgtatagaaattgaccttatcgtccttgttgtcacctgttatttctatttttcctagctggcggttccaattatctttagtttcagccaaatatttatcgaaatcattgtgaggtgcctcagccgccatgtttttagcggcaccttccatgctcactcccgaaagagcagtactcagaacaatctgttctcctttttccgtatcaaaattaaagcgggcgatataagccgtacctacacgtttacctttcaaagtaatggcagtagtatccatctctaccgaagcaaacggtttggagaaacgagtacgaaaatacacatgctggtctcttgcccatccttcagaaaaacgatatccctgaatagtgcatgagtcaattatttcaatataagaatcattggtaaaatcccaattcatcgctttcttcagattcagaaagacagccgactccccttcaggaaacgtataacgctggatgccgcaacgctctgtagcagttaattccacattgatatcataatctttcagcaacacgcgatagtaacctgctgaagcctcttcatccgcatgagagaatttggaatagatgcctaaaggagcttccgcttcctgataaggcaaagtaacaggcataaaagagatatcatacaagtctccggctcccgtccccgacaaatgggtatgactgaatccggcaatcgtactgtccggataaaaatagccggaaatacggtcccatccgggcaagccgttatccggactaagttgtaccattccgaaaggcgcttgcgctcccggataagtattgccggtaaaatcggttccgataaacggattcaccaattgggtataatcggttaacggctgggtttgtttattggatacacaggctccaaatgccactaaagaaatgaatagcgcgagaacaggtgttttcatacttaagaggtttttcattattactttgttacaaaaatacacattataataatacgaacaaccttattatgaaaaacacttagctttaattcattattttttcgtatttaaatagtaaagaagggattctttcaccttttcatccgaagttacaatcaaaaattcaccgcctcttttatcatacagaaagcaataggtcttataaagagctatacctgctatctcttcccaagggaatgtctgtttcagtttcgccttgtcatatgtcaacccttccggagttatttccacccaagtctgccctgcaatactccgcttataaattttatttagtctgacaggcagcataatcaagatatagataagacacaagaaccaaatcagcagcgggctgaacaggctttgctcttcgggaacaatatagtgccctgtacacaatgcaatacaaatataaatgataaacaacaaagaaaaactgaaatgacggatgtcccacaatttatacaaagcatactttttcaggctgatattataatcacaaaccacgacacctggttcccgtgtcagtttgcttttcggtatgctgaagatacgcaatatctggattccccgcttcacgccgtacccgaataataaaaccatcacaccaagatttatcaagatccaccaccacaatgattcgtttgccaaagccggttgcccgacaagcaccattgatgcaaaagtgatacccgccaccaataacaacatactacaaattacagttaaaatccatcctcttgttttcataataacctttttactttattccatgacgggaaacaaagataaaagattatggctagataacaaataaagagccgtcgaattattaatcacagaccatattatacataaaattgcctgaaagcaatcttatttgccattccttcacacctcgaatttaaattgttgtttggttaggaagttagaagttttttcgtatgtttgtcgcaaatattaatgaaaaacacatttctatctatgaaaaagagtgatattctgttctttttatttataatagcattgtttctgcccttttttattagtgataccatttatgaatgatacaaatctttcaatgcaatccatggtatggttatgagttttgtgaagttcgccattctagctactttgggagacaaaattcatctcttccctaccctacctttccaatactttccctacctttgtgccataagtacgtatgacaaataccaatatggaacaacaacaatcatcttataaagaaaaagaacgtatagaccttcacgagccgcgacgcttcaaagttatcattttcaatgacgactttactacaatggaatttgttgtaaagatattaactaccgtttttttcaaatcaacgatggaagcagaagctttgatgatgcaggtacataaaagtgaatcggccgtagtaggcatctatacgtatgatatcgcccggtcaaaagtacaaaaagccacccgtatggctcgtgaagagggattccctctccgactcacggttacaccggaagaagaataaaaaatcaagaataagatatggatataccaaataccgattcggtgaactacgctttcacttctgcgcagagccaagcgatgcaatatcggcatgaatttatcacgcccgaacacttattgagcgcattgctgaaacaagttccttttcaaaaagcattggcagagtgtttttgtaccccggaagaactgtcccagtccatttccgaatatctgtcaaaagaagtggaacgagttcctcaagaaatagaatatgaattggaaatttcaggtcaactctccgagctgctgcaatatgcctatatgacaatcagccattcaagcgcagaagaaatggatgttcctcatctggtacaaggaatgcttcaactggaagattcatgggctggctatctgttaaaaaaaacaatgggcgaagatatgccggaattcctcagcaccctcatttcaaattacgagcacatgaatcagtttcaagaggaaacttcctctgagcaagagaaaagcgagccttggcgtaactatgttacctgcctcaacgagggcctgcaagaccggaatccgcttataggcagggatgtggaattggaacgcaccattcaggttctctgccgcaaagaaaagaacaatcctctgcacgtgggcgaaccgggagtgggaaaaaccgcactggcctacggactggccgcacgtatagaagcaggcaatgttcccgaacgtctcacaggttgtcgtatctacgagctggatttaggcaacttattggccggtacacaatatcggggtgagttcgagaaaaggctgaaagccattatggaaggaatacggaaagaaggacacgccattgtatatatagatgaaatacataacctgataggcgccggacggacgggagacggttcgatggatgcctctaatatgctcaagccttatctggaaggaggagagatccgatttatcggctccactacttacgaagaattcaaccgctatttttcgcgtagcagaggattagtacggcgtttccaacagattgacatacaagaaccgggaatcgaggaaaccatccacatagtggaagggttaaaagaaaaatacgaaacgttccacggagtgatttatgaagaaggagtgatagcgtatgccgttacagccgccgcacggtacatcagcgaccgtttcttgcccgacaaggccatagacctggtagacgaagccggtgcttatcgtgagacccaccccacagatacagaaaaacaaacggtggacaaagcattgataaccgatatactggcacgtatctgtaaagtggatgtacttgccatgaaggaagaagacaatgccacattagaaaccttgcatgaacgcatcagtgcaaagatatacggtcaggaagaagctgtctgccaagtggtggaagccgtacaaatggccaaagccgggctactggacgaaaacaaaccactggcaagccttctcttcgtcggccccaccggtgtgggaaagacagaggtagccaaagtattggcttccgaactaggtatcgccctgcaacgctttgacatgagcgaatatacggaaaagcatacagtggccaaactcatcggctcacctgccggatatgtaggttatgaagacggtggactgctgacagatgctatccgcaaaactcccaattgtgtgttactgcttgacgaaatcgagaaagcacatcccgatgtgttcaatattctgctgcaagttatggactatgccatactgacggataacaaaggacgaaaagcggactgccgtcatgtgatacttatcatgacctccaatgccggagcgcaattcgcgcaccaagcctctataggtttcggcggacaggttgctgctggagaggcaatgttgaaacaagttaagaaaactttcaagcctgaattcatcaaccggttatctgcaacagttgttttccatgatatggattacggaatggcttctctcatcctaaacaaaaagctcggcgaactgagaaacaagctgtcggcgcgtcatgtagaaatggaactcagcctggaagcctataaacatctgctgaagctaggttttaccaaagaatatggggccagagaaatggacagggcaattgcctcgcatctgaaaccactgcttatgcgtgaaattctattcggaacattaaaaacgggaggcaaagtggaagtgacagcagagaacggacaattgagcttgcaagtactcaaaaagcaacaagcctaaatgaaaccagtaactcctccgtaggggcagacatacgagtcagcccctacaggagactgtatgtgaatcacacaaataaaaaacattatggtctttcaactaactcaaaaacttgttttccccaacccttactatggcgagccggacggactattggctgtgggtggtgacctctctgtagaccgcctcatccttgcctattccaatggcatatttccctggtatgctttccgtgagaaacagatacaatggtggtgtcccctgaaacgatttgtgattttccctaacgagattcacatttcccactccatgcgtacccttatgaacaaaggacgatacggagttagttttaaccaggcatttcatgaagtgattcaaacttgcggtaatctgcggatggaagaagcgggagcatggttgggagaggatatcatgaaagcctacacccgcctgcatgaacaaggttttgcagccagtgtggaagtatgggaagaatcttgcctggtcggcgggctctatggagtcactttgggaaagtgtttttttggtgaaagtatgttttctttggttcctaatgcgtcgaaactagcgcttatctatctggcacaaacatttcaagaattgggagggaccttgatagattgtcaatttgagacaccacacttaaagtcaatgggtggaaggtatatagactatgaggagtatatgaggtatgtgcaggaacctttcgagtctctgtaaatgtctcttttttaccaattttgattatcaaatcatcagtctgaaataaaatataggatatagagctaagattatcaaatatatttgctaactttgttttcgacattacaaacagaactatttaccaagcctcagaaacaatatgaaaaagagattctactgtttgctacttaccttctttgctttgtcttgctccaaagaagaggccgatatggatggtgacaaaaataaagaaacagaaaataaagacataaaaattatattagaagcagaaaaaagttctcaaaacatatttgctcctattgtgttctaccaatcttttgattttggtaaagatgcaccttgtttaagcgaagtgtatgattccatagtgtggaaatcatctcattccccaaatagttttaaagtattcagtcattcaaattacgccagatatgtggaaacaacattcttcaaatgggcacatgtttattactcacccggcacatacaagacttatctgctaggttacaaaaacaatgaaataatctatagtagtgatacaatatccattgatatcacaaataaaaaagatttcctagctttcaattggaaagacgtaaccgactccagttttatcacaggctatgcaaataatctagacgaatatcatctgagtacacagactcatatccatcaaggtattccatctgttgtgctgtatgctagaagtgagaaatatgaaaaagggggatctataaaaagtaaacagatactgtatgactacataaattcatttttctcattacctaattataccgcaacctcagacgaatctttgagaaaagaattcagcactatattttcatttcaagaagagaatgccattccactaaacatttggcttacccccaaagctaaaattgtactcctcagaaaagatttcaagggactagagagcgaatacaaaatttatgccgaaccaggagatttgatttaacctgcaaaacacaattgtttaactaatgaaacatcaactctgtatatagctacattcaacaaatagcactacctccccaagctattcagctattctgacggatcttaaacaagattcgttacagagttttatacccctattatcaattcatacagattatgcaccatccccaaaccgataagtgcataagcatggtgtatacattaagttaaacaatgaattatacatatagacaaatatggctcatcaactttcccataatgatgagcgttttaatggagcaattaatcaatattaccgatgccgtctttctgggccatgtcggtgaagtggaacttggcgcatctgccttagcaggaatatattatctggtaacttatatgctaggcttcggtttcagcatagggctgcaagtcatgattgcctgcaggaatggagaacagaactatgccgagacaggacgtaccttctttcaaggactctttttcctttccggactagcgctctctttatatttgttgatacagggcctttctcccttccttttgaaacaattaattacctcaccggaaatctatcaggccataacggactatctggacgggcgcagtttcggacttttattttcatttccctttctggcactccgggctttttttgtgggaataacaaagaccaggaccttatcttggtctgcaatagcagccgtacttatcaacattcctttcaattatctattgatatttaccttaaagtttgggatagcaggatcggcaatagcctcaacgctggcagaaatggtatctttaatcattctccttatctatatgtggagaaagattgataaaaacaaatatggactacaaccggtagttgatggaaaactattgaaaagactgttttacctgtccgtatggagcatgctgcattcttttatcagcatggcgccatggttcctgttcttcgtcgccatcgaacatttaggaaagatggaactggccgtatccaacattacccgcagcgtttccaccctcttttttgtgattgtcagttctttaggaaccaccaatagttccttggtaagcaatcttgtaggagctggacaacgaaaaggtgtttttcctatctgccacaaaatcatcaaaatgggatatgccatcggtcttccactggtaggaatcgcattgctttgtaattattggattatcagattttacaccaacaatgaaacactggtgcaacacactgtcccccctttcatcgttatgctgtttaattatgtattcgcagtgcccggatatgtttacatcagtgctgtcactggaaccggaaagacaaaaattgcctttatctttcaaatggttaccattatggtatatcttctttatctttactggctgagccactgtatatatgcacctctagcggtatatatgacaacagaatatctgtttgtcatcatgttaggaatacaatctgtcatttacttgaaaaggaagcattactaagttccttgccacaccctttctcccgattcattccggcaataaatagttatttataactatcttcagtttgaaagcttttctctacttttgcaaactcaccataaaagatagcgtatgaatattttcgacattgccaaacagaatcaggagaaagcctggcaagttatcaaaaacacgaacatcatccagatatgggaagatgccggtgcaaaaattaatctggtaggttcactcagaacagggttactgatgaaacatagggacattgatttccatatttattcatcacccttgaacctagcggacagttttctggcaatggccagactagcagagaatccgtctatcaaaagaatagaatgtgccaatctactgcatacctctgaagcctgtattgaatggcatgcatggtatcagaatgaagaaaacgaactttggcagatggatatgattcacatccgggaaggttcacgttatgacggttattttgaaaaggtagcccaacgcatttcggaaattatgaccgatgaaatacgggaaactattctaaggttaaaatatgagacaccggaaaccgagaagattatcggagtggaatattatcaggcagtcctccgagatggggtacgggattatagcggatttaaggaatggagaaagcagcatcctattacgggagtagtggaatggatgccttaacccgatgaaatcgggcaatcagcttaacagccccgactcctgtcccaggcgtatcgcctccaaagagttgtgtactcccagcttacgcaacagattttgccggtgaatatggacggtatgaatactgatacataatttatcggcaatttctttgcttaagaatcctcgttggatgaggcgtaatatctccatttcacgtccggtaagactgacaaccggattcattatcaccacaccgggtgaaaacatttctccatttctcagattcagaacagtacattccacctgttctgattctttctgaccgggggccatactcatattccctataatgagccatgcttttccgtcatggctctgttccaaaacttgatgcctgcttgttacacgcacatagttaccacgagcattgagtatacgaaaactatatacattacaatagtcattccgatgttccaaaggctggttataaatgaacttccccagcctgacttgcaagtcttccaatagggaacgatcatgcggatgaatacgcgactccagataatcaccctgtttttccaatgtttctatcttgtgcctgtcataccccaaccaatcgacaaaacccgtagaagcatacgcataacatcctttatatacatccaccacgaaagaacagccgccattgattctagataacttccggagcatggatttatcccgttcccatactgcataatctatgtttttgcaagacaaatgttgctttgcccacaattcctcacgggtgacatctgttacactcatattcttactctttatcaaagtagtacttcaagaggatagatcttctcagcttactcacttacttttgtcaaagtaaaacagtcaatatccggagcccagcaaaatgaacttcccatacgtaccttattataccctgctttcaaatgcaccggaacagtaatcgaagctattttttgagtttcatccgccgacagcgaatcaagaagaatccttttttcattattcacacagacttccagcttacggtctgctttaggcacatagcggatagtcatttcgtatttaccgccttgctcactgtacacctctttccattctgcaaaattctcttttcgccctcccagatagcttaccttcatgcctccggatgcttcatgtaacggaacatatacgatgcttttcggagtctttcccaaatcattgaaacaaggcagataagcccattccgcttcataaacagtcggttccaacctcttttcggactccatacgtaaaatcagcacactatggggaggcaattcccgattcagaacacccccttttatctccggtaaatcctgctgtttcatcaggtctcgtaccttaacttttcctcctaattccaaaatattcatcggaactgtaaagttacaaatcgtgtccgaaggattgtataaagcaaccgcacgtacattaccacgcttccgttctatatctttcaccaacacatacccttcattttcatgctgaactacgtatgcctgtaatcctaaagggtcttggttcaaagctatcagttctttatttttcaacagttttaatgacgcctccggaatggttgtcagatcacatcctatcaacaaaggtgaactcatgatgcaccacattccaaaatgcacctcttcctcttcaggctttagcccccggcctatttccaacatatccatatcattataatgaccttctcccgcataggcagacagataaagatttttattgataatatactttactgatccccactccggacggatatccgcactgattcgccatgaacgagcaatgtttctagcccaagtacccgggaaagcccatcgacagatattaatagaaacatgtccgcaacccagattatctatagcctgacgaatctctgtatatcgcttttcctcttccaaattcaattcctgaccggctccgcaataatcaattttgataaaatcaaatccccactctttaaaatacaacgtggcatcctgaaattcatgtccatacaaaccggaacctattccgttcatatctttatcccagatagaaccacaagtattgcttcccgcatccgaataaatgccggcttttaatcctaaagaatgaatatgatcagccacccccttcaatccgttcggaaaacgttcgggatgtgtttgcatcactcctctttcatcccgccatccaaaaaaaccgtcatctacattcacataggaatagcccacttctttcaaccctttctgcaccatagcatccgcttgtcttattattaaggtgtcattgatatgaacccgataggtattccatgagctccaccccataataggagattcaaaaactgtcgtattttgggcgaatatgccggaacatagaccaaaagctaaagtcaaaaacaaatttctcatattcattaattctcattttttacttaaagaaatcatcaagaaggtatatcttatgatcctaatggttaacaggaaaataaaatcagttttatcatgtagagagcaaagataacgaaaaactcttaccccaccatatactatcccggaatttttcggcaggcaggatagcggccatcataatccgggaattagttgaactttaaatataagccaaactgacaaatatctaaaaatactgataggaaagatataaaagaaagcaggtaattacatatgtaattacctgcctaatgcgcttttaagtaaagttatgtactttctttggtggtgccaccaggaatcgaaccttttgcttcggtttattctaactccttg

SEQ ID NO: 14432 - DNA, 79132 bp, Unknown
  gut microbiota DNA sequence
atgtaatcttcactcttgactactaccttgtttatatttgtattatttacattgttaaacctgcaaagcttataatatctcctatattaggaaagtttacagatgtaagattacaaaattaaattataattatttctaaaagtgaattttctctgttttacgctccagcttgatcctatgaatattttgttttcctattttacaagtatcaatgtatttttcatggtaaagacaagaactccccatccaagttttagcccattttcgctttatgggattcatagataatgagaatcatagaatgcacgataagaggacaaagtatggattcaaaatttaaactaacgtatgaatttgcaaaaaataaattgtcgctgtttacttgcttcatctgcattctttccattcttcttattcattttactccgaaaaggctaaatactgccattattcatgtacaaacagacattccctttaaaatacgcgattctaagaaggcgaaaaatggtctatcaatctaggaataagcaagttaatactatttttctcatcatccatctctcatcatctagaaaaatagagaacaaaaacataactgtagcattaaatgaggtaataataaaagtatgaatgtaaaatattattctcaattgagtcatcaacaggatttctgctaagagaaaggataaaaagaatcccgacacttaaaaaaacaaaagcatcgggatagcggaatcttgtttgacctcgttagttaatgaagaattttgtatacaagttctcgcagcaaatctccatcctccaaagatggattacccactccttttgattttgcatcacagtaacgaatctcaccaataatttgcatcacctttactccgctatattttctcatagcagccatatagtctttagattgccatggtgatttaagccccagctgattggctataccctgctctgacttatcaggagcataatatgcaagcatcaaattagagaagaaattgaataacacagacaaggtcatttgcaaaggatttgttttggggttctcctcaaaatattttattatctgattagccttgaaaacatcctttgccaccaaagcattcctaagttcaaaattattataatccttacttatgccaatgttacgttctatttgttcaggagtaatccgcttttgctctcttggaagcgtgataattaatttttccaactctccggccatacggcttaaatctgctccaacaaattccgccatcatttctgaagccttaggctctatttctactgaacgacgtttcaagtaagaagatataaagccaggaagctgagcatccttaatctttttcgattcgaaaaggacacctactttctctatttcagctgccaatttttttcttctatccaatgtaccatgtttatggcataacaccagaattgtagaatccaaaggtttctggagataataagcaagctcttcaatattctttatattctgagcttcttttactattacaacttgatatttggacatcatgggataacgcttggctgcattgataacagtcgcgatatctgtatcagccccatagacaatagtctgattgaattctttttcattttcatttaacaccgtttgtgctatatactcagatatccgatctatataataagattcttcacccattagataataaacaggcttatagatacggtttttcagttcacgggctatttcttcgtatgttgtttcttttgccatacacagtaaaattaccagtcaaattttaagtgcttgactgttttcttttcctcaataatcatttgtaatgaagcaataccaatctccacatgctcctctacatattgctgcgttacaatactgtcgcttttctccgtcttcaccccttcaggaatcatcggctggtcggataccagaagtaatgctccagtaggaatatgattgtaaaaaccggtagtaaacagcgtagccgtttccatatccacacacatggcacgcgttttaaggagatactttttaaacccctcatcatgctcccatatacggcggttggtagtatataccgttccggtccaataatcgcgggcatggtcgcggatagccgacgagacggcacgctgcaacataaatgcaggtaacgcaggtacctcaggcggataataatcattggatgttccttctccacgaatagctgcaatgggcagaatcagatctcccaacttatttttcctatctatgcccccacatttacctaaaaacaaacatgctttaggctggatggcccctagcaaatccataatgatagcagcattgggacttcccatgccaaaattaataatagtgattccttccgcatgtgccgaagtcatattggcatcacgtcctagtaccggcacattaaatttgtcggcaaaaagttccacatatttattgaaattggtcagaaggatgtattctccgaaatcattcaagcttctttttgtgtagcggggaagccagtttgctacaatttcctcttttgttttcataatcttttgtatttttgcatcggttattaccgagttacacttatgcaaatttactaaatgttatcattaaacttaccatcctacgaaattaaaatcgcggagcgaaatggaaaaaatgttattttcgatatgctccgcaagagatatgtcgcccttactccggaagaatgggtaagacaacattttgttcattacctgacggattataaaggatatccgaagggattactggccaacgaaatacaactagacttaaacggaacaaaaaaacgttgtgatactgtgctctacaacaaagatctaagtgccaaactgattgtggagtacaaagctccacatatagaaatcacacaaacagtatttgatcagataaccaggtataacatggttctgaaagttgattatctgattgtcagcaacggattgaatcattactgctgccatattgattacaatacaaaaacatatctttttctaccagagattccccactattcagaactgtagatatataaaaaacattctaagcaacatctccttacaagatcttgctcagaatgtgatgaaattctttttccacaaagaaaaagatactgcttcaggcgatattatctcttgacagtttccaagtgctgttcagcaatcacacctgccaattcagggtcaatcatgatacgaccacaatattcacatacgataattttcttacgcatacggatatcaagctgtttctggggcggaatcttgttaaaacaaccaccacatgcatcacgctgaacatacacaattcccaatccatttcgagaatttttacggatacgtttaaacgcctgcaacagacgcggttcgatagttgtttccaatacttttgctttctctctcagcttttcttcttcctgcttggtttcagaaacaatttcttccaattcggatttcttcgcttccaagtccttctttctttcatccaagtcttgattactgtgctctatctcctcgctctttgctttttccgctgcaatatattcctttatgcgtttctcgcaaagctcgatttccaatgactggaattcaatttcctttgtcaacacatcatattcgcgattattacgcacattatcctgctgagctttatatttttcaacagaagtcttagctgtctcaatttcaattttcttagtcgcaatgtttgatttcagttcctcgatatcagctttaattttctcgatacgagtactcaaaccggcgacctcatcttcaaggtcttgaacttcaagaggaagttcccctctcagggtcttaatcttatcgatttcagacaacatggtctgcaactgatacaaagccttcagcttttcttccactgttaattcgctcgggtctttctttgcttctctagccatagttttttcttacaaatatttaataggatttgtatttacccgggttatctggacttccagttccggaaacatctcctgcatgattgaataaaatatttcttttgtatactgctcactctcataatgacctacttcagctaccagaatattattctcgtaattgaaataatcatgatatttcacttcacccgtgataaatacatcagcatcggcacttaccgctttaggcaataaaaatgctccagcaccaccgcataacgctactttctgtatcaaacgaccagataaacgagtatgtcgcagacagcccacttcgaacgtcttcttgatgcgtttcaagaaatccagttcggtttcaggttcttccaattctccgatcacccccgaacctacttgtgtccaagtatttttcaacggataaaaatcaaaaaccggttcttcataaggatgtgttgccaataatgcttttaccgccatagcctttttaaaagccggaagaatcgtttctatacgcacctcggactccttatgcaattcgcctatttctccacagaacggactggctcctttctgcgcacggaaagtcccctcaccttccaaattatagctgcatgaatcataattacctatgcaaccacaaccggcttcaaataaagcttttctcactctatcagcctgtgcatccggcacaaaagttacaagcttcaataaatattcttctttcgggtctaatatgcgtacatttctgagacctatcttttcagctattttataattgacacctccgggtgcattatccagattggtatgtgccgaataaatgacaatatcatttttaatggctttcaaaacacaccgttcaatgtaatcccgacccataatagatttataacctttaaatataagtggatgatgtgatataatcaggttgtatcccaacatgacagcttcatccacaacagcttcagtaacgtccagacacaacaaagcccctgttgcttccgcttctgtcagtccaacttgcaatccggcattatcaaatccgtcttgcaaaggcagaggcgcgaacctttcaagggcacttactatttccttaattttcattcgttcgcgaaaatttgattgcaaagataatcaatccatttgaatttaaaaagcaaccaagctattttttatactttccccactttatcattttatttttcaaagcataacgttcgtcaacaacacggtctgtcggaaaaaaagtaagatgaatacgccatccgcccgaatgaaacgtaaatttgcgggctgatattcctgtttctatcaaagctagtttatcaatgataaatgctttaatatctacaggaaattcctctccttcatacattatatccgcagtgacaaagaaaccgggagttgataattctgctatatatttccaaatttgctcattcatgtttttctattttattgaaagaaatatataatgtatacaaagcaaggaaagaccctacttccgtttggtatccttatgaactcgtaacaaccggccataactgtcgaatgatttccgtgaagccagaaaaatggtcatcattagtgaaagcatagatgccaccacagttataactacaatcataatctgatatttgatagccacatgtggcgaacttcctcccaatatctgcccaatcatagttcccggcaatgcaacaagccctgttactgccatattggcaatgcccggactgaacgctttaataagagcctgacgcacaaatggagctatcgcctcattacgggtagcgccattccccaacagaaaataataaagttgctgttccctacgcaatccggcatagtaagtatttaatcctatcacattcactcccaacatattccccatgattataccaaaaaccggaataaaatactgggcactgaagatgttatccaactttaatacaaagccaaggaaataaagtccgacaagcaccactgttacaaaaaaaccgatagaaataggaatcatcaaaattccgcgttttaaccgcgtacgcgtcaaagccgtttcagcagccaccccaaccatgatgatcacccacaaaaaattaataaacggattgttccattcaaacagaaaacgaagataagccccaatcaaaaacaactgtataatcatacgtactgtgcctatcagaaccggtttaagcaagcccgtcttgaaacgccataaaaaataaaccggaataagcatcagcagcaatcctactcccaaactgccatagtctatatcaattgttcccatcagtcagattataaagtaaataccttgtcgcatccggcagcaaactgtttgtcatgcgaaacagacaatatagtcattcctttactgcataaggatttaaagaagttaatcacccgtaaacacgattccggatcaagtgccgaagtcggttcgtccactaccagtaaaggtttgtcaagcaaggctgtcactgccaacatgatacgctgacgctgaccacccgacacttcatttacccgtttatcataaagtttctcttccaatcctaatgatacgaaataatccatcagccgctctttgctgaatcccgcctcacgatttgccttcagttcaaaaggcatccgcaccatttcactgacccattccgaaggaagagccaactcctggggaatccatgctattttctttcggatatgatccgccgtcttaggtgccagcagtgtgccgtccacccttattgtcccttcacttaaaggaacaaagcccaaaacagctttcagcaatgaagattttccactgccggaaccaccacaaatgcatacactttctccgtaatgaacttgcaggtcaagtcctctgaaaagagtcagattaccaaaacttatagatatattttctatattaatcatcacattaaaacaaaaagagtcgggagcattcactgctgccgactccacataatgtattaaaaataaaataaatgtgtcgaagtttaatatgctctcgcaaagagaacacggcgagcagatggttttccggttaccatacacttgcccggagtcaggctctcttcatcagcatcaaaaggaagacaacgaattgttgccttggtatcctctttaatccggtcttccgtttccggggttccatcccaatgagccagaataaagccacctttctctatctgttccttgaaatcatcgtatgaatccactttcacgatatgttcgttacgatagttcaatgccttctgataaatattgttctgaatatcctccaacaattgttgtacatattcttcgattccgtcgcaagaacgagtttctttttccaatgtatcacgacgcatcacttccattgtattgttttcaagatcacggccacccattaccaagcgaacaggcacacctttcagttcgtaatctgcaaacttgaatcccggacgcttattgtctgcattatcatatttcacagaaatacccattgctttcaacttgttgacaatgccttctacttttgcatcaatcttcttcagcatttcatcattcttataaataggaacgataactacctgaataggagccaaatgtggtggcaacaccaatccgttatcatcagagtgagtcattatcaatgcacccatcaaacgggtagatactccccaggaagtagcccaaacataatccagcttattgtttttgtcaacaaactgtacattgaacgctttcgcaaaattctgtcccaagaagtgagaagtaccacattgcaatgcctttccatcctgcatcaaaccttcgatggtgtaagtatccaacgcacccgcgaaacgttcattagccgattttacccctttgattaccgggacagccatatacttctcggcgaagtcaccatacacatgcaacattttctgtgcttccgcttctgcttcctcgcgggtcgcatgagccgtatgaccttcctgccacaagaactccgcagtacgcaggaacaatcgggtacgcatctcccaccgcataacatttgcccattggttgcacaagataggcaggtcacgataggaattaatccagttcttatatgtactccaaatgattgtttcagatgtagggcggataatcaattcttcttccagtttggcagccggatctacgataacacccgaaccgtcctctgcattcttcagacgatagtgagtaactacagcacactctttggcaaatccttctacgtgctcagcttcacggctaaggtaagatttcgggataagcaacgggaaataggcatttacgtgaccggtttccttaaacatatcgtccaactgacgctgcattttctcccaaatggcgtatccgtaaggcttgataaccatacatccacgcacaggtgattgttcagccaaatcggccttcaccaccaagtcattataccactgagaataattctcgcttcttttggtaagttctttcaattctactgccatgctatatcgttatttttgtttttcctttttaagagtttgcaaaattagtaaaaaagcatgggaaagtactaatgatttagcaaaaatatagagtcgaaaaatataaaaataacttattgataacgataataccaccaataggtatcaccatattcccgccgcatacggtttttctcttccactggtgatgaaaattccttctgacggttaagaaactcatccaaacgccgcaccatcagcgtgtctttaacttctcttccatatccaggatgagtccgtttataaagcaccaatgcctcacgataataacgcggcaatgtatcttgctcgaaacaatacatatcaaccgccgatacaaatttatccaatttcttatccagcagcaatgcactcatataataattcaaagcggtatgtctacctatttcatcacgacagatacgggccaaaaagtctactgtctcttctgcaacatgtggtcttacaccaagatgagcatacaagctatcggcattcaagcgcaaagtttcctgagaatgaggcgcaaacaaaagcccttccgcaccataatattgagggtattcaaacaaatgctcccccatggtaccttccaaagacatagcataggctctaagcactgtcaatgtacgggttgtttccaaagactttgctcctatcatccgtgcagcttcataatgatgattacggatagcctgctccacagccagttcatgatgaaaattcacattcgtatttcctatacctaccgtcatcaggcataaaagtgtcaaaattgctaagttagagtttattaagcccaatatagaaccctcttgattcaaccaggaacgaaacacacgccgtaaagtatagacaacacctatatatataagcaaaagcaacggcagcagccaaaaccatttatcctctatgtttcctccgtggaaaatagtccggtccacatccgtcagcactcccagcaacagacaagacgggaaataagaaagtgttcgcacagggccttttaatcccatcaatccattgattccccaacggaataccaataaaaccactgtaatgatgatagctcctgccaacggagaataatgtgtctttccttgtgacaatgaataatgcaatgcacctacgacatctttctgaagcacaaaaagatagacaatactaaaaatagagaaaagaagaccgcacgcaaccgtgaggatgcgggcggctcttttataggataagctgttgttgctgctcataaattactctttcacttttttcaataccacagccgaacgggcaggcagatacagtttcagccattcctttttatccttcttataaagagagtcgaaattagtgaaatgacgtatactgtcatcagccagaccattgcctccgaaagctgtcgcatccgtattcagtaccacatcatacgccccgacaggcactaggaaaccatagtctgtaaatgacttggtaggattgaaattaaatacaaaaatcaaattcttacgccggtaagccaacacttggtcaccatcgttatgccatacctcaatcactggagtatcctgaatatttttcacactttcaatgaggtggaccatagctgaatcaaaatcgcccaagtaatggtaacacaggttcttattatcaaaaagtccccactgacgacgggcatatttatgcgaccatccgttaccttcacgtggaaaatcaatccattcgggatgcccgaattcattacccataaagttcaaatatcctccattgatggtagaggcagtaagcaaacgaatcatcttatgcaatgcgatgccacgatgcactgtataattttcatcccctttctggaaatgccaatacatatcagcatctatcagacggaaaataatagtcttatcgcccaccaatgcctggtcatggctttcggcatacgaaatagtcttctcgtccttacgtctgttggtcacttcccagaacatgctgctcggtttccagtcttcatcaatcttctccttgattgttttaatccaataatccggaatattcatggccatacggtaatcaaacccatatccaccattttgaatcggtgctgccaacccgggcatacccgaaacttcttccgcaatggtaatcgctttggaatttacctgatgaatcaacttgttggccaatgtcaaataacaaatcgcattatcatcctgattcccgttaaagtaatccccataattacagaaagcctctcccaagccgtggctataatacaacatagatgtcacaccgtcaaaacgaaaaccgtcaaaacggaactcatccatccaatacttacaattggacagcaagaaatgaatcacttcattcttaccataatcaaagcataaggaatcccatgccggatgttcacgccggccgcccggatagaagtattgattaggatcaccggcaaaattgccaagtccctccacttcattcttcacggcatgagagtgaacaatatccataatgacggcaattcccattctatgcgccgtatcaatcaattccttcaattcatccggtgtaccgaaacgggatgacggagcgaaaaagctggaaacatgatacccgaaactcccataataaggatgctcctgaatagccataatctgaatacaattatatccggcttccgctatacgcggcaatattttctcacggaactcattataagtgcctaccctttcttcttcctgagccataccgatatgacattcataaatcatcaaaggatcagtctttgcacggaacaccttctttctaaaccggtaaggattctccggctcccaaacctgtgcgctgaatatctttgtctgatcatcctgtaccacacggttagcccatgctggtatacgttctccttcaccgccattccaacggactttcagtttatacaaatcaccatgctttatagcaccgctttgtaattccacctcccatacgccaggagagttctttacatggtacatcctataatcgccatgctctttccagtcgttgaaatctccgataagataaatttccttcgcattcggagcccattcacggaacacccaccctcttctggtacgatgcaagccgaaatataaatatccggtggcaaagtccgacaaagttcctttgcctccggtcagttccaattctttgtctaatgcatgctgatggcgtccttcaatcgctgccgaatacggttccagccaaggatcactttctattatgcctaatttaggagtggtattttccataatatgattacttgttagttattctctttcaaaccaaaactttaacgatcacttttttcacgccgtcaggagacactcccggagcatgagcatcctgtggaaaaaagatggcaaacattcccggctttacaggaatatagctttcggcaagtcccggatagaacgagatatccttatctgcatcatagtctgcttcgggaagatcttcacgggctgtataacccatcacttccacccctgacagaggaatctgtatatcaataaactgattatgagtttctaattttgcttcttctttagttttaggcttggtctgagaaaagtttactaccagatcatcaccctgtaattttacttttcctaattcctgagcgttcaagtctgtagccttcagatattccattgctttagcgaacaaaggattcaatgaagcgtacttttctaagttttctaatctgtctactaccataattatttcattttaatggttaaaatattgcttttatcattcaaagtcgtctattgtgaaatttgtaaaatcagcaaaacgcttcagttgcttgaaaacatcctctactttgtccaacaggtcaggggcaaggaaaaacgcatcaggcaccatataagcacaggtataatccttacattttaaataatcaatatattcaaaatctttcggaaatcctttgggagccgtttttaagtgattttctccgataacaggaaagtattgcttgaacgcaggatcttccacaatttctctgtattcatctatgttgtcataaatggactggcggacagctttcagcactttagattccagacaccagcttccaccagcaagcatacagttatcatgctctatatgaacataatatccacaatgttctgatttctttccacgggcgttgatatagccgcccaagtgtattttataaggagtcttatcactagaaaaacgcgtgtcacgataaattcggtatgtacagtccttagcttgaataccgacaatactttcgtcaaacaacgaaatacgggcgatgattgctgtcagtaattcctcaaactctttttgagctttcagatattcatccttatgctcctgaaaccactcccgattattgtttgtggccaggttttttaaaaattgaaagataacagatacatccatgttacattatgttcatgtgttcacttgacaaacttacaaaatatatttgtaacgaactagaaaaaagcgaagtatttatttttttcccaagaccttgagaaacccatcatgcagctttccattggtagccaacacttcatgaccggaatagaaatctccccctccgctgtaatctgtcacttttccaccggcattcatcaagattatcgaaccggccgcaatatcccacggtcccagcagtccttctatacgggcttcaaagcgaccggcagctacatagcaaagttctgccgcagctgctccttgcaggcgcatacctcccacatttccatacaactcgtgcacaatatgctccgccaatggcttatacttttgcgaatcgtatggaaagcctaacgccacaaacgcttcgtccatatcagaaacatctgatacatgtatttctttgttgttcagataagaaggcgctcctttataagtccagtaaagttcatcgcggcatacttcatacaccactccaaccagcagttcttctttactacgaagggcgatactcacacaataaggagcattattatggataaaattggtggttccgtccagcgggtctaccagccagcaatagttttccgtagtcaggctgcccgaaccttcttcggcaatgaatcctgcttcgggaagcaattcccgaagttgagccacaatacggcgttccgattctttatctacatacgatacatagtcgtgagcatttttcttctctaccttgctacggtcaaaaccgctacgctctttacgaagaaaagcacccgcccggagtgctatttcacgtactttcaacgttatcttctctaaatccaacattatattcttatttttgttccgcatccagcgttccaaacttataaacacctttacggattacatttccattcttgtcagtctccacaaaagcgccgtgtttcttcccttgtttgaaaaatccgtcatagcgtactccgttcttatcttcaagcacgcctttgccgtcttcctttccttttacgaaatggcccttatatttggttccgtcagccgtgcgcaaagtgccttcaccgtcggccatgttgtttttccattcaccttcatagtcatcgccgttcgcccagatatagtgtcctttaccgctgcgctggttattcacccactgcccttcatacacagcaccgttggcccatgtaaaggttccagtcccatgctgctcgccgttcttgaactgccctacatacttgtcgccattcttgtgtacataaattccctgcccggtacgttcaccgtttacgtagtcaccttcgtaacggtcaccgctattaaagtaataaatacctttaccatgctgcacgtcatccttccagtcgcccacatacttgtcaccgttgacatagtaaaatgtcccctttccgtcacgtgcgtcatctttccactcaccttcatattttgactggtcgggccataccataacgccctgtccgtttttcttgtcttctttccattcgccctcatatttggctcctgctttccaggtataagtaccctttccgctacgtttgtcctgaaaccagttacctatataaacatctccgttataataatacatagtgccttcaccctgctgatagtcggcaaaccacataccttcataccggttattattcataaaataataggttccgctgccgtgttgctgatcctggaaccattgccccacatacttttctccatcgtgaaacgtatatgtcccgttcccctcgcgtttaccttttatatattccccttcgtaggtatttccgttcttgtagattgtttttcctttaccgtttggttttctacctttcagctctccggtatattcgcccccgtctttaaaagtataattcccgatttttatctgagcggtggccaatgtactgaccgatgccaaaagcaataatatatatatgtatttcttcattggttcgttacttataatagataagatttacgccaaagatacgattttctatctttggacatgataggttattacacttttttacccgcaatgacctctattaagttttctttgcagaaatacttttgagccaatatgcgtatttcttctctggtgattccccggatggcatccagcgaacggataaagaagcgttcgtccagccctgccgtttctatataaatccaggcatcagacaaagaaaaaggtccctcgtacgaccggcataaatcgcccagcatatagttcttcaccatttccaattcttcttgaggaacgagatcattacacaatttgtccatctcccgataaacttctgttatgatagaattcacatattcattggccgcctcggtactgacagtcagtattcccgttcccggataggacacaatgcctgcgccgataccgtatgtatatcccttgtcttcacggatattggacatcagacggcttccgaaataccctccgaacaaagtgaccatgacacgtgccttcaaaaagtccggatgatgacggtccattacgaaacatcccattttcaaggaactttgaagtgcatcctcacgttctataaagatacgcttttctttggtggtaaccggaggaacaagcgttgtctttgctttttccgtcacttccccccattgtccacttcccaagttatcttctatacaacggataatttccgatgtgacctttcccgaaatatataccgaacaattacccgaatgataatatttccgataaaacgaacggagcacctccggggtaatccggtcataatcctccgctaccgcatagcgcccgaaaggatgctccggaccgaacaaggctgtattcaactgctttcgggcaatcatttccacccgggtgctgttcaccagaaattgctgtttgttcgtatcggccaccacagaaagttcctttgccggaaacgtaggagcctttatcatctcggatatgacggccagcgtgcgggcaaaatatttattcagagagtaaagtgttatgaatccatagttcacggaagaagataactccagccaggctccgtaataatccaatcgctccgcaatctgtgaagacgttaaatttccagctccctcacgcagcatcctattggcgaacatagcctgcaacggctgttcctgattccattgtccgcctcctatcagaagatcaaaacgtacaacatcctcggttcccgcatgaatgatattcagaggcatcccattcttcatcgtcctcctgtcgggacgggttatactgaattcgcttagttggcggattggcggtggggtggttctgtccagcatttacttcccctccctctgttttaaaaatgcttcggcacgtgccagatcctgaggcgtatcaatgcctattgtctccacttcactgattcccaccttaatagtataaccattttccagccaacgaagctgctccaacgattcagccagctccagcgaagattgtggaagcgaagttatttctttcagtacatcggcccgataagcatacagaccgatatgtttatagtaagtatgccctttcagccagccttccttctccgcgttacgttggaaaggaatgacggaacggctgaaatacaaagcattcatattcttattaaccaccactttcggagaatttacattctccaaagcttcaaacccgtcttcgggagtgaaaggtttcaccaaagtcgcaatctgtgtagccgaatcttcaaagcaagctttcacagcttcaagctgtgatctttgaataaaaggttcatcaccttgaatatttacaaccacatcatatccttgtcctactttggtatacgcttcataacaacggtctgtgccacttttatggtgaacggaggtcatgaccacttttccgccaaaagcttttacggcggattcaatgcgttcatcgtccgtcgctacgtatgcttcatccaatataccggctacttgttcatagactctctgaatcacaggcttgcctcccaagatggccaaaggtttggccggaaaacgtgttgaggcatatctcgcaggaataattccaataaatttcatggtaccatttcttttatatattcatgcaaaagtaacaaaaacatttcatacatttgcaccattaatgcaataaatgttatggacgaacaccattgtttgctttgtatgggctctaatacaaaccgttacgcgcaactctcggttgcacgggaagcattacgtgccacatttcctgatattcatttcggcgagatgatggaaacggaagctgttggcagcggctttcactcccctttcagcaatcaactggccaaattcagcacaacgctttcacccgattctgttcatgatttgtttaaagaattggaacgacgctgcggacggattcctgaagacaaggctcaaggagtagtaaaactggatattgacctactggtctttgacaataagatattgaaaccggaagatatggaaagagaatatatccgccgtggaatgtctgtgcttttttagaatttataccttttatatattaatcattattcaccttgtgataacccgcctccatatccccctacggcaaacgatagtgttactgaaagggccagcctgacaggtgggaaaacagctaagtattttcattggcagacctaaggctttctaccaggaaggctaaggctttccggccgttctatttctatctccataggctttggagttatctccataacctttggagttaactccataagctttggagatagaacacaacagggaaaaaagccttaacctgccaagaaaaagaggttagccttccttgaaaaaacatttaataaaaactaaagaacacatttttttcacttcatctgtttgttgtttccaatgattccttatacatttgcgtttactaacaattctgttaaacaaatatgataatatgaaagaagaaacgagcaatacagaacaatccatactaaaagccgctgaaaaagaattccttaagaaaggattctccggaagcaagacaacagaaatagctaaggaggctggtgtaacccatgccatgctgcattattatttccgtacaaaagagaatctgttcaacaaagtatttgaagaaaaagccaagcaactggccgatacattcctttctcgtgtagatgaatcattgccttttttggagaaaataaaatgtttcattgaagcacacttcgaccttttgactgctaatcccgaactacctttatttatatacagggagattctgaccaatgaatgcggaaaagaaatttgccgtaaaaccttgttccctaatttccggttagcaatcagtctgctcgaccggtcactgcaagaggaaataaagaaaggcacagtacgccccgtcaaagcggaagatttaatggtcagcgccatttcactcaatatcttcgtctttgtggcaaacccactgatacaattgtttgtggaagaaaaaggtgaagaatatcatcaatatatggaacgcagaaaacaagaaaatgtagaaatcatattaagcagattaagaaaatgaaaaggttattcattctcacaacctttcttctttgcatcagtcccatttgtttgaatgcacaggaactcacgctggaagagtgtcagcagcaagcccgggcacattatccgctgattaaacgatacgggctgattgaaaagacgaaagaatacaatatctctaacgctgacaagggttatctgccgcaagtttcattatccgccaaagccagttatcaatcggatgtaacggaaatacccgttgacctacccggaattgatattcgcggtatgcgcaaggatcaataccaagccatgctgcaactggaccaagtggtatgggacggtggtaacatccgggcacggaaagaggtaacccgtgccacatccgaagtggacaaacagaaactggaagtggacatgtatgccatcaacgaacgggtaaaccaacttttttttggtatcctgttattgaaagagcaattgaagcaaaaccagcttatgcaggaagaattacaaaggaattatgacaacgttacagcgtatgtaaagaatggtattgccaatcaagttgatttggatgctgtaaaagtggaacaattgaacaacatacagcaacgtcatactctggaagccacatatcgtgcttacagcgagatgttgaagatcatgattaaccaccctactcctttaaccgggaacacactaaagaaaccagatgtaaatgccttattatataaaggagaagcctattctgcagaattcatccgacgtccggaacttaacttgtttgcggcacaaaatcagcaactggaggcgcaacgtaaacaacttaccgccaagaacctgcctaggttaggcatatttgtacaaggagcatacggcaacccgggactgaatatgctgaaaaatgaattttcggcctattacgtagcaggcgtacgcctttcctggaacttcagtaacctatatactcgcaagaatgaatctcgccaattaatactgaatcaacaagatgtgaacgtacagaaagaaacgttcttgtttaacactcatctggaaatcactcaaaacaacagtgaaattaagaaactgacggaactgatgaagaacgatgaggagattatcaccctacgtaacaacattaaaaaatcagcccaagcaaaagttgccaacggaacactgaccgttacagaaatgctacgtgaagtaacagccgagaacattgccaggcaggataagatcctgcatgaaattcagttattatcagccatttacgaattaaaatatacaacaaaccaatatgagaacaaataaatatatcttgcttgccgccactctgttcagtttatcctcttgcggaaacaagaaaggcgactatgatgcatcaggcacatttgaagctaccgaagtaattgtatcctccgaagccaatggcaagatcatgcaattcaatatagaagaaggacagttattaaaggccgatgaagaagtggggtgtatagataccttacaactctatttgaaaaagatgcagttactggccagcggtaaagcgatagccagcaaaagcacggacatcaataaacagatagctgccacaaaagaacaaatcggcaaagccgaatatgaaagaaaacgcacagaaaacttgctgaaggaaaatgccgccacccaaaaacaaatagatgatattgactcccagattgccgttctgaaaaaacagttggaagcacagatctctacgcttcaacgcggcaatgccagtatcacagaagaaagctcggcctacgaaatacaagtagcccaactggatgaccagcttcgcaaatgtcacattaccagtccgatttgcggaacagtactggccaaatatgccgaagccggggaactggccacgcaaggaaaacctttatttaaagtggcggatgtgcaacatctttttttacgcgcctatatcaccgccgatcaattatctcaactgaaattaggagataaagtaaaagtgttttctgatttaggagaagatgaccgccgggaatacgaagggacaatcacctggatttcagacaaatcggaattcacccctaaaacaatccagacacgtgacgaacgcgccaatatggtatacgccacaaaaatagcagtaaagaatgacggatacatcaagataggcatgtacggagaaatgaagaaataaataagacaatggattatatcgtttctgtcaaaggagttagcaaaagttacggtgaagttcaagccctgaaagatgtatgctttgaggtgaaaccgggagaaatcttcgggcttatcggaccggacggtgcaggaaagactactcttttccgcattctcaccacattggtgctagccgatgaagggaaagcggaagtctgcgggcaggatgtggtgaagaattacaaagagatacgccggcaggcaggatatatgccgggacgtttttccttataccaggatttgtccgtagaagagaatctcactttctttgccacgcttttcaataccactatccgggagaactacgcattggtaaaggatatctaccaacaaatagaacctttcaaacaccggcgtgccggaaaactatccggcggcatgaaacaaaaactggctctgagttgtgcactgattcacaggccttccattctgttcttggacgaacctaccaccggtgtggaccctgtatccagaaaggagttctgggacatgctgctgaaattgaaacaagaaggtcttaccatcattgcggcaacgccttacctgaacgagatgaaatgctgtgaccgtattgcatttattcgtgaaggaaagattcaaggcattgacactccggaccgtattcttcaacagttcagttcgatcctttctcctgaagggctgtcttttaatgaaccgcaagtcaccggacgatacgccatagaggtagaaggcttgaccaaacaattcggcaacttcactgcagtggaccatatctcattcaaagtgaaacagggagagatttttggtttcctaggtgctaatggcgccggaaaaacaacagccatgcgcatgttatgcggtttatcacaacctaccgggggaaaaggtacagtagcgggctttgacatagccacgcaatacgagcaggttaaaaaaaagatcggatatatgagccagaagttctcactgtatgaagatttaaaagtatgggaaaacatccggctatatgcagggatttatggaatgagcgacaaggagatcgctgagaaaacagacaaggtgctggaacaattaggactcttgaatgagaaaaacacattggtccggtcacttcccttgggatggaaacaaaagctggctttctcggtagctattttccatgagccgaagatcgtttttctggatgaaccgacaggaggggtagaccctgccacacgccggcagttctgggaattgatttatcaggcggcagaacggggaatcaccgtcttcgttaccacccactatatggatgaagcggaatactgtaaccggatttcaatgatggtggatggaaaaatcgaagcgctggacaccccacaacggttaaaagaacggttccatgcccaagatatggatgaagtattcagacaattggcacgcaaggccgtaagaagttgaaaaagagatagagaaaaagagaatgaaacaatttatatcatttgtgcgaaaagaattctatcacattttccgggaccgccggacgatgctgatattactaggtatgcctgtcgtacaaattattcttttcggttttgccatcaccaccgaagtaaagaatgtaaaagtagccgtgctagatttctcaaaagatgtatccacccggcaaatcatcgacaaactggatgccagtgactatttcaatgtcaacaagatgctatatgacaacgacgagatagaggaaacactccggaaaagcagttcagacctggtcattgtgtttgaggccggtttcgataacaatctgcggcataccggtaaagcccgagtacaactgatagccgatgccaccgatcccaacaatgctaccatactgacctcttacgcatccaatattattgcagattatcagcaaagccggatcatgcaacaacaatcacccatacagattatcccccaaataaagttattgtacaatccgggtatgcaaagtgcctacaattttgtgccgggagtaatgggattgattttaatgttgatatgcgccatgatgacttccatctctattgtccgtgaaaaagaaaccggtacgatggaagtattgctggtatctcccgtacgtccgctatggatgattatagccaaaatggtaccttactttgtgctgtcatgcgtcaatctggtcacaattctgctgctgtctgtttatgtattacatgttccggtagcaggcagtcttttttcgttggctttgctctcatggatcttcatcgtagtatctctgctgttgggattattggtttccactatcgcccgtacccaagtggaagccatgctgttttcgggaatggtactgatgatgcctaccgttctactttccggcatgatattccccatcgagaatatgcctcttcctttacagctgatttcaaatgtcatccctgccagatggtatattgtcggaatcaagaaaatcatgattgaaggattgagtatcagttatgcacagggagaaatgggtatacttatgctgatggctgttatccttttactcatcagcctaaaaaagtttaacaaacgattagaataagttccggaagatatgataaagtatttattagaaaaagaattcaagcaactgctgcgcaacccgatgcttccgcggatactgctcgtatttccctgcatcatcctgctggtgttgccttgggccgcaaactttgaaatcaagaatatgaatctcagcgtagtggataatgaccgcagtccctattccacccgactggttcagaaggtgggagcttccgaatattttcatctggtagatgtttcaaacagttaccaggaagcgatgcaatgcattgaaaaaggagatgctgacctcattttggaaatcccgccacacttcgaacgcgatttgctgaaaaccggtgtagcaaaagtactggtttcagccaacaccgtaaacggaacgaaaggaactttaggaagttcctacctcagtaatatagtgaatgcctatgccactgaaatccgggcttcccattccggctctatttctccctccccggtgataaacatagatacccaaggacgtttcaacccctatctggattataaggtatttatggttccggcactgatggcacaattgttgatgatgttatgcggctttctgcctgctcttaatattgtgagtgaaaaagaattcggaaccatcgaacaaatcaatgtgactcctgtaagcaaattcactttcattctggccaagctgattccttactggatagccggcatactgatcctcacaatcggtatcattctggcatggttagtttatggtctggttccggccggtcatttatggctgctttatttctttgcattattattcattatcgttatctcgggcatggggctggtagtttccaactattcccaaaccatgcagcaggccatgtttgtcatgtttttctttgtgattatcatcatgctgatgagcgggttgtttactcccatcaacagtatgcccgaatgggcacaaaccataaccattgccaatcctttgaagtacttcatacaggtaacacgtatggtttacctgaaaggaagcggattcagtgacctgattatgcaatttatcgccttgttccttatggccatcgctttgaacggttgggcggtattcagctacaaaaagaattcataacagataaatcggaacatttacttgtttatcattgttaatatcagtagcttagcaatctgttgctaacctgatttttaattatcaaaaagaaaaaagttatgaaattctttattgacacagccaacctggcacaaatccgcgaagcaaatgcattgggcgtactggatggtgtaaccacaaatccgtctttaatggccaaagaaggcattaaaggagttgagaaccaacataagcattacattgaaatatgtaatatagtggatggagatgtcagtgccgaagtgattgctaccgattatgaaggaatgattcgtgaaggcgaagaacttgccgcccttaacccacacattgtagtaaaagttccttgtattgaggacggcatcaaagctatcaaatatttcagtaataaaggaatccgcactaattgtacactggttttctctgccggacaggcattacttgcggcaaaggcgggggctacctatgtatctccatttgtcggcagactggatgatatttgtaatgacggtgtaggactggttgcacaaattgtagaattgtaccaaacttatgactacaagacacaagttcttgccgcctccatccgaaacaccttacatatattacaatgtgcggaagtgggagcagatgtagtaacctgcccgttatccgccattaaaggccttctaaaccatccattgacagatataggattagaaaaattcctggccgattataaaaaggtaaacggataataaaaaacgttccctcgccaatccaaaggtgggggaatttgttttccagacattatttaaatttcaaatatcctatgcgagtatatttaattcctttactctcataatgagaaaggactttggccgatttaatatatagactttcatgaggattgattttctttgtatagcagctcagcatctccggtgacatactggaagcagctgcctttatgataaaagtataacgattaccatcagcatcagcagcaagtacactctgatctacatagtatccagtcgttttataagcatctagttgtaatcttgtccccaggacttccagatgtaaatcggtcagcctttctcccggctgaccgataaaacgactcccagccggcaaatgatgttttctgatgaccgtttcataatgaactgtggcaaaagcctttgccaatactgctaactttttgtctctggggttacgggcttcaaacttatgtgccaaccaaagcacatagttaggatcaatataatatacttccgccaacctttttccacgatacttcccaaatgcaactatatcttcggacagaccataataaggttcaaagaaagtgttatccttcactttcagcaggacattgcaattctgcaaatactgaaaagcacgctctgccgcatcattaaatgtaactgccaacgactgaataaacagaggagagtaagtattatccggaaatatacgccataaagcataatacgaacgataaggagtggaaacactgattgcataaaatcccgcatcttctctacggcctttattgaagttgtctatcttttgaaaaactctctcggccataacgctagtgatctgatatagggttacatctctatccatagttacctcctatctttataaggtaaagattttcttttcgtaaatatagcatttttcgatgaaaggacaagggttttcaccatttttacataaattattttctataatataaactgccgtgtgaacaggaaaagtaatagttcataaaagtatatatagaaaaaagtctgcttgctttccttcttgcaaacagactttgtacttataaatctaatcttctaattactcaaatatattgtccaatcctccggtttcttctaccgaagtttcatctatcaaagtatccttgcaaggatcaaagtcatcaggaatattgaatttctcgtcctgagagtatcccaagctcttgtccttatagactttctgcatataaagcccccagataggaagtgccatagcagccccctgcccgtccaccatcgtatcaaagtgaatatcacgctcttcaccacctacccatacaccggataccaatgaaggggtgaatcccatgaaccaaccgtcagaattacggttggttgtacctgtctttcctcccatatcggcagtaataccatatagacggcgtacacgcccacccgtaccttcattgatgaccgcacgcagcatgaccaacattttataagcacttgtttcactaatcacctcatccatttgtggagtgaaattcgccaacacatttccttcattatcctcaatacgggttacaaaaacaggcgctgtacgaataccccgattagcaaatgccgaataagcactgaccatttctcctacagaaatctcacaagggcctaaacaaagtgaaaccaccggatctatctgtttattttgtacaccaaatgaatgaatcagacgaactagctgataaggattcagtttccccatcaaataagccgttacccagttatcagaatttgccaagccccatttgatggtaaccatctctccgtaacgcttcttgctggcattacgcggtgaccatggacggccattttcatctatcaaggtctgctctacatggcgcacctggtcacagggagaaaaaccgttctccatagctaaagtatatacataaggtttaatagtagaacccacctggcgacggcctaccatcgccatatcatactggaaataattatagttgggtcctcccacatatgcttttacatgaccggtcaacggatccatagacatgaatcccgctctaaggaagaacttatagtatttcaaagaatccatcggagtcataatggtatccttttccccctcgtatgagaatacggacatttcatatttagtattgaacgctttctttatttctgcttccgaacaccctgcctctttcatgatacgataacggtcagtctgcttcatggccctggtcatgatagaattcacttctgcctctgtcagctgattcgtaaacggagccgttttctttttccgtttttccttgaagaagcggggttgcaaatactgcgccacatgttcgtaaacagcttcctcagcatatttttgcatacgtgagtcgatagtggtataaatcttcagaccatccgtatagatattataattagtaccatctttcttcttgtttttagcacaccaaccgaaaagaggatttgtcttccaagccaatgaatcctcataatatttctgcatctgccatccgcggtagtcacttttcttcggttctttagccgtcatcactccacgcagatattcacggaagtaagtagccagtccttccttatgatctacacgacgatatttcaagaccaatggcaatgcctttaatgaatcagcttccgcatcagtcaggtaacctgctttgcgcatctggtcaagaacgacattccggcgtccgcgtgaacgttcattaaaacgtttcggattataaagtgaaggattcttacacatacctaccaaggtagccgcttcctcaatgttcaggtctttcggctcttttgaaaaatatgtattggcagctgtcttgataccgactgcattattcagaaaatcaaatttattaagatacatggtcagaatctcttcttttgtataataacgttccaactgaacagcaatcacccattcgataggtttctgcaacaaacgctccatcacattatccgccgtaggtgaatagaactgctttgccaactgctgagtgatggtgctacccccaccggcattcttctgcatcatcaccccccgtttcaccaaagcgcggataaacgcacgggcgtcaatgccggaatgttctgcaaaacgttcatcttcggtagcaatcagtgcatgaatcagattcggtgaaagctggtcataacccacaaatacgcggttctccttactaagtgaccaagtgcccagcatcttgccatcatcggatataatctcggttgcaaactttaaattcggattttccaactcttcaatggggggtacatatccaatccatccttttgctatcgcggtgaatatgaacgctataaccaacagtatgccgactacaagagcccaaagcacatatataaatttcttcctcatgacgttttctagtaattaacgatgcaaaagtaaggaaaaactttgagatagaatgtgtttctaacaaagttcaacgaaatatcttttaaatcttcgctcatttatttttttttcatacctttacactccgtataagttgtaattataaatacaagccaaaatggaaaatagaagtttagttactattgccgaacactcgaaagagaaaatcctctacctcctggagatggcaaaagagtttgaaaagaagcctaaccgtaaaattttggatggcaaagtagtcgccactcttttcttcgaaccctccacccgtacacgactcagttttgaaaccgcagcaaacagattgggagcacgcgtcattggatttaccgatcctaaagtgaccagttcctcaaaaggagaaacattgaaagatacgatcatgatggtaagcaattacgctgacattattgtaatgcgccattttttggaaggtgctgcaagatatgccagtgaagttgccccggtacctatagtcaatgccggagacggagctaatcaacatccgtcacaaactatgctagacctctactccatatacaaaacacagggaacgcttgagaatctgaacatttatttggtaggcgacttgaaatacggacgcaccgtccattctctgctgatggctatgcgtcacttcaatcccactttccacttcattgctcctgaagagctgaaaatgccggaagaatataaaatatactgcaaggagcacaatattaaatacaaagaatatacagactttaacgaagaaacgatcgcagatgccgatattctttacatgacccgtgtacagcgcgaacgtttcaccgacctgatggaatatgaacgtgtaaaagatgtatatatattaaggaataagatgctggagcatacccgccccaatctgcgtatcctgcaccctctgccccgcgtcaacgaaatagcttacgatgtggatgagaatccgaaagcttactatttccagcaggcacaaaacggactttatgcgcgccaggccatcctttgtgatgtattgggcataaccttgaacgatgttatagaagatgcaaaaaagtaaaaaacaaaaatgaagatgagcgataataaacaagcattgcaggtagccgctttgaaaaacggcactgttatagaccatataccttccgataaattgtttactgtagtcgccctattgggattacaggattcagactctaacataaccatcggaaacaacttcgagagcaaaaagctaggtaaaaaaggaattatcaaggtggccgaccgcttttttactgatgaggaaataagccgcctttccgtagtagccccgaatgtgaaactgaatattatccgtgactatgaggtggtagaaaagaaacaagtcctgatgcctcaggaattacgtggcattgtaaaatgtgccaatcccaagtgtatcaccaataatgaaccgatgatcactttattccatgtaatcgacaaggaacacggcatcttaaaatgccactattgcgagaaggaacaaagcaaggaaggtattaaactgatttaatcattatgaaacaagactggaaaccgggaacaatgatttatccccttccggccctattggtcagttgtgggagtacggacgaagaatataacattatcacagtggcatgggcaggtactatttgtaccaaccccgccatgtgttatatatccgtacgtccggagcgtcattcctatcccatcttgaaacgaaacatggaattcgtcatcaatcttacaactaaagagatggcatttgccaccgactggtgcggagtgcgttcgggcaaagattataataaattcgaagaaatgaagctgactccgggaaaagcgaaaatagtcaatgctcctattattgaggaatctccactctgtatagaatgtagggtaaaagaaattatctcactaggatctcatgatatgtttattgccgatgtggtaaatgtgaaagctgatgacaaatacctgaacggagaaacaggaaaattcgaattatcccaagctaatccgctggtatatgttcatggcggctattttgagctgggaccgaaaatcggaaagttcggctggtctgtagaaaagaacaggatgcggaccaaagaaaaagcctaaagacacctcatgaagaaactccttttattgatcgctttattgctcctcaccttatccgttccggtacgaggagagaagaaaggtttgcaagaagagcctaaaatcaatgtgggaataaaaggaggcttcaattcttccatgtactttaccagcaggctggagttagacggagaacgtatggaagatgtgcaaaataattataaggtaggctatttcgccgccctatttttccgggtacacatgaaaagacacttcatccaacccgaaattatgtataatgtctataaaggtgaaatagctttcaataagaatcagaataatgaaaatacccttcccgaatttgccaaactgaacagcacaattcattctttggaattacctatactatatggctatagtttcgtaaaaagccgtccttacggcatggcactttttatcggccccaaattagaatatgtatggaaacataagactgatgaagagtttgaagggttcgggcattccggcataaaagaagaattacgccctatcaatataagttccgttatcggattaggcgtgaatattgcaaatatattcttcgatttccggtatgaaatcggactaaccaatatatccaaatcaatcacttacgaaaagaatatagatggagtcatatttcaggaaaaaggtatcttcatcaatcgtcatcgcaatgtattaagtttctctctaggagttattttttaagcagtcatactcctccgtaagaattccgacatctatcataatattacattctgaagagttttccaccaaagaagagaactgaggatcaactatttccggcatttgacttcctatgaaacgacaaaaagaaagtcacacgtgttttttctgtaataccactaaagattttcttctaaataatttccttatattctaaaattacttaactttgtgaactcagaatcgaatatcgcacataaacttattataaaaagaaatgaaaagagacgatttgattttcgacattatcgaaaaagagcatcaacgccagctcaaaggtatcgagctgatcgcatccgaaaactttgttagtgaccaagtaatgcaagctatgggttcttgccttaccaacaagtatgctgaagggtatcccggcaagcgctactatggcggttgcgaagtggtagaccagagcgaacaaatcgctatcgacagactgaaacaaatcttcggcgcagaatgggctaacgtacaacctcactcaggagcacaggctaatgctgccgtattcttggccgttttaaatccgggtgataaattcatgggattaaatctggctcatggtggccacctgtcacatggttcattggttaacacatccggcattatttatactccatgtgaatacaatctgaacaaggaaacaggacgtgtggattacgaccagatggaagaaatcgcattacgtgaaaaaccgaaaatgattattggtggcggttcagcatattctcgtgaatgggactacaaacgtatgcgcgaaatcgcagataaaataggagctatcctgatgatcgatatggctcatcctgcaggtctgattgctgccggactgctggataatccggttaaatacgctcatatcgttacttcaacaacgcataagacccttcgcggtcctcgtggcggtgttatcatgatgggcaaagatttccctaatccatggggcaagaaaactccgaaaggcgaaatcaagatgatgtcacaacttttggattctgctgtattccctggtatacaaggtggtccgttggaacatgtcattgcagccaaagctgttgcattcggtgaatgtttacagccggaatacaaagaatatcaaacacaagtaaaaaagaatgcagccgtattggcacaggctctgattgaccgtggttttacgatcgtttctggtggtacagacaaccactccatgctggtagaccttcgcaccaaataccctgatctgacaggcaaagtagcagaaaaagcattggttgctgctgatatcactgtaaacaaaaatatggtcccatttgacagccgttctgctttccaaacttcaggtatccgtttgggaactcctgccatcacaactcgtggcgcaaaagaagacttgatgttggaaatcgccgaaatgattgaaactgttctttcaaacgtagacaatgaagaagtgattgcacaagttcgtgcacgcgtaaacgaaacaatgaagaaatatcctattttcgcttactaattaacgacttctatcaatatactcataaaaaactttggagttttttgaaaaagctttatccttcttcaagaacttcaaagtttttttatgaaacatccagaccatttaaaaagagtaatagaaaagtatttttatcagcagtccccacagaaatcagtataaatttctacctttgcagacaatttatccgttaatgacgaatgaaaggaactaagaatctgactcaaggccctatcctgaagcaattgtttactttggcaatgcccattatgtccacttcattcatacagatggcatatagcctgaccgacatggcctgggtaggaagaataggaagtgaggcaatagccgctgtaggttcagtgggtattcttacatggatgtccacatctatctccctgctgaacaaagttggttcggaagtcagcgtaggacaagccatcggggcacaaaacgaacaagctacccgtgcgttcgcatcacataatcttaccttgtccttacttatatcattaagctggggagcattgttatttatttttgccacccctattatcagtatctatgaactggaacctcatatagccaagatggctgtggaatatctacggattatagcaactgcctttccattcgtctttttatcagctgcctttacagggatattcaatgccgccggacgaagcaaaatacctttttccattaacggtatcggactgattacaaatatgatactagatcctctttttatctttggtttaaactggggaactacgggagccgcaattgccacttggctggccgaagctacggtatgcatactgtttatctatcaattgaaacaaaagaaaatattatgggatgactttcggttatttactacactaaaaaaacaatatacacaccacatcttgaaaataggattaccagtagcggtactcaatacattattcgctttcgtcaatatgtttctcggaaggaccgcaacagagcaaggtggtcatttagggctgatggcactcactaccggaggacaaatcgaagctatcacctggaacacctcccaaggattttctacagctctcagtgcttttgtagctcagaactatgcagcacggcaaatctcccgtgtactgaaagcctatcgcaccactttatggatgacatttatattcggatctttctgcacatttctttttatatgttacggaaacgaaatattttctatctttgttcctgaaaaagcggcgtatgaaaccggtggcgtatttctacgtatcgacggatactcgcaactatttatgatgctggaaattaccatacagggcgttttttatggaatggggcgcaccatgcctcctgccgtaatcagtgtcacctgtaactatctgcgcatcccgatggcattattgtttgtatcatggggctggggtttgccgggtatttggtggagcataagcatcactagcactatgaaaggaattatttgtctgatctggtttatacttatcaagaagaaagctttaaattatcaggctgtttaatgaacaatttttgcattaagtcattaatatattaaaatgaacatgattatgaaaaagactaaaattatggctttattactgagtgcaacactagtattcagtggatgtggtaacatgaataataccgctaaaggcggtctgatcggtggcggtggtggcgcagctttgggagcaattatcggcggaatagccggacatggtaaaggtgcggctattggtgcggcagtaggtgcggcagtaggtacaggcgccggcgtgttaattggaaaaaaaatggataaagcggcagaagaagcggctcaaatccaaggagcacaggtagaacaggtaacagataacaacggtcttcaggctgtaaaagttacttttgattccggtattctcttcaatacaggaaatgcagccttgagtgcacaagcgaaatcagccttaagtaaatttgcaaacaacgtattgaaccagaacagagatatggacgtatccatttatggatatacagacaatcagggctggagaaacagtacagccgaacaaagcatccaaaagaacctcaatctgtcacaagaacgcgctcaaagtgtggctagttatttgctaggttgcggtgtaagtaattctcagatcaagtctgtagaaggtttgggtcaagcagacccgataggtaataatgacacagccgaaggacgccagcagaatcgtcgtgtagaagtatatatgtatgccagccaacagatgattcagcaagcggaagcaggtacactgaaatgatatcaatgacgttatcatagagcgtatccaatacgcccgaaccaacggtcacaactttggataacatataaaataaatcaatttcggacaggttatttctgcccgaaattgattttaatacacaagcatgaaaaaaaagattttaaaattcattcgcaatctgctgctttttttctttggttcttccattctcgcagttatcgttttacgctttattccggtttactttaccccgttgatgtttatccgaactacccaacaaatcattcatggcgaagatataaagtggaaacactcttggatacctaaagaaaacatatcccctcatctgcctatggctgttattgcttctgaagacaatcgctttgccgagcataatggttttgacttcaaagaaatagagaaagctttagaagaaaacaagaaccgaaaacgtcctcgaggtgccagtactatcagccaacagacagccaaaaacatttttttgtggcctgcttcttcttggatcagaaaaggacttgaagtgtatttcaccactttgatagaactattttggaataaggaacggattatggaagtctatctgaactctatagaaatgggaaatggtatctatggtgccgaagcagtagctcgtgaacactttcacaagaatgccagcaaactgacaccggaagaatgtgcactaattgcagccagccttcccaatcctcgcaagttcaattcaagcagacctggcaactacatgctcaaaagacaaaagaagatcctttatcttatgaaatgcgtccctatatttccaccccaacaagatataccttctacggtttcaaagaagaaaaagaaataacccgcacccccgtgtgggctttcttatttttagagtattcaaagagagtctgcgaatctagaataactttcttcatgaccgatgaagcatgaagcaaatgcaatttaccatccacccaacaagcaaatcctgtatgtaccacatccagcccttttatattggtggtaatcgctatgatatccccattctttatgtccaattcctcagaagaaacattcagacttgttttaggaatataagaaacaggaacatttttccattttttctctatttcaatcatctgggatatcatggaaggattatttttcaaccgatgataactgtcagaatgtgtggacataaaatccaaattcaaaacttgtgatgcagcaaaccctaattcccccgtgcgttcatgtacaattcctttttgttcattatccttaatccaatcactgaagtaatgcaaacgcgagacataaccggcttgtttcccattccgatagcggatacaccgcaacgcttttttgtaactttcaaagtcacttttcccatacttatcagtaaggctcaatgcaagtactgtttcaactaacgtggtacaatccaccttatccaaatgcacaactaaggtttcttcatctgtcccatccaatgtattcgctacgtatggaactcctaatagattttgggcaaaaaacaatatcttacagctatcggccggcaatcgggcagctttttgaagcagactctcgacttttatactgtcattttctgatgctgaaacaatacagggcattactcctaaaattattcccagcaaccacgaatacagttttctcatatattttttcttatctacctgttttttctgcatggcaacaaagataacacataactgaatgaatgcaaattttaaaagaatgaaaagataaaaacatccgccatgacaaattcaaacctgccacagcggataaaaaaactatattttaccttcaaatcatgcagtaaactctgttctttccaaataagctataacatcacctttattaactacagctccctgttgggcgcaaacttctacaatgcgtcccgtaaaattagtaaagatcttttcatactctccccacggagtggaaatataacaaaacacttcatcatgctggtatttccgtccgacaaacggtgctatagaaggaccttccacggaaacttcccataaaatctgtcccttatccggcgcaataataggatcagccttagtacgcttatattttcgaattgtttcctcatcaaagccactttttaccatagccgcatcctgagcacgttgtaaatcatccataaaacgtttcttggctacacccgatttataatcacggtattgccggtcatgcatagccagttcaaacaactcttcctcatcttcaccatattcccagccattatcatccatctccttacggtacttgtccagctcatcaggatagttcatctgaggatcctcgtcagtaaactcgtaacctttacttttcgccagttcaattatttcaggagccaacgcacccggcaactttccactttttcccagaatcatatcccatgtatggttatcaatcatcgtccatctctcctctcctttcaccaattgcatgacattcatcaaagccacattcttcacatattggctgaacggtgttactaaaggaggatatcccaatttcggccatacatattccacttcttcaaacagcatcactaccaaatcatccaaactcataggttcctttccctgtcctttcaaaagtagatttatacctgaatgtacacctttcaaatcggccatcatagatcccatcataccaccgggaagtccacaacctaacagcaaggaagacatgtgcttattggtagaatcaataaaataccccaaaaaatcatcaataaactcctgcgtcatgctacgtgctttcatataagccttcatattgatttcaggtacctgaaaacctgcatttttcaacatagcctgtacagaaattacgtcaggatgcacttttccccatgataagggctccatagcgacatcaatgatatccgcaccattctcacaaacttccaaaatagatgccatagataacccgggaccggaatgtccatgatattgtacaatgacttcaggatgtttatctttgatgtttctcaccaactgccctaacatttcaggacggccgatacctgccatatctttcaaacagatttcgggtgcccccgcttctattaactggtcagcaatataagaataataatccaccgtatgtacaggagaataagtgatgcaaagagtggcttgaggaatcatccccgcttctttagcatattttatggaaggaataatattacgaacttcattcaagccacaaaatatacgagtaatatccacgccttgcgcatgttttaccttatacatcaaccgacgtacatcagctggaacaggatacattcgcaatgcatttaaaccgcggtccaacatatgcgtctgaatacccgcctcacgtaaaggtttggtaaatgtacgcactgccttgttaggattctcaccatacagtaagttcacttgttcaaaagcacctccattagtttccactcgagcaaaacaccccatttcaacgattagaggagcaattttggctaactgatcagctctgggctggtacttccctgatgactgccacatatcgcggtagaccaaactgaatttgatttcttttttcataattattacttgatttaaaggtgtcttgtccttttgcaaatataacaaatgaataaaaataaagttaatattcgaatctattttttagcttccaaaaacatgtttaatatcatattgtaaaccaataaaaacaaaaaggcagagcaaaagaatttcactctacctttttgataatttttccctttggattatacaaaatcacggagttgcccttgcaagcgttgtctggtaaaaaagattctgctttttacagtacccaacggcaatcccaacttttcggcaatctcacgatatttgaatcccgacacatgcatagcgaatggaatacggtattctttgggaagcaagccgactatacgatgtatttctttcatgtcataagctccctcggtactatcaaagccggaatcctgaggcatacttaaatggtagagattgtctgtatggtccacaaatgtctggtcacgcactattttcctataattgtttataaagatgttacgcataatggtatacatccatcccttaaagtttgtatcggggatatacttgtcttcattatccagcgctttcaatgaagtttcttgtagcaggtcattagcctcctcacggtcggctgtgagtttgtatgcaaaccgaagtaattcttcttgcacacccagcaggttctttttaaaactaacgctattcataaatctttcagtttaggttcatattctttttccatgctctcggtaatgcaaggatagcgcattttaaataggtgtcaaagaaaaaactattaaaatagggggtaaaaaccgtcatttatcagtttttaccccctattttgatagttttcaggtgctgtttagcgttgttccccctttaaaattggtaaacagatgctatatttaacagctaaaatacgcgccaaaaacacagtactacctcctattatctggcaaataaaggcttccagaccaaacagatcacatatccaataggctaatccccccaccacacaggccattgcataaatttctttacgaaaaataagcggaatttcattaataaaaacatcgcggagcacaccacctgcggccccagtgatactacccatgattatagctacccaaaaaggatatccgagagcaatacttttacctacccccactactgtaaatagtgccaggccgatgctgtcgaacaggaagaaagtgttatgcatatgaatcaaatacttgccgaaagcaattacccaaaacaatgcaagtcctgtacatattaaatatatagggtcagtcatccaacccggagtcacatctagaagcacatcacggatagtacctcctccgatagccgtcgccaaacccactacatacgcaccaaaccagtcaaactgtttggcagacgccaatctgataccgctgatggcaaaggcaaacgtacctataaaatctaaaacttgaacaaatgttagcataatggttgttatttgtctgcaaagtaacgaataaattcgataagaaaatgtatttttgtgttcagaaaatagcttaaaataagatgaaagtaacaattatcgccggtgcacgtcccaatttcatgaaaatagccccattaatgcgtgctatcaaagctgcaaaggcagcaggaaaaaatatcactgcccgcctggtctacacaggttcggacgaagataaaagtttggaaccttctctgtttacagacctagatatgccgcgtcccgatgtgtatctgcatgtggataatacagattttttccagcgaatggcaggtatattggtagctttcgcccgcgaactggaacaacatcctgcacaggtagtacttgtagtggatgacctaactcctactatggcgtgttctatcgtggctaaaaagaaggggataaaagttgctcatctagtggccggaacccgttctttcgatatggatatgccaaaagaagtaaacagtatgataacagatggcttgtctgattatctattcacggccggaatggtagccaaccgcaatctgaatcaaacaggaaccgaacaagcacatgtacattttgtaggaaacattctgattgatacgctgcgttataaccgtactcgcttacagcgcccggtagcattctctattatgggactgaaagaaaaagaatacctcttgctaaccttgaacaagcattcattgctaaacaatgatactgcactgaaagctatcttccgcactatactggaaaaaacagacaagccgatcgtggcaccgctccacacgtatgtaaaaaacaagctgtctgttttagatattacttctgaaaggttatatatattaccaccgcaaccttatttgtcattcggttatttagtgagccatgcccagggtctcattacagattcgggtaacgtagcggaagaagctacttttttaggaatcccctgtatgacattaagtacgtatgcagaacatcccgaaacagtgacaatcggcacaaaccggctagtgggggaagaccctgaaatcttagcaaacgcccttgacatgctgaataaaggagaatggcaaaaggggcttttaccggaacgctgggatggacacactgcagaaagaattgtgcaaacgttgctggatgaacataaataaaatagaaaaccattctcagataaaaacacggatgccgcaggatttggtattctgcggcatccgtgtttttattgattttctatcaatatcacttacactctcctctttaccaagtataattcaaaccaaaactaagcaattcctgcaactggaaataactcttgttatcctcagtcaatgtcacaccgtcatcataacgcgcatgaacaaacaacttagtagacaaatagcggttcaatacaaaattgaatgtattttcccaactggcaattacggtgtcataagttgtaaagtactccaatttagattcccacacaatactgggaataattttccaagtcagattacctgtaaatttcgaaccgaaaagatttgctgttttatgccccggatccacattaaaagcacccggatcagttatcttatcattactgatatacataaaagtatacgccagtggagatcctaacaaagacaatgaataattcttcttattctgcttaaagtccataccgagggttatatccaattgagcgggagacagaaaattagaaatcatatcattcgtattcgtcttataattcccaaaaaactgggtcttgaactcgcccgccaaagtataataccagtttttgaacgctttcacacccagtttactgtttaaacgaaacaagtcggcattcgtcttatatttatgcactgtatctgacggtgctgtaacaaaacccaattttatttccagcttattttcaaactctatacgctggcggtcatcaaaattagcttccagcaccaagccagacaatagcgcattagtactttcaccacctttataccagttatctgaaatataatgttgtgtgaactgaacatatccattccccttatgcgtccaaaagttaggacgtaccaccaacaattcattatccgtagtcaagctttccaccggtgtttccggttgaaggaaacttttgattttctctttccttggtctttttactatctgattattttccagtggtttcaggtcggccaaataaagttcgttattcaccagtctgcccggatattgcaaataataattccttaatatattattcgaccaacggtctgcagcggccaaggtttccaaatcgggcagctgatatatagcagcagatacagagtcgcgtttccccatatacagcgaatcaacagccgtcattattttcgtatccggactccattttatttcaaaaatttcttttataggagcttcataataagtgggcggaacaaacaacttataaaaagccggattaggacgtacccaccggggagccgggatattcaaatcatcccacagtctgaaataagcaaaataagatgcgctcaaagctgataatgaatcagaaaaggctttcacagccggatcttctttcgtcttggttactttctgtgccgatgcctctcccatacagaatacagcaagcactatagtcaaacatatactttttctcatactatttttagttttgtgcaaaaatacacttaattttccttttcccaaaaaactgtttcctttatataataacgaatgataaattcaatttcatcaaatgattttttaaagcatatccgacgatattgaaaaagattttgtaattttgcaactttgataaatattgcgatattgataattaagaaaataacatttaaaaatattaagtagtgggagaaactaagtatatcttcgtaactggtggtgttgcctcctcattaggtaaaggtattatttcatcatcaataggtaaattactgcaagccagaggctacaatgtgacaattcaaaagttcgatccgtacatcaatatcgatccgggaactttgaatccttatgaacatggtgaatgttatgtaacggtagacggacacgaagccgacctcgatttgggacattacgaacgttttttgggcatccagacaactaaagccaataacattacaacaggacgtatttacaaaagtgttattgacaaagaacgccgcggtgactatttgggaaaaactattcaggttatcccccatattaccgacgagatcaaacgcaatgtaaaattattgggaagcaaatataaatttgattttgtcattaccgaaattggtggtactgtaggtgatattgaatcacttccttatttggaaagtatccgccaattgaaatgggaaatgggacgtaatgcgttgtgcgtacaccttacttatgttccttatctggcggcagcaggcgaattgaagaccaaacctacccaacactctgtaaaagaattgcaatccgtaggtattcagccagacatattggtattgcgtaccgagcacgaattgagcactaatttgaaaaagaaagttgctctattctgtaacgtagatgaaaatgctgtggtgcagtccatcgatatgcccactatttatgaagtacctttgcgtatgcaggaacaaggactggatgtaaccatccttcaaaaaatgggattgcccgtgggtgaaactccaaccctcggcccatggagagattttctagatcgtcgtcacaaagcaactaaaaaagtaaaaattggattagttggtaaatacgatttacaagacgcatataaatctatccttgaagctttgtcacaagcagccacttacaatgaccgtaaagcggatatccacttcatcaatagcgagaaactgacagatgccaatgtagaagagcaaattaaggaaatggatggtatcatcatctgtccaggattcggacaacgtggcatagaaggtaagttcgtcgctattaaatatgcacgtacacacaatgtacccacttttggtatctgtctaggtatgcagtgcatggctattgagtttgcccgtaacgtgctaggttatacagatgccaatagccgtgaaatggatgaaaaaacgccacacaacgtgatagacattatggaagaacagaaagctattaccaacatgggcggcactatgcgcctaggggcctatgaatgtatccttgaccaacactcaaagactttcgaagcctataaaagcgaacatatacaggaacgccaccgtcaccgctacgaattcaacaatgactataagcaggagtacgaaaaggcgggtatgaaatgtgtgggtaccaatccagaatccgatttagtggaaataattgaaattccaacattaaaatggttcatcggagtccagttccatcccgagtacagcagtacagtattgaaaccacatcctttgttcctgtcatttatcaaagcggcaatagacaaataagaaacgagaattataatataataaggtaaacaagtaaaaatggacaaaaacactttagtgggattcgccctgattggtgcagttgtgataggcttcagcatctacaaccgtcctagccaggaagaaatggcacgtgccaaacattatcaggattccattcaggcgatagcccaaaaagaggccgaacgacaggcacaggctgccacgacacagagccagaatgcaacattgcatttagactctacctctatgttctatggcgcaagccaaggtgcggaacagctaacgacactggaaaataatgtagtaaaactgactttcaccaataaaggtggacgggtatgtgcagccatattaaaagactataatggacaggacggcaagcctttgatgctgtttgatgaaaaagattcgggcatgaatttcgctttcgaaggaaagaatgaaaacattttgaccgaggatatgtatttccagcctaccaacgtaacagacagcactgtaaccatgcgtctggcagcaaacaatggaggctatatagatttcgattacaaacttttgccggatgcttacatggtgaatttcacaattcgcgcaaatggcatgcagaatttcttccctcctgccctgaacactgtcaatataaactggcgtcaacgggcacgtcaacttgaaaaaggtttcagcttcgagcagcgctatacctcgctcacctacaagccagtagaaaaaagttcagattatctgaacgaaatgaaagaagcaaaagaagatgtaactgatcgtttggactggattgctttcaaaaatcagttcttctcaagcgtacttattgccgatcaagattttgacaaagcctccctaacctctaccccccaacaggaaggaagcggatatatgaagaactataccgcagacatgacaactttctttgatcctaccggaaagcagtctaccaatatgcagttctacttcggtccgaaccatttcaagactttgctgaacagcaatgatctaagcctttcccaaaaagacttggaactagaagatctggtttatttgggatggcccattatccgctgggtaaaccgctggttcactattaatttgtttgattggctctcgggttggggactgagcatgggtgtcgtattgctgctgatgacaattatcgtcaaagtgttagtttatccggctacctacaaatcatatatgtcttctgccaagatgcgcgtcctgaaaccgtatatcaacgagattaatgcaaaatatcccaagaaagaggatgctttaaaaaagcaacaggaaacgatggcactttacagcaaatacggagtaagccccatgggaggttgcttgcctatgctgatacaaatgccggtattcatggctttattcttcttcgtgcctaacgctattgagttgcgtcaacaaagtttcttatgggccccggacttatccacttatgatgatattatcaactggggaaccaacattcctttgctgggcaatcatttaagcctcttctgtttgctgttcagtatcactaatattctgaataccatgtacaccatgaaacagcaggatatgggacaacagcaaatgccgggtatgaaactaatgatgtatatcatgccagtcatgtttattttcatcttcaacggttattcttccggtttgaattattattacttcatttccggactgattggtatcctcactatggtgattctgcgcaaaacaactgatgaaaagaaactccttgccatgctggaagcacggaaagaaaagaaaagccaaaagaatggcggcaaaccaggtggtggcggactaatggccaaactggaggctttgcaaaaggagcaggagcgtctgcaacaagaaagaatgaataaaggaaaaaaataacgagtttacactcccttaaaaagacagcgaaggccgccgtattattacagaatagcggtcttcgctgttctgtaataatacgatagctacttctatatttattcctctcagcaaagataccatccacaagcacacaaagaaacaaaacaaatatgcaggaacatttcacatcaccggcttttatacgtatttttgcagtcaattaatcatcaaaaacaatttttagatatgaataaatcaagcgcaaccatcatggcagcagcacttatgctagcttcttcctgtaccgaagtaaagcaggaaggacagggctacgaacccattataggtaagcaagaaatcaccatcaaagatggccgtctcacccccgaagccctgtgggcaatgggacgtataggcagtctgagtatttcccccgacggcaaaaagatagcctacactgtagcctattatagtgttcccgagaacaaaagccatcatgtaatttacgtaatgaataccgatggaaagaacaacaccctgcttactcaaacagcctggaatgaaagcgaacctcaatggataaaaggcggaacaaaaatcgcattcttatgcaatgaaagtggtggcagccagatttgggagatgaatcctgacggtacggaacgccgtattatttccgatttcaaaggagacatagaaggattctctttttcaccggacggcaaaaagattcttttcatctcacaaataaaatacggccaacgcaccgtagacctctaccctgacctacccaaagccagtggtatcattgtaaacgacctgatgtataaacattgggacgaatgggtagaaagtattccgcatccttttatcgctgattttaatggtaacatgatgggagcagccaccgatatcatggaaggtgaaccgtttgaagctccaatgaaacctttcggaggtatcgagcaactggcttggagcaacgactctaaacaaatagcttacaccagccgaaagaagcaaggattggcatacgcagtatctaccgactcagatatatacctatataatatagaaaaaggcacaacactgaacctgtgcaaactgaatggacaagattcgaatggaacagatgagatgagaggatatgacactaatccgaaattcagtcccgatggcaaatacattgcatggcaaagcatggagcgcgatggttacgaaagcgaccgaaaccgcctgtgcgtctacaatttgaataacggccaaaagacatttgtcaccgaaagtttcgaatcgggcgtagatgactactgctggaacaatgattcacaaagtctgtattttatcggtgtatggcatggaaccagcatggtatacagtaccaatctgaatggtgatataaaaaaactgactgacggcatgtatgactacggatcagtagccatggcaggcgacaaaataattaccaaacgtcattctatcagtgctgctgatgaaatctacactctcactcctgccgacggacaagtggcacaactctcacacgagaatgaccacatctttaaacaactgaaattgggcaaagtagaggaaagatggaccaagactactgacggcaagcaaatgctctcatgggtgatctatcccactaattttgacgcaaacaagaagtatcctactttgttattctgtgaaggtgggccacaaagtcccgttagccaattctggagctatcgctggaacttccagattatggcagccaacgattatattatcatcgctccgaatcgtcgcggtctgcccggattcggcatggaatggttggaacaaattagcggtgactacggaggtcaatgtatgaaagactatttatccgccatagatgatatttcgaaagaaccatatgtagataccgaccgtttaggatgcgtaggtgccagcttcggcggattctccgtctattggctggcgggacaccataacaaacgttttaaagcatttattgcacacgatggtatattcaatatggaacagcaatatctggagacagaagaaatgtggttcgccaactgggatatgggtggtgcatattgggacaaaaacaatgcaacagcccaacgtacctttgccaactctccccatcgcttcgttgacaaatgggacactcctattctctgcattcatggtgaaaaagattatagaattctcgcttcacaaggtatgtcggcattcaatgcggctgtgttgcgcggtgttccggccgaacttttattatatccggatgagaatcattgggtcttgaaaccgcaaaatggagtgttatggcaacgcacattctttaactggttagataaatggcttaaatagcgcctaaattaccgcaatattatccgttattagaactatatagtataattctcaatttttgtgttacctttgtaaggtcaaacaaaaaaaatgaacattaagtgatatttgttaagctaccttttattaggtaagtaaacaatagcttgtgaaagtagttgtttacagtgttagtatataaataactttttattccccgtgctttgtgagcgcacaaagctggatgattacaaaataataaagtgattattttttcgtgataccggcttgtgataagtcggtatcatttttttatcccagtatgatagtatcttattatatccaaaacaacaatatccatccacctaccaaaatgtagacggatggatattgtcttacttttattctcaatctctgctcaaaataaaagcgaagacgtcttttatttaattttaacagacgaagcttcctattttttctgcattaatcctttaaatgccgtaggataaggagtttcaaactccatcaactctctggttaccggatgatagaagcataacttgaaggcatgtaacgccaatcgtcctaaaggatcacactcactgccataacgccggtcaccaataacaggatgacctaaatccgacatatgcacacgaatctgattcttacgtcctgtttccaaatccaactccaccaaagaatatccattggctcgctttattgttttataatgagtaaccgcaaacttaccttccccatcatccacaggactggaactaacatacaatttccggtcggtcaaccaagactctactgtaccgtaatccttctccatatcaccagaaacgatggacacataacgacggtccgtcacaatatcatgccaattatcacgtaaagtattctgggttttttcatccttggcatacatcatcaatcccgaagtttcacggtccagacgatgtactacaaatacgcggttgaaacgatgtgagcgctttacatactcattcaaaatatgttgtgcagtacgttccttctgacgttctgtgctgacagaaagcaacccttccttcttttccaccaccaagatataagcatcctcgtataccagtttcagcatcggatgtttaaactcacggttattcttcgccttagacatctgcactttcatacctggtttcaacgcgaagttatattgagtagtaatcacattatctaccaaaatcacacggttggcaagcaacgcctttaccttgctacgactgattcccgccattttccgcatcaggaaatccatcagctcagcggactccgtcacattatatatagtatatcgggcaacgcttttcgcctttggtctgccggaatcattttttttacctcttgacataattctatttactgtttaaacaatttataattgagccattcggattatcctcttttttccagcaacactacattttccacatgatgtgtatgggggaacatatctacgggttgcacggccatcaccttgtatttggcatctaacaaagacaaatcacgtgcctgagtggctggattacagctaacatacacaatccgctgaggctcagcaaaaaggattgtattaatcacatcatcgtgcattccggcacggggaggatcagtgatgataacatcaggacgaccatgttgactgatgaactcttgagtcaggatatccttcatgtcaccggcataaaataaggtattgtcaatgccattgattgccgaattcactttggcatcttctatcgcttcaggcacatattcgataccaatcactttctttgcctgacgtgaaacgaagttggctatggttccagtccccgtataaagatcatacaccaactcattaccagtcaatctggcaaaattacgggccaccttataaagattatacgcctgtccggaattagtttgataaaatgatttcgctcctatcttgaatcgcaagccttccatttcctcaaaaatatggtcattccctttaaacaccatcacatccagatcgttaatggtatcattacacttattattgactacatataacaaggaagtgatttgcggaaaatgttctgcaacaaaagtcagtaaccgcttcattaaatccaattcaccctcttctacaatcttgcattgcagcaacaccataagctcacccgtacttgaggtacgaatcatcaagttgcgaagcattccttcttgagaacgcagattaaagaaagaataattgtgttcgtatgcatagtcacgaatcgcattgcgtatctggttgctgatatcatcctgtaaccagcacttgtctatagccagcaccttgtcaaatgcaccgggaatgtggaaacctacggcattcatctgatcgtacttcacatcttcctttacctcttcctctgtcagccaacgtttgttagaaaacgtaaattccaatttgttgcgataaaattccgttttttccgaccccatgataggtgaaatttccggcaattcaatcttgccgatacgggtcaggttatccgtcacctgcttttgcttatactttatttgttctgtgtatggcagacactgccacttacaaccaccacatacaccataatgctgacagaagggtactgcacgcacaggagaatactcatggaatttcactgccacagcttctgcataatgatttttcttacgttttacctgcaagtctaccacatcaccgggtactacataaggcacaaacactaccaagtcattcactttcgccaaagcttttccttcggcagctacatctgttatcgttaccttctctaataatggaagttctttcttctttctagccacttttccgaataagttaatttggggacaaatttaagcattttccccgaatatacccccataaatcgaaagatattaaaattgtaaagtagaaattacaatttctgctaatttttttcagtaaatagtttggagataaataaaatatgtatagttttgcgattacattttttgagcgagttaactttaaatacattattatggataaaaaaagagtttacacctttggtaatggacaagctgaaggaaaagcagatatgagaaatctgcttggtggaaaaggcgctaacctggctgaaatgaatctaatcggtgttcccgtacctccgggatttacaatcaccacagaagtttgtagcgaatattatgagttaggtagagataaagtagtagaactgctgaaagcggatgttgagaaagccatcgccaacattgaaagtctgatgaactctaaattcggtgatatagaaaatccgttattggtttccgtacgttcaggtgctcgtgcttccatgcctggaatgatggatacaatccttaatttaggtttaaatgacgaagtggtggaaggcttgagccgcaagaccggacgtcctcgtttcgcatgggattcttaccgtcgtttcgtacaaatgtatggtgacgtagtattgggtatgaagccggtaaataaggaagacatcgaccctttcgaggaaatcatcgaaaaagtaaaggaagaaaaaggtgtgaagctagacaacgaattagaagtggaagaccttaaagaactggttaaacgctttaaagtcgctgtaaaagaacaaaccggacaagattttccgacctgtgcatacgagcaactttggggtgccatctgtgctgtattccgtagttggatgaacgaacgcgccattctttaccgcaagatggaaggtattcctgccgaatggggtactgctgtaagtgtacaagccatggtattcggtaacatgggtgacacttcagctaccggtgtttgcttctctcgtgacgctggtaacggtgaggatttgtttaatggcgaatatttgatcaacgcacaaggtgaagatgttgtagccggtatccgtaccccgcaacaaatcacaaaaatcggttctcagcgttgggcagaacgtgccggtatttctgaagaagaacgcatagccaaatatccctctatggaagaagccatgccggaaatctacaaagaactggatgccctgcagaccaaattggaaaaccactatcgcgatatgcaggatatggaatttactgtacaggaagggaaattatggtttttgcagactcgcaacggtaaacgtaccggagcagctatggtaaaaatcgccatggacttgttgcgtcagggaatgattgatgaaaaaacagcgttggagcgttgcgaacctaataaattagacgaacttctccaccctgtgttcgataagaaagctttgaaagaagcaaaagttttgactcgtggtttgcccgcttctccgggtgctgctaccggtcagattgtgttcttcgccgatgatgcagctaaatgggccgccgatggtaagaaagtagtaatggtacgtatagagacttctccggaagacttggcaggtatggctgtcgccgaaggcatcctgaccgcacgtggcggcatgacttctcacgctgcagttgtggcccgtggtatgggtaaatgctgcgtatccggtgctggtgctatcaatgtggattataagacacgtaccgtagaaattgaaggtattacattaaaagaaggtgatttcatctctctgaacggtactaccggtgaagtatataaaggtaaagtggaaaccaaagcagccgaagtttcaggcgatttcgccgcattgatggatctttgcaacaaatacaccaagctgaatgtccgcaccaacgctgatactccgcatgatgcggaagtagctcgcgcctttggtgcttcaggtatcggtctttgccgtacagaacacatgttctttgatgctgaaaagattgtcgctatgcgtgaaatgatcctatcaccggatgtagaaggacgcagaaaagctctagccaaattgcttccttatcagaaagccgacttcaaaggcatctttaaggctatggatggatgtccggttaatgttcgtctgctcgatcctcctttgcatgagttcgttccccacgatgcaaaaggtcaggaagaaatggctaaagcaatgggcgtaactgtacaggaaatcaaaaaacgtgtggaaagtctgtgtgaacacaatccgatgttaggccaccgcggctgtcgtttgggtaacacctatcccgaaatcacagagatgcagactcaagcgattctaggtgctgcaattgaactgaagaaagaaggatatgatccgcatcccgaaattatggttcccttgaccggtatcctgtatgaattcgaagctcaggaaaaggtaatccgtgatgcagcagcagcattatttgaaaaagaaggtatggaaattccgttcaaggtaggtaccatgattgaaattccgcgtgctgcattgacagccaaccgcattgccagccgtgcagaatacttctcattcggtaccaatgacttgactcagatgaccttcggttattcccgtgacgatatcgcttcattcttgccggtatatctggaaaagaagattctgaaagtagacccgttccaagtactcgatcaaaatggtgtaggtcagctgattgaaatggctgtagataaaggtcgttcagttcgtcctgatttgaaatgcggtatctgcggtgaacatggtggtgaaccttcatcagtgaaattctgtcacaaagttggtttgaattatgtatcttgttctccattccgcgtacctatcgccagacttgctgcggctcaggcggctgtggaagatatgaaataaattgattattttctgaatataaaagtaggagatacttagaacaagtacctcctactctatttttatggcattttatttttttaagaaaaacatagtttatacatttgtctacaagacaaaatctatactcatatgaaaaacaaatgcctctttgtattactattagctttgggatgttgccatgtacaagcacaaaaaagtcaaaagaatcctttgcccgaagcactcgtccaattgaatcaaaaagtggattccgaactgattcccggaataaaaaggtctcccctgattggaatttctacagatataagtccgaaacggacagccgtaaacacggcatatgtacagtcagtcattctctctggaggaattccttatatgatacctgtaacggataatgtagagatactgcgtcaaattgtatcccagctggacggaattgtctttacaggtggagaagatatccaaccgatatattatggtgaccttccttatgaaaaactggaagaagtaagccccgcccgggataccttcgacttaatggtgctaaaaatggccgcagaccggaatattcccatattaggaatttgcaggggactgcaattaatgaatgtagctttcggtggaactttatatcaggatctgcccacacaacattcctcaagtgtcaaccatcgccaagaagaatccggcactacccccacccatccgatatccatcataaaggaaagcaagttagcagaaattacaggacaagaagtgctgcaagtcaatacattccatcatcaggctatccggaaattagcaccgggattcaaaatcacggcttgggcgcccgacagtatagcggaagctatagaagcttatcccatacgacaaatgataggtgtacaatttcatccagaaatatttacaacagccggagataccaccatgcataaattatttaaattcctagtgaacaaggctgatacattccatctagctaaaaaaattcatagccgtattctatccattgacactcatacagatactcctctttggtttaaaaacggttacagcgtaggcttgagaaaagacaacatggtcagcatccaaaaaatggaggaaggtaaattggatgcacagttcctagccgcatttatatggcagggaaaacgagatgacgtatcttcacaaaaagccgtagaaagcaccaccctgttgattcaatccatttatgacgaagtagcgaaatacaaagatttttgtggcatcgcccttacggaaaaggatttggtacgtttaaagaatgaaggcaagaaagctttctttatagggatcgagaatggttacgccatcggcaaggacctcaagaatataaaaaaatacaaacagatgggagtcaattatataactctctgccattcttacgataacgatatttgccattcgtccactcatacggaagatgctactcaaggactgacacagtttggtcgtgaggtagtgaaggaaatgaaccggttaggtattatgatagatatatcacatgccagtgaaggtactttctgggatgttataaaatatagtacacaacctatcatcgcctctcattcctcgtcaaggactttatgcgaccatgaccgtaatctaacagacgaacaactccgtgcactagcgaaaaatggcggagtggcacagttatgtctcctcgatacctatatcaataaaaccccaaaagccgcatccgtttgtgatgcagtcgaacatttagaccacatgattaaagtagccggcatagaccatgtaggaataggtacggactttgatggcggtggtggtctgcaaggatgtaaaggagataatgacttaattaatctgaccataaaaatgattgaaaaaggatatacggaagaagatttaagaaagatttggggaggtaatctcttgagagtaatgaagcaagtacaggaagcaccacttttttcgttgaaaaaacgtagataatacccaaacaaggataatcaaaaaatatatagaaatatcctgttatcatttttcggaaattatcggggctgtctcaccaatggacagcctctttttgtaacctacagtttaatagtaaaagaaataagacagacccttattcccctctcctcactataggaattttcctattacaaatagggaaattctcctttacaaataggaatattccgtttattgtatcattctctccacttatctttgtgacataagaaaaacaaattttaaaattaacggatatgagaacaaaaatactgaaatacttcggaatggtagttgtactgataataatggttaacctaacctcctgtgaagtatccatagaaagttggtacgatgatgatgattacagcgaaatatattacagaaccactcgggaactatgcagccggacctggcaggaaacttgggaacaagacggtgaatactacacacaacgactagacttttacgaaaatagaacaggcacagacatcatacgaatagaacatcggaacggctatgtaaccgaagacaggtacaattttgaatggagatgggataacagcgcacagacatgcatccgtatggtttacggtcccagtgacatttcatattttgaaaatgtatggttggccggaaacttcttaaaaggcacattggatggtgtcaatgtaaatttcacaggaatcaggtaaaaagaaaaaaagcgagatgatacccaacacatatcatcccgctctcctttttcccaatacactactcactcttaatgctatttaccggattctcattagcgatatgccatgccttaagcaccacacaagccacaataataatcgctacaattaaagccgtagccaaaaagagtaacggattaagatcaacctgttccgcaaactgttccaaccatgctttcccaataaaataagctataacaattccgagtaaaatagaaggaatagaaacatatagaatatcacataccagcagacggagaatgtttgatgcttccgcaccattcactttacgaatagctatctccttactgcgacgttgcgtttcatcgtttacataacctatcagccccataatcactataagcaggataaaaccggaagtgataaggacagaattgcggaaacgatatacatctttatagatttcggacagcatatcatccactgtatggaatgttaaagccacttgtggaaaagttttgtccatgaattcattcaggcgcttcaaattttcatcgtagggttctttcaaccgtacattgaaggtatgattaaacgcattaccacctatcagcacaatgggttgctgcgcctgatagaaactttgattgcgcacatcacggaacacacctactatagttccttccttaatctcatcaaaaggttttcctacggctccatccgtccatttcttaagccggactatctcttcattcaccagcagatctttggcatgggtcatcggctttccttctataatcgtaatgcctaccacatccggataattaaaatccacatagttcatattaagaacacctatacgcttgccgtcactgcccatcaatccttttgtccaatattggcccaatacactatggctggctgtagccacgctctctaccataggctgacgccggatctcatcgcgcatatgaggaacaatttcaatgtctagccaactttcggcttctaccagtccggcagtattgatccccatatccctgttcatcaaatgactatactgcattaacgtaaccagtaataatcccaagacaaaagacacaccagtaaactgtataaacaacagtgaccgtttccatccttttttaccatcagtataacgacggaatacctgtgtgacaggaatatgtgaaaaaatacgtccgggcaatacacctgccaacaaaaataaaagtacaacaaccagcagcggtacccacaaagttccccatgtaaagagtgatgcaagtcgcaccgacagcaaatcttctatcaaatcccgcgcattgaaaatgataaatgcacagaccagaatggataccagaacaataatgcccgtttccatcataaacatactgaagatattcccattattggcaccattgcacttatggacaccgacactcttggcacgacgtcccaaagtagcaattacaataagcatatagttcataatagcgacaaagaagatagagaaacccaaaaagccatagataactagacgctttgttgtttctgaagaagtctgatgctttgttgccaatggaatgacactgagttccagtttccaaccgttatgttcagtcggcatgtatttctccaccatccgctggatgttatcgtttaccacctctatatccgaagcttctccggtccggaacactgcataaaaaatatcatttcctccccatccggctccatccttataacctccttctttatgtacacttactacaaagtctgccttaaacatggtattctccggaatatcacgataaacaccacggacaatcatttcagttttccgctccaacattaacactttacctataggatctgcatcaccaaaaaaacggcgtgcaaaactctcggacacaaacaaagtattggagttaatcaaatcgttaggatttccctttaaaaccggaatgccaaaggtttggaaaaaacaagtatccaccataagacactgttcgtcatccgacaacaattgattttcataataataattaccgttggctgtgtaagaatttatacaagtagctttttccacttctcctggcatattctcagccaaagccgccgctatcggagcaaaaacggaataatcatagatatccccatcgtcccccatcgactcacctgtttccaaattatggtaatatgcgcggactattcctagatttccagcttcaggataacatttttcataacttaactcaaatgcaatctgcgagaacaacaggatgccaacagtcagccccaatgaaagcgatatgactttcgtcacattacttccacgaccgtgtaatatcgtttgtattgcataatataattgcttcatcgctatctatttagttactcaactttaatactctttaccggattctcattagcaatacgccaagctctaacaacgacacacaccactatcagagcgataatcaccaatgctgttccgacaaaatacaacgcattcatatctatcgtttcggcaaattgatccaaccaagcctttcctgtaaagtacgatactacaattcctatcaagaccgatgggacagcaacatataatatatcacgggacagcaaccgaagaatagtcgaagcttcagcaccattcaccttacggatagctatttccttactgcgacgttgtgtttcatcattcacgtaacctatcaaccccataacaacaataagcaaaataaaagtagaagtaatccatacagaattacgaaaacggtatacattacgatagatttccttcagcatggtatctatcggaataaattccaatgccttagtggaatgcacctgctccatgtattcgttcagttttttcaaactctcatcgtatggctgccttaaacgtacatcaaaagtgtggctagtattatgactataaactaaagctacgggaaactgcttatagagaaaagacgtattgcgcacattacggaatacaccaacaatggtgccagctttatcaaaatcattcaatcgtttgcctactgccccatctgtccatttcatcagccgcactacttcttcgttgaccaatacatccccctcattctgcatatctttcccttcaataatagtaatccccatggtttcagcataatttttatcacaaggattatacatcaaggtttctattctcttgccactattatcaatcagcccacgagtccaatactctcccagaaccccatgcatagaacgggtggcattttccaccatgggttgacgacgaagatcgctaaccatattctcagcttcttcgggtgacatccatgtctccgcctccaccaatcctggagtacggatacccatatcactattaatcaaatgatgatactgcatcaaagatactaacaaaatccccattacaaaagatactcccataaattgtacaaataaaagagaacgcttccacccttttttcccatctgtgtaacgacgaaaaacttgagtgacaggaatgcgtgaaaacaatcttcccggtaacactccggctaccatgaacagtacaaaaacaatgagcatcggaacccatagagtttccaatgtaaagagtgaagataactgcaccgaaagtaaatcttctatcagatctttggtattgaaaataataaagagggccactataacggaaattaataccacaatccctgtctcaaaaaggaacatactgaaaatgttgattgcactggcaccactacacttatgcacacctatgctttttgctctgcggctcatggtagcaatagctactaatacatagttcatgatcgccacaaaaaatatagcaaagcccaaaaaaccataaatgtaaaggcgagtgcgggtatttgagtcatccagatgaatttcgggcaatggctgtgcatcataaaagcttctccattcatcatcagcagaatcaggataatatttttgcatagccttgtatatctgacgattgatttcttctctgtccaccccatcgcgcaaacggagaatagtataataaatatcattacgtccccatgttccaccccctatatagccacctccggcataaatgggagctacaaaatcaaaatgataggcagtattttccggagtatcctgataaacaccacggactgtcagttcatgctgtttatccaaggacaatttttgtcccacagggtcctgcccaccaaaagcatcacgaacaaaagtttcagaaacaaatatactccccgccctttgtaattcctcaggatttcctttcaatactttgatgccgaaagtacggaaatagcaagtatctacataagcgtaatttacatctttcagcttatgaccatccttgaatacatttaatgtctcaaaattgaaaatgactgtagcattttcaatccattgtgacaaatcactgcggaacgcttctgccatcggagcaaacaagctatcatcatatccttctcctttctctccagtcttcacattctctccccctccacgtaccaataccaatcggtcggcctcagggtaacatttctcataattgagttcaaatgctatttgtgaaaaaagcaaaataccaatagtcagacctaatgaaagcgatatgactttcgtcacgttgcttccacggccgtgtaatatcgattgtattgcataatagatttgtttcataacaaccctcctttcattaattattctttaatgttcgccactacgctaccatcaaacaaatgaatgacacgatgagcaaatccggcatcatgctgagagtgagttaccataacaatactagtcccctccttgttaagttcggtcaatagattcattacttcagcaccgttctttgagtccaaattaccagtaggctcatcggcgaggatcaatttaggattagtaaccacagcacgggcaatagccacacgctgttgttgaccaccggaaagctgttgcggaaaatgcttggcacgatgactcaaattcattcgctttaaaatttccagaacacgctccttacgctcactggccttgattccaagataagtcaacggtaactccacattttcaaaaacattcagttcgtctatcagattaaaactctggaacacgaaacctatcacacccttgcgcaaacgggtacgttccttctcttttagattggccacctcttttcctatcagtttataactaccctccgaaggattatccaataatccaagaatgttcaacaacgtggattttccacaacctgatggtcccataatagctacaaactctccttctttcacctctatgtttacatgattcaacgcaattgtttctacttctgaagtacgaaataccttacttaaattttcaatctgtatcataataataaattttaattgtttgttctattgatccttattctgatttaatactctttactggattctcattggcaatgcgccatgttttggaaatgacacaactgacaatcaatatcaagaccacaatagctacacatacataataaggaacaagcgaacctacagtcacagcaaactgttccatccataaaccacctacataccatgcccctaatgtacctgcgactacagccgggaaagaaatccaaagaacatcttgcaccaacatttccaatatcgcaaatgactcagctccattcactttacgaatagcaatttctttcgaacgtcgctgtaattcatcattaatatagcctatcagtcccatcaaagtaataaacaagatggcaattgccgccaataaagtcgcattacgaaatacacgaacggaattataactatccgccattttttgttccaagctttcaaaaccgactgtttgattcggaaaagcttcggcagcatcacggttcagtttctgaagattctcaccaaagggttccttcagacggagataaacaagatcagccaaatctctgggatgatggtgcagaacaaatggtttcagctctgagtagaatccgtcaatattaaaatctttaatcacacctactattttgacacgtccttcttctgtctgaatactcttacctaaaacatcttttccccaatgcattctccgcacaaattcctcattgacagccacctcaccggattcacgcggtacacgcccttgctgtatggccattcccataaaagcgacataattctcctgagtaaaatcatagcgactggaaaaaaggctcgttcctttctcatccggtatcatctgcccgctatatccattagacggatagctagttgctgaggtcaatgcttccacgtatggaagcccttcataaaagtgacgggcagcaagccgagcttcagcatccggtgcattattaataccaatcactacccgctcaggattataacccggatctttattaataacataatgatactggagcatcactacacacatcaatccacatataaaagccactcctgcaaattggataaacaataacggacgtttccatccttttttaccctctgtataacgccggaaaacctgtgtgaccggtatctttgaaaaaattcgtcccggcagcacaccaccaatgaggaataagacagcagtcactcccaaaggcacccaaatacgttccaccgcaaaaagggactccagtttagcagctgtagtatcttccacaaactcccggaaattaaacattaaaaaaaccatcaaaaacaatgaaagcaaaataataatacctgtttcccacataaacataccaaaaacagtacccgtccccgctccgctgcatttatgaacaccaatacttttggcacgccggctcaatgaagaaatagaaatcaacacataattcaatgtcgtgataaacaaaatagatatacctaaaataagcataatattacgcattcttttcacttcatcatatccacggtacgtatcccgaacaggttttgccatgacagtgattccaaacttatcacttctgggaatatgttgctgtactaccatatcaatacgcttgttcaattcatccaaatcaatatcctgcttcaaccggatatattctttccagctgtccccaccgttccatgaataatttcctatccggcggctccagatagaaggcaaggaaatgacggccttcggtcgcatagtacaattctcaggtaaagcagcatacgttcctttgactgtcaactcaatttccttattgaaactaattattttaccaatcgggttctcaccgccaaacattttatccgccaaatctttactcaggaaaattacatctttttgctgcaattcgcgtaccggatcaccactcaagacctcaatacccattgtctgaaaaaacaatgaatcagcagcaactttaaaatcatcaaaacggacacttccgttgtaaacaggtgatgataccggccatatccccgcacttgccgccgattccacaatttccggcattgcatccagtatgcctccggcagctgcaccgataatatattcactaggaggaagaggttccccatttactgtccatatattccacaattggtataatttatcatgatccttaaaacaagtatcaaaactctgctcatacacaactcttgagaaaagcagaatactcatagtcaggcccaagcctaacgagacgacttttattatattagaacttcgtccatgtatcaaagcctgaatgacataataaatctgtttcatatttcgtgtttttaatcattattattttgaaagagagaagtcccgtttcacaacgttacttcccataaagtgtataagaaactaaagtttctataattcgttctctataatagaaatgctaaaaccgtgccacgcaaacaaacaactgattaacaacatattgcaaaagaacaaaaagaaacagtttgtctaattattagacaatgatgtatgataattagacaaactataaaaacaaacaaatagttctacgcttcaaacttattggaatttgccttattttactatctttgcattatcacctatataaaacaaattattatgaaacacattcttttggcagcctgtgcggttgccatattaagcggttgcggttcgcaagggaaacaggcagcccctaccggaaatccattcctttcggagtacacaactcccttccaggttcctcctttcgaccaaatcaagatggaacattacaaacccgcctttttgcagggcatggaagaacaacagaaagagattgacgctatagtaaacaaccccgaacccgccactttccagaataccattgcagcactggatcaaagcggaacgttacttcgtaaagtcagcaccgtattctacggactgaaaagcgccaataccaatgatgaaatggatgcactgagccgtgaactctctccactacaatcaaaacacagcgatgacatcgccttaaatgaaaaactttttgcacgtatcaaagctgtctatgaaaatcccggcaatttggacaaagagcaaaagaagttgttggaagaaacctataaagattttgtacgtggaggtgccaacctggatgccgaaagtcaaaaaaaattgcgtgaattaaatagtgagatttccatgttgcagctcaccttcggccaaaatatgcagaaggaaaccaatgctttccaattgatcgtggacaaagaagaagacttagccggattaccccaaaacctgattgccagtgctgccgaaacagctaaagaagcaggcatggaatgcaaatggattttcaccctgcataatcccagcgtcatgcctttcctgcaatatgccgataaccgagacctgcgcgaaaagatattcaaaggatacattaacagaggaaataacggaaatgaatacgacaacaaggaagtggtacgcaaactgctcaaagcccgtctggaaaaagccaagctgatgggatatgaaaactatgcttcctttgcactggaagaacgtatggcgaaaacaccggatgccgtatataaattattagaccagatttggacacctactctgtccaaagccaaagaagaactggcagatatcaatgccgaaataaagaaagacggaaaaaccttcacagccgaaggttgggactggcgttattatgcagaccgggccaagaaagccaaattcgacttggatgaaaatcaggtacgtccttatctgaaactggaaaacgtacgtaacggtgtgttctatgttgccaacaaactgtacggtatcactttcacccagctggacaatcttcccctccctcatcccgatgcacaggcattcgaatgtaaggacaaagacggttctcatctaggtgtactctatatggacttctttccgcgtgccagcaagaaaggtggcgcatggtgcggaagctatcgttcacagacctacaaggatggcaagaaagtggctcctgtagtaaccgtggtatgcaactttaccaaaccggcagccggacaacccgctttgctcagtgcagacgaagcgaataccttgttccacgaattcggacacgctttacataatcttttcaaagatgtacattattatggtgtggctagtgttccgcgtgattttgtagaactgccgtcacagatagatgagcattgggcttttgaaccggaggtattgaatgtatatgccaaacattatcagacaggtgaagttattcctgccggactggttgaaaaaatggacaagagtggcaaatacggacaaggcttcgctacggctgaatatttagctgcttccctgctggatatggattatcatgtattaaaagaaattcccgatgatatggacgttatgcagttcgaagcagaaacattaggtaagcgcggattgctgaaacaaattccgtcacgctatcgcaccacttatttcaaccacaccatgggtagtggatatactgccggttactatagttatatttgggcagaagtgctggattgtgacgcatacgaggcatacaaggaaacaggcgatatctttaatcaagaagtagcaggaaagttccgcaaatatatcctcactcccggctgcattgacgatgcaatggacatgtatgtcaatttccgtggcaaagaacctggtattgatcccttgttgaagaacagaggactaaaataaccctctaaccctaaatagaattcctccccctgcaaaagacaaatgattgtgactcttgcagtgggaggattctcattttgtagtatgattgcggatagttctttttattttttgttccaaagcaagaaataatcctcagagaaagcgtcctttgtgcctgtcaaatcaaaaattaaattatgaatcaacctattgctatgaacaccacaagaaaacatgtggtatggctggatgtcgttcgtttggtagccatgttcaccgtagtttgctgccatagtgcagacccgttcaacttttaccccggcgaaccgccagccaacattgatgaaatcaaattctggggagccgcctacggagcctttctccgtccgtgtgtcccactgtttgtcatgattacaggagcattgctgctccccgtacgtggcgaaatatccgctttctacaaaaaaagaatcagccgtgtattctggccgttccttatctggagtgtcatttataatttatttccctggtttacaggattgttgggacttaatcctgaaataatccttgactttttcccttatagcggtgaagaagccgcccgtcagtcactcaacgtatcattgggttatatagcagaaatgcctctcaatttctctttattagacgtacatatgtggtatatctatctgcttatcggattatatctataccttcctattttctccgcatgggtagaaaaggcctcggagaaagccaaactatggtttcttgtcgcatggggaataactggtttgttaccttattattatcagttcgtatccccatacatttggggaggctgtgcgtggaactcgttcaatatgctctattattttgccggattcaacgggtacttgctattgggacactatctgcgcaaccacgactggtcatggagtaagacactgtcagtctgtatccccatgtttctggcaggttacatggtcacattcttcggtttccgccacatgaccgcattaccacaatgcactgatgaaatgttggaactgttcttcacctataattctttgaatgtgattatgatgactatccctttcttcctcatagccaagaaagtaaaagtacgctcagaactgatccagcgtatgctggcaaacttgaccgtatgtggttttggcatctatatgatacattattttttcacaggtccgggtgtagtcttgatgcgcaatatcggtgttcccgtgcctttacaaattcccgctgccgcagtcgtggcatttggcgtatcgtggctgcttgtagtattcattcgtaaaataagcggcaagaatgctaaatacattgtaggataataaaaacaggacatacaaatatcgttatataagaatagccggaactactttttccaagtgattccggctattcttataatgcttcatccactagaaatcaagtcagttatttgagatgtaatttaaagaatatacctccgataaaatatttaccgtcattcagttcagcaataagattgatatggtctttccatattgaataagttccacccacattcacagtataagttgctgtatgcagatcttccgcatgtccgggacacacttccgccatcaaattaaatccattcagagctttctgccagaaaccttcgccctttatgccaaaatgaaagtttacccctgcagcaggacggctataatgcacatcactcatagctttaccgataacccaagctacatgaacccccactgtacctattccactaaattcaacatgtttcgttgccgccagataataacgtgtcaagtaattgtggtttccgctaccaccgcccccccaatctatgtctccacctccatttgaagaatggcttcccggatcattcgcaccaatcactacctgaggcgtccaagccttccaccagccttctttccatgccctcaaccggaaatgaaacgatctgtcctgattggtaaacctgccccaagtttgctgaggccaataagaagaaccatgtatcccctttaccaacgtacaagtatatgctacttccagccaaggaaacagagtacaatttatataatagttataggtatagggatgatattcacttctcacccaatatcgggaaagtatatttacatccagcatatttcctcccagcataacggttttatctttctgcataacggcagtaggtgcatgaagtagtcctgtagtaccataaaaagcctgccctttgataacattcattcctccaaagagtccccccagaaatattagagttcttaatttcactattctatgaattttaatttatatttgcagcatgaaaacagatgtattaaaaatactcggaaaaattattcctactgctatcttcgtcctgttgttgccattctccattatttacatggcaataagcaaagtctgctctttcatccgaaaattctttccccgataaagcgtaccggaaacaagaatgcagcttgcagatatcttgtacgtgtatgtttctctttatacattctataaacgaaacgcaaattcatcttatcaacccagttcggataatagtgcatcctattcattgccgtttggtgaacaaagccaccacacgtaaagccgatgccttggtaacccatcttttttaccttaagcagaaacttttcctgcatcaaggcccccatacctactatcagaaaatccggatttaattcgactatatgagaagcttccttattcatttcagcatccgaagagaaatatccgttcctgaaccctgcaatgcgtaactccggatactgctcttgaaatatcctcacagaacactccacttgttcttgacccgaggctacgatatagagcgttttacggctttccatgaggtaattcaacaattcgggagcaagggaggtcatatcaaaactacgtctggtcactcgctttccgtatactaatcttatggcagaaaccagtaaagagccatcggcaaaaataccatcgaattgttcaaataaagatttgttttctaaagctatgagataagatacggggttgagaaaggtgtaaattctgtttttcgtttcgaaaagttcgggagacgtccatttctctgtttgcaagatgtgattgactaagagagatgtcatattttatactacaagtttttgtaaattctcatgaggttttccgcctccgtttctatattataacccgctttagtgataagttcagtatttctttcgcaacgttcttgacgagacaattcgtatttaacattaccgagatattccgcccaatagtcagcacctttacttaaaggtaattgaattacatcttcacctatgtttaccattttagttacagcatccgaaataatgcatggtaggcctgatgcctgtgcttctaccacagataatggcataccttcataaatagaaggaaaaagaaaaatatctattgcctgtaacacatctgggatatcagaacgcaatcccgccaatattacacaatcattgactttatttttatctattgctgcttctacaagatggcgcagttcaccatcaccaatcagcaataattttgactttggctgcaaggcatgatatttggtaaacacttcaatgagaaaaggatgattttttgcttccatgaatttaccaatatgtcctatcacatattcatcatcaccaaaaccaaagttatggcgcattattaatcttttcactacatcaaatttaaaacgcttcgcatttatagcattacgcaatgtaataaacccattcttgccataaagccattctccagcttcatcagagcaagcaacagcttgagtaaaagaacgtctatagagagacaaaaacaactgatttaaaagattatgttgagatctactactatgattatgtataatccgtatttttattcctgcccatattgccgcctgtaattccatcactgccatagcactattggcatgcacatgcatcccgtcatagcctcggcataatttcttcaatgcaaaaaaatatgccaaaacatttttgcgatcaggcaactgataatattcactaccactggcatgtatttcatcaagcagaacttgtggcggattattagtggaagcaaagtctatcttcacctcctctttattcatcatgcggtaatagttcatcatcactgtagtcagcccccctgtaggaacaaaagctgtagtaatcacaacaagaatattcttcattttttattttattatgcctaccaaatctaatatatgttggcagaaatttccgtcacggtattcattcaccaattcattcacccgctttctctcttctttataaaagtctgtattcgtcaaaaggcaatctataaactcataaagattcttcaaattccgaatcctatatccaggcttgtaaccttgcggatcatcaacagcaaacccacgcacatctgaataatcctccaagtcatcttctgtaaatgcaatgggacggtctaaaagtaaataatcataaaatatggatgaataatctgtgatcaatgcatcacattgagtcataaatttataaagatccataccacgttttacaaattctgcatgactaagcagtatgaaattactcatttccatcatatcatatttatctaagtcttgaactggatgtaactttacaactatctttactcccttttctttcaaataatcattaatcttaataaaatcttcactatgcaatatcggaactatcttagcgtcttctacatcttgatagcccattttgctagaatatctaaaagtaggtgcccataataccaactttttataatccccaaaatcatattcgggccatgatttatataaaatgtcattgcgaggttgtcctcctattagcacatgatccaatggcatagagaaatatctgctccatatcttggcaaaggttcttgaagtagctacagaaaaagaataatattgatgtttccaagaatgccccttcaacatacctgcatcagccgccttataagggcttccatgccatagttgaatagtcttttggttgattcctggcactataggtatcttcccaaagctataaaacacatatcctgcaaagaaataataaaaaaatcccttcacgcaactaacaaatttcacattggggatattaacaaaagaccaccgcttaaaatcattacagcaacaaattatttcatattgttcattatatttttgctctatcaaatagtcataaagcgacttgacattatcacgaaatcccatgttagaatacaatattatttttcgtttgtcatgtctgattcgcttattgattatagaaaccaccccaaatacataggtctgaaaaatctttttcaattttggattagaaatcatagattgcctgcttctttgattgttgctaacattttatctttcatacaacccttcaattgccaacccaacgcctccagtttctttgtagaaaagacagattttgttacaacattaaaagatttcttttccatatcttccggcagaattgtaatcaccttttctccacccaactgagcaattaattcggccaattctctaatagaaatattggaactggcatccgctatattatatgcttgctgagtctcaccttttaataaaatataaagtaaagcagatacgcaatctacaacataacaccatgaccgatattgttctcctgtacttttcatcacaatattttcctttcgaagcacattacgaataaattgagcgtacacacggttatcggattctgtaaatcctggtccgtaaacatgacaaggacgtgctattacaacatctatgccatattctgcgccataagatatacacaatgtttctgccgctcttttacttgaaggatagcatgaacgaagtgaagtacaatcaacatatccgctataattctctgtaaatactcttccatcgccttcaccatatacttctcccgaagaaatgtagagcaaacgttttataccatgttgtatgccataacccatcaaattatccaccccgttaatattaccttttatgacttctacaggatgtttaataaattcctccggatatgctccactagcagcatgaataatatactgaaaatttacatcatattccaaaggctgcgccacatcgtatttcacaaaatggaaggcgttgtcatcagcatatttcagaaaacgccttcctgctctttcctcatttcttccagatgcatatacattataatttctgcctttatgagccatcaatacatccacaagacatcccccaatcaagcctgttgctccggttactaaaatattacagccactcaacttattccacggcaacaaaagagcggcagctttctttatatcatcttggtatgccatattatttctatttcaaccatttatccttatctgtatgcatcaaagcctttaagatttccaagtcttctactgtcgtaatctttatattcttctcagaaccaggcacaatatgcatttcaatattctcatcaagttccgccaacaaagtgcaagaagctacagaatttacaataccttttttataagctgattcatgtgccctaattatattcttcaatcgaaaagtttgcggagtctgagtgcgaataagagtatcacgcggaatacttgttgtagaagtaaatccatctccgctttccaatatagcttctcggcattgaatacctgtaatagcatagccataagctttgcaaattgcgatatttgaggaaattatctcttgactaagcagtgggcgtacaccatcatgaataagaacaagatcctcatcattacatcccatttctttcaatccgtaaactccattatgaatactttccatacctgtgtttccaccaggaaatatccactttaatttatcaatcataaattgattagcgtacgattgtaaaacagtttcccaaccgttcaagcacaccactgctattgcagaaacatcaggatgttgttgaaaacattgcattgtccgaatgataataggaactccatcgacatgcataaattgtttagggatatcttgtcccatacgatttcctgaaccgcctgctattaataatgctatattcatctagttaattttatttataattatattcaaacacaaaaattatcttttaaacattaatcttttacgacttcatactcattatttcctattagcgcagctgttaaagcaaattttgtggcgccatacatctttccatattgataagaatatgatttctctgcttttgttattatcataaaatcaagaaaagtctttaaatgcacttcataatcatcaaccacggcatagtccatatgctctaatctgcctggaataacataaacatacgacaaggacttcacaagcttcaagaaatacggagaatctgttgttactactattttataacattgaggatgacgcatatgtagttgttccaaacacgctaggctttttttgatataatatcttttttcttccactgttaactcttccccaaaccctgcatgatctttaaaatcccccaaaataccgatgaaacggaatgacacagtgatgtatttaccacctatttcctgcaaacattgactgatagcctgctccaaacggggagcaggcttaaatagttcttgaaaaaaagctggatataaatcctcacgttgagtaatagaactatatacatgacaaatgggcttctgaaatccagcagactgaaataatcagcttgatgcccactcatccctacataattattaaagaaacgaaaatcaacaaccttcttgtcatgtgtcaaatcggcttcgtcagctacccaattttcatgtacaggcatcagataatcttctaacttgaacggataattccaagctactttaaaagtatatcctctttgtttgcaataataatatatagaaaacaagcctcttaaacggtcgctcaaaccaccatgaggtgtctttccatcaataataaaaaccacacgaggaggagagataaacgactcattaccatgcgtcttagaatcagccgtatacacttttctaaaagtcaccacatactttacagccatttgcagcctcgctgtgttttttcgccctattaaacgaatcaatttttgaaatatactatgtctagtcataatctacattttctcaaaagaaagctgatactatttttatcttagatcttatgatatatgcaataaattgtatattttacggactatcaacattttcttcaacctgcgcataaaggtatcatcaagctttacatccacccatgaaccagccatcatgtgaatagcaacactcccaaatctagcagtaggataactggcaaatactcccgaatcaaaaagacacactttatctttcaacatctgcttcttatccctatattttagtcctcgtttttccatgagccaggaatagataactggagcaggtgtttgatcaaactctccttgctcatttacaaactgatgagtatgataataatccaataattcctttgtaaaaggatgccctttttcactacctataatagcagcctgaataccaaggccaacaacttttcttacactttctctgcgtttgtagtctaaggttatactgtcctttaattcttttttgtaagtgtgattatactccatagaagatacaaaaccataattcaaaaatgtatcaaattttttatttacaatcacatcggaatcaagatagaatcccccttcagtaaataatgcataagctcggatataatcggcacaaaacgcccatttcttttgtgcataagcatcttctacccattttacactatgaatatcaaaagcctttttatcccatttttttattctgtactctggcatcacttttctccatccatctatatacttttgaatattggcaggaataggttcatcactcagccaacaataatgtattgtctttggaatcatatttatttttttaatttttaaacgcaaaagcaaaaaggtatacttgtgcaatagcagtacttcctacagccaaagaatttgaagaggaaacaagcgataagaacaaaatacaaataacccaagcattaaatttcccataaggtattaaccacttatgaaacaaagggataaaaaaaagaatcatagcaaatgtttgcagaataccatatcgaaaaataaaaataatccacggattctcaataataagataatccaaaccagccatcgcttgaatatatataatatcctcataaggaattccgacaaacataaattccctataatccacaacctgaaaaatatctaagatttctgttcttgccattgaactggcatctccatataatcctaaatcaagcaaacgccctccaaaacttgtattgaatagcatataaagaaagacagcgcttgtcaatcctatacacaatacatattttatccgatgacgagagtatatcatatttttataattcaacaaaatatatacaacggctgacaggacaatagagaaacgtgaattaaaacataacagagccaacatacctatactccataacaaattttttttctttattgagaactcattttgtaaaagaataaatggcatcattaaagacaatatacaagaattagacaaaggatgtccccataacccacaactcctaaactcataggaatctattctaccaacaaaagcatcttcattttccatattgccgaaaaaatgaaacatcataattttttccacaatagcaataaaacattctaaatagaagaatatcatcacaatatatcgaacttccatctgcatacgtttattctgaaacaaagagaaaagacaagataaacataccggaaatacaatagctgaaatataattagtaatttgatattctcccttgatgatcatatttacatataacattattgctattacaatgaatatatgtttctctggattgggtattgtcattttatgaacatatataaagaaacagaaaaacaacaatattacaccaattcccaatttaaatacagggcttatgtttatcagactagaatagcctatgacagacaaaagatttcctgtcaaaaccaaaaaagaaaatataccccaaagcaataatctagaatactttttactataactcatcatatccatctaattatacaaccaaaaatattttttattttctgtttgtatcttccagccattcgtttccatgaagctagatatagctggccccaaatatgaataaaataattattgaaagaaactactacataagattttctcaaatctaagtccttagaatacaatcgtaaaacattattctcattcaaaaaagattcaactgctagagttgcatcatattgatgaactaaactctgaatatcttttgttgcaataagtgacattgtattataaacaacataatgatacaaagcagtatcaacacaaactatgcttgttgcataaaacagatacttaacacagaatacatagtcctcacctcctttatatcctaaaggaaaaacgatttcattatttattgctatcaatcttctgaaaaagaagcgccaaataactccccaattactgcctatcacatcttgcagacattcttctcttgatttatatgtgaaataacgtacagtatagcgtgatatactttcacaataaaatccgaaagaaatcgcatccgcattagaagtgatagctgtatgatatagcaatgtgattgaatctggttctatccaatcatcactgtctatataccaaatatattcaccattcgcctctgccaataaaaggttgcgagctgccgcaacaccaacattgtacttcccaaaaataattctaacctgatctcttctattaggatattttttcaaacaggattctatcacctgtacactcctatcgggtgaacaatcatcataaaatataaattctacgtcctcaaaagtttgactgaataacgaatctgcacatttgtatacaaaattctcgcatttatatacaggtactaatattgaaacttgtaccatatcaccaatgtataattctaaatattgtatttattatgtaatagcatattctatttttacatatattaattatcaaatatttaagtttcttttgacgtaagaccaattccggataaagttctaaatatttgcgataagataattttccatatcgcaaatatccccattttacagagattttattacactgcaaccaactagcag

SEQ ID NO: 14433 - DNA, 18477 bp, Unknown
  gut microbiota DNA sequence
tccggtaaatttcactttgtctgcattaatgataataacattatcaccgcagtcagcatgaggggtaaagtctggtttgtactttcctctcaacagtttcgcaactttcgaaccgagacggcctacgacctgatcggttgcgtcgacaacaacccattctttatgagctgtttctttgtttgcagaaatggtcttgtaacttaaagtatccactcttaaattcttttttaaatgttaactactaaaaaacaattcttctcagcgtttctaaccgttcccggacaaagaactattaacacgctaagaattaatcctttataaacttttgataataatcggcttgcaaaggtacggcttttctttgaactgacaaataaattaagatattttttcctcttgctattcgcatacaaaaggctgatataaccacatctaggctttgaataacggactaaaaaacatagggaagagattttgattcttccctatacatatacagttattcattctattttcaacgattccagccactctccatctcagagcaagtacacacagccacagatgccgcattgtttccactggactgacgaagctttaaaagttcagttgctgagatccggactacttttccatcgggacgaccataacacaatgtcccttcgcgccgtgcagtttcctctatcaaccgctgttccgctagttctaaaccataacgcaacttcgcacttaattccttatattcttcttcagttgacataacttctgattttagtaaaaagttcttgattatagatatgggcctcatctcccaaacggaaggcgtccgccacaataacacgcggtgtgcagctattgtccgcaagcatccaataatccacgcaaggcatataaatacggaaaaagttttccaaccccgaacgataacgacgacggataatgggagcaggcacatcatgccctccattggcaacacgctgtttcactcgctctatagccaattcaggcgaattcagccaaaaataaataaggctgacactatatccttgattttgtgcctgctggataagattgatataagaacgggtggacaatgtggtttcaacagaaaagctgactccggccgacagtaactctccgatacgtttcagcatcagtcgcccggcttcgatagccacacttgaggggttaaaaggagaaagtcccttagcgatttcatcggcattgacaaattcgcggcactctaaaatttcgggtaataccgtgtacgaagcggtcgttttaccggctccgttacaccccgctattatataaagtttagacattaatctccttttctatttctgttattggcgacaaagttaacgattatttccaatctttgttcttgaaaaggcataaaagtgatgaagaatagcacattttttgaaattctgtgcaaattaagaagagattacaggagttttaccttatatttaagcaacctgcaaacaggtagcagttactcattacatcattttattgaagaaaattagtacataagcatctttcatttaagtatccaaacaagtaatcatataaataggacacatatcccaccataatagcaagtacacttgtttcgtcagacaaatatcatgtataaaataaatagggccacactttcaaaaaatgaaagcgtagcccgaaaaatgactattctttgtttataaacaaagattcaaacttatctgaccaaatcctttggataaacaggaggcattttcactcgtttccaagtttcataataccaggaattgatttcatttccatccttatccgttttcacaaaaaacttcagcaccatgacatctccccccttcatctcaaattccaaaatattatccacacctaccaattgtggaagatgcaagtttttctccacatgctctgtataagcattaggagcagtctgccgataggtaccggaaccaataataatagctccatgattaggaatcatggtcatattggtaaacttgccgtcatcagacaaaattttaaaagaattacttggtttcaactcacccggtacctgaggagtccctgatacataaaagcacatctgccaaattcctttcaagttgacaggggttacatccgatttttcctgtcccactacacgcgaagtaccgataagcaagaatgctatcatcagtaggaataattttttccgtttcatagttgtatatatttagttaacaaattgcgtaatgtggatatacaaaattagaaaaatttttcaaacttcctgctttttaaataacttttttacagttaaatacaaaaaaaatcctgctctatgttatagggcaggattttttgaattattatttccaacaattagaattcagcattacgcggagtacgtgggaaaggtatcacatcacgaatattggtcataccggtaacaaacagcaacagccgctcaaaaccaagtccaaaaccagaatgaggacatgaaccaaacttacgggtatccagataccaccacatatccttcatcggaatttccaattcctggatacgggtcatcagtttgtcataatcagcctcacgttcagaaccacctattatctcgccaatcttcggaaataagacatccattgcacggacagtcttgccatcctcattctgcttcatatagaatgccttgatttctttcggataatctgtcaggattacaggacgtttaaagtgctcttccaccaaataacgttcgtgttcagaggctaagtctactccccaatataccgggaattcaaatttatgaccttttgctacagcttcctccagtatcttgataccttccgtataaggcagacggacaaattcctccttcagcacgccctgcaaacgttctatcaatcccttatcgaacatgtcgttcaaaaacttcacatcatcatagcagttgtcaagcgcccactgtacacaatatttaataaagtcttcggccaaatccatattatcagtaatatcattgaacgcaacctcaggttcaatcatccaaaactcagccaagtgacgcggcgtattagaattctccgcacggaatgtaggaccaaatgtataaatagcccccaaagcagtagcagccaattcaccttccaactgtccagataccgtcaaactggcttgtttgccaaagaaatcatcatcataaataatcgctccgttttcatccttcttcaaatcataaaggttcttggtagtaacttggaacatctgtcccgcaccttcacaatcagacgctgtgataataggtgtatgaaaatagaaaaaaccacgttcatggaagaacttatggatagcgatagccatgttgtggcggatgcggaatacagctccaaatgtattggtacggggacgcaagtgagcgatctcacgaagaaactccatcgtatgacctttcttctgtaacggataagtgttatcacaagtacctaatacttcgattccacgcgcttgaacttcggctgcctgaccagagccaatggattcggtcaactcaccgttcacactgatacatgcaccggtggtgatctgcttcaacatttcttcgtcaaagtttgccaaatcaacaacaatctgcacattatttattgtagaaccgtcattcagggcgataaaatttacctgtttgctaccgcggcgggtacgaacccaaccttttacattgaccatcgcaccaaaatcacggcacttcagcaggtcaacaatctttgttctactaattttttccattgttttgtctctttattgtttattattcaaatgagcccatgcggagcatgttcacttcttgttcagtcaggtaacgccaatcaccgcggcgcaaaccttttttagtcagaccagcaaaataaacgcggtccagcttgatcaccttatatcccaaggattcaaaaatacgacgcacaatacggttctttccggaatggatttcaataccgacttgtgatttgtctgtttccgatgcatagctgatggcatctgcatgaatctctccatcatccaatgtcacacctgctgcaatttggtcaagatctgccttggttacattcttatcacaatatacatgataaatcttcttcttcaaatacttaggatgagtcagcttggaagccaaatcaccatcgttagttaacaataacacaccggtagtattacgatctaaacgcccaacaggataaatacgctccttacaagcacctttcacaaaatccattacagtcttacgttcctgaggatcatcagaagtagtcacacaatccttcggtttattcaacaaaatataagttttgcgttcaatacttaccggttcgtcatggaacttcacttcgtcagtacgcttgattttagtacccaattcggttaccacttcaccatttacactgactacacctgctgtaataaactcatcagcctcacgacgggaacatatacctgcattagccaagaatttgttcagacgaatcggctcatttggatcggtcaatatatctttatattcaatctgtttcttcagactatactttgcattcgggttataatcagccgtacggggacgatagggacgattgtatccaccaccttgattataaccaccggtacgaggacgataaggacggtcgccgccttgattataaccgccggtacgaggacgataaggacggtcaccgccttgattataaccgccggtacgaggacgcggagtgtaagaacgctgttcacccccttcaccgctgttaaaacggggacgcggagtataaggacgctgctcacccccttcgcgattatagtttgtgcggggacgatattgacgctcaccaccttcctcaccattattaaaacgagggcgcggagtatacggacgctgttcgccaccttcacgattataatttgtacgaggacggtatgaacgttggtctcctccatcctcactgttaggattaaagcggggacgttgcggacggtctccgttattgttatagcgattataggaaggacggtcaccgttgttataagaagaacggtagggacggtctccaccttcgcgattatagctgttcgtacgaggacgataaggacgctgttcgccgtcgttgttgtatctgttgtaattactgtctctgttataagacttataaccaccatcacggcttacattctggttttcttcatttgcagcaccttcttgtctgctttcattttctgtactcatggttttccttttattttttaattaatgtataacgccctctcgggctttttggattaaaatctaactaactattttttaaatacctgtataattatgcggtgtaatcacccgcagttcctttttaatgtcttcgcttacatttagtgtttctataaattctttaatagactcttctgtgatagcctggtttgtacgggtcaaagctttcaatgcctcatacggatgaggataggcttcgcggcgcagaattgtctggatagcttccgccaccacactccaacaattatccaagtcggcatagattgctttctcattcagcaacagtttgcgcagacctttcaacgaactttggatagcaatcacaatgtgaccgaaaggtacaccgacgttacgcaacacagtagagtctgtcaagtcacgttgcaagcgggaaacaggcaacttagaagaaaggtgttccaaaatagcatttgccatacctagattaccttcagcattttcgaaatcaataggattcaccttatgcggcatggcactggaacctacttcacccgctttaatcttctgcttgaaatattccatagagatgtactgccagaagtcgcggttcatgtcaatcataatggtattgatgcgtttcatcgcatcaaaaatggctcccagattatcataattagagatctgagtagtatattcctcacgttccaatcccagctttcctgctacaaacttattaccgaattctttccagtcatattcgggataagctacatgatgcgcattgtagttacccgtcgcaccaccgaatttagctgtgacaggacaagctttcaatacagccagctgacgattcagacgataaacgaaaaccatgatttctttacccaagcgagtcggagaagcaggctgtccatgtgtttttgccaacatagggatatttgcccattcttcagcgtatgtagtcaactgggcaatcagctcttcaatttgcggatagtatacttgttccaatgcctcctttatagacaaaggtacagaggtattgtttatgtcctgtgatgtcaatccgaaatgaataaattctttgcattcctccattccgcccaacttatcgaattcttctttgatgaaatattctacagcctttacatcgtggtttgttacactttctatctctttaatacgctgtgcgtcagcctctgaaaagttcttataaatagcgcgcaatgcatcaaaacgtgcatgatcaaagtctttcagctgtggcaacggtagttcacacagagtgataaagtattcaatttctacctgcacacggtacttgatgagtgcaaattcagaaaaataagaggccaaagctcccgcttttcctctgtatcgaccgtcaataggtgatattgccgtgagtaaatcgagctccatattatattctttgataattatcagactgcaaaattaattctttttcttgagtttaacggtctgaagatgcataaagtttgcgaaaatgaagatttatttcacaaatccctttttagtccatttcagactattccaacgctgtacaaagataataccacgaagattttcatccagcacaaatgcacaccacatacctaccagtccccatccccaatgaataccgaacaagaaaccacaacctacggcaacactccactgaacaacaaatcctacataaaacggataattcacatcacccgttgcacgtaaagcattcgtcgcataaatattaatagcccggcccacttccaaaatcacatcaataaacaggataatagtacccaaacggataatttccggattatccgtcagccagctaaacaaagtatgccccatcaaagcccagatacaggataaaactaaagaaaccaaaatagaaatacgcatcacatatttgcccaacagataagctgcatgaagtttcctctcacctaccaaatgaccaatacagatggctccgccttgtgccatggcaatagcaaacaaataaacgaacatcactatattcaccacataggtacgagtagccagcgcttcattccccaacatattaataaaataggtcaatactacctgagagaaactgtaggacatattttctccggccgaagggactccgattttcaacaggtttttcagctcgacaaacgggaaggggcgaaaataggataacggaaatctgggaatatgtttacggaaaagaatcacaaaaagtatcaccatagatacccctcgggcaaatgcagtagaaatagcagcaccttccactcccaaagccggcataccgaacttaccaaaaatcagcgaatagttaccaatgatattcagaatatttacaactaccgttaccatcatgggataaactgctttattggcactgcgcaaagaggcagaaatagtcagagatatggcttgaaaaaaagcgaatgcccctactatctccatgtaactcactccatattccatcagttcggaacgaagccccatcatggacaacaggaaagtggctccatagtgtaaaatggcactaacgaataaaccgaacgccagattgagtatcaatgatactcccaccacctgcaccatattcttgtgcattcttgctcccaaatattgcgaacagagtacggaagttcctatattgatcacctcaaatatcaggaaagcaaacataatgagctggttgaccacccctacagcagccacactattgtctgaatactgactcagcatcacggtatccactgcacccagcatcataatcagtaatgtttcaatgaaaataggaaccgccagtctggctaggttctttcgtatgctcctcggttcttgaattacgtccacttatcatctttgattttcggggtgcaaaggtacggacttttcacgatgcaacggtttgatttatatcaagaaatatgaacttaagatttttaccagaagataaacaggaatctgatcttttctttttatctttagaaccaaatcttaaatcaatagaacaacatgaaaaaaggaatccttctgttatctgcaattctagcattgggctctctgtcctcatccgcccaaaaaagaacagccaccatgactgatgaagaaatgtaccttgatgccatgcatcataacatcactaccgaaaagattttcggttatgtaaagcaactttcagacccagccttggagggacgactcgcaggttcgcccggaatggctaaagctgtagatatcgtaaaaggatattttaaagagtgggaactgatacccggtggtgagaatggttcctacatacagctattcccccacccttgtgtggaaatacaaccgggaagcactatggatatcctatttcctgtcacccaaggcaagaaaaaaactgtatggatctctaagacatatccttgggcagatggttggtttgccggaggaatgaccagtgacggggaagtgacagccgatgtggtatacgccggatttggcgttacagcacccgaattagcatatgatgattacaaagatatagatgtaaaaggcaagattgtgctggtggagggagaaacacccaatataagccgtaaccccgattcactgaccatgtggtacaaacatactttgcaccaaaccaagctgaacaatgccgtaacccatggtgcggcaggcttgttatacaaatgggttcccggtccaaatgccccctataatccaggatttgtctattgtcatgttacagacactgtggttaatgatattttcaggggaacaggcaagacttataaagagactatccggcagatttataagactcagaagcctgcctctttccataccggaaagagagcccacatcaaaatgaatgctacctataatcccaatgctactggaaaaaatattttgggtatgatcaaaggcagtgaccctatactgtgcaatgaatatgtaatcatttccgcccatctggaccacttgggaatgattcctttccttattgaaggagcgaatgacaacaattcttcctccgccgccatgctgggagtagccgaagcactggcaaaatcaaagataaaacccaaacgcagcatcattttcatgagtgtggacggcgaggaagccggactcaccggtagcacttattatactaatcatcctcttgtaccaaaggataaagtaatagcaatcctgaatctggagcaggtgggtgtaggccagatgttaggggcgaactaccactataaataccccgaattggccaaactgtcccaaaaagccaatgctatgtatgtgcatcgacgtctgttcactaatgaaactcatttcctgactcgtcctcgtacagatggtgctgtttttatgaaagccggttatccatgcattgatttatgggcattaggaagtggctattaccatcatcctaaagataatatccgatccatcaaccccgatatccttcgagctgcaaccgaatggttatactggactactatttttatagcaaacaagtgaacaaatacaagaaatcccgacgagcgccactctgccgggatttctttattcaaccgatgccatgtctgcattgttccatatatgtgttgtgttattgttgggtcagatattccttgtacatcttctctatttcctttatgggaatatccaatgcactcacttgtctgaaaaactccggcaattcttcatgcagaaatatatctttacgcaaagtgataatccggtctttagcccctgccgatacaaaataaccgataccgcgtttattataaataatctcttgtccttgaaggtaatcatacgtacggaccactgtatttgcattcacctccaccgtggcggcgtattctctgacagacggaatacgcccttcctcggcatattgtccttgcaggatttcatcatttatccggtcggctatctgcaagtaaatggatttactttctttaaatttcatagcaaacggaatttaggtttaacaacttgcgaacgggtaaaaagctggtaactcagccaccagttaaacatagtgaatgcactgaaaaacgctactcctaacgaaagtaacttgtttaatgtcatccactggaaattagtttccagccactcagaaaaactgcgcatattgtcatctcctatccatgaaagaatgtgcaccgataaaacagaaaacagaatagaaataagcatcaaagcacccaatgtcttgaaaaaaggtttcttataccaataatttccccctagaatatacaatgaatgtgaccataacaggaaagcccatccgcacaattcacccaaccaattctggtacggcatattcatagcatagcctgatcccctatatatctgctcaccatctaccgaagccatagaaagaaggttatacaaaacagattgatggaatgtttcaggcacattaaataaaggaagtaacagataacgggtaatttccgccaatgacgccgcaacaaagacagccgcagccaatcctaccgtaacaatcaagaatcgtgctacaaatttctctatcatagttgccggaagcatcaaaaaagcgatacgtttttcttttgtaatcatattttccataatgttagcagcatagacaatgccaaaaataccgatgataaaagcaaaggttcccattatattagaacaataatgctgaaaagccatttgagaatcactatacgtcacctgtttcgacattgtgagcaccattaccaatgcaaatgcagcataaattccgatcagacgataaagatttgttttccaattttccataatctcgcgtttcattaccattgcaatacgcgaaaagctaaagaatttattcgtatccatagtgtgtttgtattacttgttaaacagaaattgcattttttctctctctgtcagcatagcgttaaataatacttccaggttcagattcgtttcctcattatacgtattcggaaaaattacgctgtttccctggacggacggctgaacatacaatgctgtatccgtcgattcattcattccttgctctacaaaataaagtttctcacagatcgtctttaccgattcattcaataatacgcgggttccatcaataataaccacatgatccagcaggctgtcaatatctctcacctggtgcgtagagatgatgactgctttttcatcggtcatgcccgaagcgattactttacgaaactgacttttagaaggaatatccaatccattgctaggttcgtccataaccaataaagaggtattggtagctaatgcaaagcacataaatactttcttcttctgccccatcgaaagttcacccaaatgaatatcttcattcatatcaaaatcatgaaggcaggcattcaaaagctcattgctaaaattcggatagaacggtgtgttcagttttaagtatcgtttcaaactgactgatggcaaagcaaactcttcaggcactagaaacatatcctgcaaagtcaagggatagcgcatggaaacatctacccctttgtaaagtacctgtccggcctgaggacgaagcagacctgtcattaaatagagcaaagtagatttacctgtaccgttctttcctaaaagaccgtaaactgaacctttatccagcgtcaacgagaagtcattaaagacactctgttttttctttccataactgaaagataagttctttatttcaatcatcattgtgtttatgtttttattagttatttagtgcactagttcattagtatactacaaatatatatagtttatttgaataaacaagaagtatagccaatgtttaactttcgttaatctctaaacaaattaagcgggcagcaactaagtactgtccgctcaacccaaatgataaatgaaaaaaagaaggactatttaattcctcctagtgccttagtagcagtttcgttctcaggatcaatttccaatattttattccaatactgttttgactggttataatcctcttttacaaaataataataccccaaatagctgttacattctaccaatactgatttagtagcatcaggcttctgttccagaatactcagtgcagcctcataatacggctttgccagtccctgagtggtttcaggatcacgcaaagaattaacacgggcacgccaaaaatttcccaaatagttatcaggaactttaacagccacctgtgcaaaaatagtatcggcttcagccaaatatgtcggttgtttatcctgataagccgaatcggtagcagcataatagttcaaacgaccatataaaaagagatcactaatatccggggagcttttcatttcatccagataattcttataagcttctatcgctttcggaaaatcacgtttcttctcgtacacatcagagatatctttataaatttccgtatgggacttatccatagacaatgctttgttaaattgtaccactgcttcttcgtattgcttgtccgcttccagtaaacgagcgaaataaacatagtccaagtatacataatccggattaccgggattagcgaagaatgtagcagcagcttccaatcctgtcttatagtcttttaattctaaataatcatacattgccagacgtttcagcacatgattttctggtgcaagttccaaacctttcttcaccatatccaaagactgtgcataatctttattcagatataacagcatggcatagcgggtatagtcctgctcagtgggagtacctactttcagataattttcgtatgcttcttttgccttaccatattgccccatagtataatatacatccgccagttccttactgatgcgattatcctccggagttttggactgtaagcgcatcaacatatccaatgacagttgagggtctacgcctttatatacctgtgcatatttaaaataagcttcactacagtcctcatccaaataaatagcctgattgtaatcgctgctagctttattcacatcattcaaattcaatgctatatcaccactcagtagataagccacagcacatttactgtttatatctttagcgcgttgcgcatattcggcagcttctgccgttttcccttgatctagataagcccggcctatctctaccaacaaaaaggcattcttcttattcttacctttcaataattcatcaaaagcctcagaagcttttgctggatcctcctttatcatcgtggcagcctgcttcacctgtagcgaccattcactacccggcgatttctgtccccacatggttacagccaggcacaagctcatcacgattaatactaatttcttcatggttcttcttttttgttcatttatattcctcttttacatctacaatccgcacaggagctgttgcaggcaccaatcctgacttcagaatgatacgttgcccccggaagtctgtcagaaatgaagtcagaccactaggcaagccacttttaggatcattaagtaaaatgtacacactgcgggttaatggatactgatttaaagccagataagcttgataaggcctgaaactattttccactgtagccgaatccgcacgactgacagccattatccgaatggcgtcattaaaagagagtcgcgtactatccgcaggattacctatccagttgacaccgataacccctaaagctgcgggggttttagccacatacgaaatcacctccggatttgttttttgtgccttcaaatcttccgatagaggcttaccaccgcagatcgagtcgagtacataatgtacagtactcgaattgggattatcaaataccagttgaagcgcacctagacgggaatcaggattcaactgtttccagtcagtaattttccccgtcagtatctccttaaattgttcaactgtaattaatgaatctgcattttgcttgtttactatcaaagctaaaccatccgttgccatctttacagatacaggaaagaatttcttgtcattgaaaaatgccatttcctgtcgagtcagttgcctcgtggttatagccaaacgtacactgtccgccaacaaaagtttcatggctttcacttcactgcaataaactggatgcacggtagcatccggcgttaatgcatggaatacctgcaattcttcttccgcaatgggacggaatgtctcgtccacagctatcgtaattgtgcccgaagtcaacgtatcgtcttcccctggtttgggtttgttgccacagcccgaaaacaacagcagcaaaacaaccgacaatgcaatatacagcttcatcatatatagatattattgtagcttaaaagttataggaacggtatagtacacgggaacattacgtccgttctgttttcccggaatccacttcggcaatgactggattacacggattgcttccttgtcacagtacgggtccaatgaacgcatcacctttacatccttcacatctcctgtagccgaaactacaaaacggacaaacactttaccctgtattccattttcttgcgcaatggtaggataacgcagattctttgctataaaagacagcaattctctatcaccacctggaaactgaggcatctgttctaccatagtatatggtttttcttctgcttcgggagctttagttatcacttctttcagttcagcaatatccttaccgttcaattcgtcattacctttcacatcggcaatggagatagctaccttagtctgagtcaattcttcctgactctttatctcttcatcatcacgcacttcctcatcttttttgataacaggagccgtaaatttgatagagcttttcagagcgggagggggagccaccggttccactttcttgaactcttcctgttttacttcaggttcttccagttgtgacaatgtagtcacttccgtcattacctctttctgcttcggagtagccagttttaccaatgtcggtatgctgaatcctacggcagcaattatcactacaatcaccatcgcccacgtgtgacgtttcggtgaattggcccgcatcttataggcaccgtatgccttattcttaccttggaataccagttcacaccattcgggtgaggtcaaatctatttttgccattttcttttcctccttttaaaagtgtgttactattccacgatatctctactcagatcacctttcgtatcataattcttgatcaagaactgatccgcatcaacgatatctgttatcacatacttacctatattgcatatttgcatttcatccagagcatcaatcagatttttatatgaagaatcatccgtcgcctttatgatgacagtcggcgtatcctttccgctttttatttcagaaagtttcttcgtgtaatcttcctctgatatctttaaatcagctttctgttttttcagttcgtttacctcacgaactgccaccgagttctttttaagaagaatggaacgcagaccatccgcattatacgaagtttccttcagcgaagtatagtctttatagttaggttctccttcatagtaatacaatttatctcctcctgccagcagcaaagttattgcctgtgaagccttcaccttactctgttgttcttcagtgatattcttgtcattgctcggcatacttatttccatcgtctgaggtttgctcaacgtggtacatagcataaaaaaagtaatcagcaacatattcatatccaccataggtgtaaaatctacgcggacagtcattttcttttgcttggatccttttccttttttgccgctttcttgtacttcagcactcataattattcagttttatttatcagaagtagtcttcagagaagtaatcagattgtaccgattctctctgagatcctgaagtgagctcattacatttttaatcacagcgtagggagttgacgcatcagctttgatagcaatgcgtaaatcaggattcacctgacgagcattacgtacccacgatttaaactgattatctgtgctgtcacagggaataccttcatttttcaacagtttatcctgctgttcagtaggtaaatccaaaaatttctgcatgcttctcatcggaacaccaaacgtagaagctgtcacaaatttcttttcctgctcaggagtaaagtcaactccgtactcctcacccatcttctccaatacagccttcatatcgggctgtttgtcgaggctcataaatattttcccttgcggatccaccaaaatctgaaggatattcgtttccggaatcttgatttctgaaacggaggccggagtaaacacctgcaccggttccttcttcacaaatgttgaagtcaacataaagaaggtaagcaacaatacagtaacgtcactcatagctgtcatatctatgaacgtacttttctttttaatctttgctctacccatagtagttcattttaaaggggtggcacgattatttatgagaagccgcaaaggtctgtacaatagagaaacctacttcatcgaggctgtaagtcaatttatcaatcttattagtgtagtagttataagcaataaccgccaatgcacctgtcaagataccaaatgctgtattgatcaacgcttcggaaataccttgcgataatgccattgagtctgtaccaccaccagcagacaaagctgcaaatgaacgaatcataccgattaccgtaccaagcaatcccatcagggtacccagtgtagtaatagtaccgataattggtaaattctgctccatcataggaagttccagtgcagtagcttcttccaattctttttgaatggccaagactttctggtctttggatagagtctcatcgttttcaacttcagcatactttttcaaagtagaggtaacaacattagcgacagagccaccttgtttatcgcaaagttcctgtgctttcttcatatctccggtagccaaagccgatttgatattagcgacaaatttcaccagcgagcctttaccaaaagccgaacggatagcaaaataacgttcaatactcaatgctatgacagtgagcaacaaggtttgaataataggaaccacaataccccctttataaatagttcccaggaaattacccggcaacggatgattattagggtcattgttcataaaattagctggatttcccagtaaaaagttatatatacaaattgcaatgataaagcagcatataattacccaacctgcatttttaatacctacaatcttattagtagttttattttgaatagcttccatgatatgttttaattaatcgttatagtttaaaaaaagataattcgagaccaaccccgacactctgcagggcgtcggaggaggttaaacaactaaatttataacgattaattaaatcaagatgcgtctcagcgtgaacacaaaataatgacatgccggagacacacaatgaatgggattagacggaaagattttggcgcggtcaatagccaataattcctcccgtagtgaaaaacgtcctatgagaatttttaagaagttctgttgaagttcctctgctctacggatacgaagatcgtcaggcactaatttagttaatacctgctgttgtcctgtcagcaaagaagtagtgaaagacatggtttccaatgtaccatggtcagacggcgtattctcttgagattccgtagtagtagcatacctgtcaatggcggaagatacaacatccgcatcgactccctgatagttcagcattacaagcagggcgattaatcctattttgacaataagcttcattgactactgatttcgcaagattctcggtttatattattgaaacaattctattgttttatttgttcacacagacctaaaaattactcaagtgtttttatactgaagttttattttataagttttctctcatgaattattcaaaattcacgtagcaaatatagtaaatatattcgataatcataaaaagattacgaaataaatttccttttttaactccttttctaattccaaattataatgctcattctttagttaaatatgctcaatgatagaatcattgcaaagcctattaatagggtatttatgctccaaaatttcacctgttttattatcataagtatatattatatatacacgtataatcctctttcgatacagaagaagaagatgtagacaaactgatagcttgcataaaggcgctataatcatcttccgtttctctgttaggc

SEQ ID NO: 14434 - DNA, 85839 bp, Unknown
  gut microbiota DNA sequence
cttcgtaaaaaatatattaaaatatattatcctatttaaatcaaaatacatatatttgcggtcattattaaataatgcaattataagaatgcaagcaaaaagaaatcctaatgcagttgaatagtaataaaaccactatggaaaacgacacaatgatacaagaaattgcatttacaatttaaaaaagagagttcaatacataatgcctgaaatatggcaatttataaacccctaattaaagccaagtttatatgagcagattttcttcattattatgtagcttgctattctgcatgattacatatgcacaggaaattacagtaactggtaaagtcaccgcaggaggcgaagaaatgcctggtgtcacagtagctgtaaaaggacaaactcgcggtaccatcacttctaccgatggcagctaccagattcaggttaacggcaatgaaagcctgatcttctcttttgtaggttacgaaacagtaactataccgataaacaaacgcaaagttattaacgtagaattgaaggaaacaacccaaatggtagatgaagtagttataaccgttccttacggtactgccaaaaaatccacatttacagggtctgcaagctatattgccgccggcactattgaaaaagcacaggtcagtagtgtgtcaaaagcattgcaaggaactgtagctggtttacagtctttttcctccagcggtcaacccggatcagacgcaactatcctgattcgtggagttggttctgtaaacgcttcaaccaatcccctctatgtggtcgatggtgttccttacgatggtgctctttcctccatagcatcttcagatattgcgtcaatcactgtattaaaagatgcagcttccgctgcattgtatggctcacgtgcagcaaacggcgtaattatgatcaccaccaaacaaggaaataaagatagcgcacccaccgttgaattatctgctaaatatggtttttcaagccgtgcacgcgcagactacgaccagttgaatacaaaccaatattatgaattatattgggaagccatgcgtaactatcgtatggacaacggttactctgccgaagaagctgcagcatgggcatcaagcaatgttacaggcaatctaggcatcaacccttatggcagtgcttaccctgagccaatcggccatgacggaaaactggtagcaggtgccaaaccattatggaacgacagctgggacgacgccctttcacaagatgcacactatacagatttaaatgtacacgtaagtggtggtagcaaaacctccaaatattttgtttcagcaggttacatggatgatcaaggtgcttatatctgctctggtttcaaacgctatactctccgcgccaacgtgacttcagatatccgcaaatggttacagatcggattgaatgtatcaggaactcattctgttcaagactatcccaagcaagatgactcaacaatctccaatgtggtcatgtttgcccgttcattgccatcattctatccagtgtatcaacgtgacttggcaactggagcatatttattggacgaaaatggtaaccgtatgttcgattatggtgagtatcgtcctaactcgtatgcaaaatataatctgctggcttccatgccacacgataaaagcgagataaaacgcgatgctgcttctttacgtggctttatccaaataactcctatcgaaggactttcttacaaaatgtctttgaatattgactataataacaaaacaaatcatgactacaccaatcctacttacggtacaggttctatcagtggtggcagcgtaagcaaatacaactaccgcactacaggcatgacttttaataatgtcattaattatcaacacacgttcaatgatgtacatgatatccgtgtgatggccggtcaggagtactatgaatataacacttccaatttcggcggaagccgcagcaaagtcatcatggatggattctatgagcccgacgcagcttcctctttaggtgattttggcggaaacagcgaccaatacaagctgttaagtttctttggaagtgctgaatactcgtacgatcaaaaatacttcttatcggcttctgtccgttctgacggttcttcccgtttccatccggatcatcgttggggtactttctggtcaataggcgcatcttggaaaattatgcaggaagagtttatgaaggacacatcagactggctatctaatttatcattgcgtgccagctacggagcgcaaggtaatgaccaggtaggttattatgcgtatcaggcgctctattccatacgtaataacctcggtgaatccggtttgcatgcttatcgtctggcaactcctaatttatcatgggaaaccaatctaaatactaatatcggcttggattttggtttctggaacaatcgcctaagtggtacaatcgaatactttgaacgtcgttccaaagatttattattctctaaagacttagttccatcttcaggtttctcaagtatggacgaaaatattggtgccatcaaaaattatggatgggaattccaaatctcaggatatcctatcatgactaaagattggaaatggaaactttcttttaatgctactacctataaaaacaaaataacctcattacctgccgaagaaatgtggagtggcaacaagaaatgggtaaaaggaggatcgttatatgacttctatttagtagaatgggctggtgtcaatcctgaaaatggtaatcccatgtggtatcgttacaataccaacggagaaaaagtaaccacagaagactattcatcaaccacaccggacgacaaagtaaaatgtggcaattcactaccagactggactggcggtcttcaatcagatctttcattcaaagattttacattatcattcttattctcttattccattggtggtaaaatctataatggggataaagtttcattgatgagccaaggacctacaggtaccagttggagcgtagatatgttagaccgttggactcctgaaaatccctataccgatgtaccacgtctgactacttctcccaaaagctcatggacaaactcttcaaatcggttcttagttgaccgttcatacttacgtctgaagaatattacattctcttacaatctgccgaagtcattgctgaacacattgacactgaaagatgcaagcatattttttcaagcagaaaatatgctgacattagccaaacaacaaggtctagacccagagcaaactttcggaggctctacttactatcgttatccggcaatgaaaactatttcattcggtatcaatgtgaaactttaatacagaaagaagaatatgaaaactatttttaaatatatattttcagtcgcactgggaagtataatgctcacttcctgcgatttggatacaattcctacaacttatgtagatgccggttctgttttcggtaaaacaggagatgccgaaaaagtacttaatggtggttggaactacctgatggaaactttcaattcttacgccaaccctggctatggagcaatgttacgtgcaaatgatgcaatgggttctgacgtagtactaaacaccaaatatggttttagagcacacaatgaatttaccgctatttatggaaaagggggcacaaataccctaagctggcttttagcataccgtgttattaatgactgcaatggtgtattagataatattgatgctgccgaaggcacacaaattgacagaaatcgaatcaagggacaagcgttagccttacgtggttttctatatttacatctagcttcttgttattcttttgccattgataaagatccagatgctgtatgtgcacctatctatacacaatcaacagatgaaacaattgcagctgaaggaaaacctgcatcaagtgtcagtgaagtatatgcgcaatctatcaatgatttagaagaagcattagaacttattcccgaaacttatgtacgtaacgccaaacacaaaattgataatgaagttgtcctaggtattctctcacgtgcctgtctttatgctcgtcaatgggaaaaagctaaaacttactcagacaaattgttagctaaaaacaattatctaatgactgaaagtgaatataaagctggattcaattctgtagacaataaagaatggatttgggggcatgctcaaaccaacgatcaaagcaatgccagttatcagtttcattatttagatactacaactaaaggatcatactattatagcttcaatgtagacccttacttccgtgatttgttcgaagatggtgattatcgtaaagatatgctgttctgggctacagatccaggagctgacgttgaatcagcagcctatgtatggatgcgtaactctaaattcagattccgcgatatcgaaaaccaacttggtgatatcgtattgatgcgcgttgctgaaatttatttgataaatgcagaggcaaaagcacatctgaatgacccagatgcaattaacaaattaaatgatttaaaaacagccagaggagcaaaaactattaatacaaatctttcacaacaggatctattggaaacaatttggttagaacgccgcaaagaattatggggtgaaggattcagtttgatagacattatccgtaaccaacaggctgtagtccgcaaagcatatcccgaaggtcccattgactatatttacactgatgaaaacggacaaactcacacacttaagaaaaaaactcaaggacatcgcttcttcaattttcccgataaaagtgcgttctgtccaaatagtaaatattatttatacagaattacagatgcagaagaactagcgaataagaacctttacaaagatcatcctaagctctcaatttatacagaataacagcaaactctaacaaagtgaaaaaccgtagcaaatgaattgttacggtttttttattttttcccggacagattaaggaaagacatacctaaacaatcctatagaagaaattcctaatcacgtttttaatatgaccgggagtttcctgttttatttctttttcaaatcctcaggagaaaccaatttataaagcttgtcactaggacgtaccttatcggggactttaaaggatacatgttgaccttttcttaccacatccaccggtttcaaatccacacgcgcctcatccaacgtcagaaataccgctcctgtagtaggtcctgtaatcagaagtttatcccctactttcatctcagcagcttccaccagaaactctgcaacaccaatattagaaaagtacttgattcccttacccacatacactttacgctcagtagcctccgaaccatagttcttactccattcacccaaacgctgtcctaaataatacccattccaaaatccccgattgaatacagtcttcagccgctcatcccaagcctgcttcttctcctcggtaaaagtaccctccagataagaacaaatagcttctttgtaacattccaccacagtgcgtacatactcaggtccacgggcacgcccttcgatcttgaagacacgcacaccagcctctatcatttcatccataaaatgaatagttttcaaatctttaggagacatgatgtatttattgtccacctccagctcaatatcactctctttatccttcacatcgtatgcacggcgacatatctgcatacaagccccccggttagcagaagcattcatctcatgcaaactgagataacacttgcccgacactgccatacagagcgccccgtgacagaacatctcaatgcggaccaattctccattcggacctttaatttgttccttctggatagtatcataaatcactcgcacctgctttaaattcaattcacgtgccaataccactacatcagcaaagcgagcataaaatttcaatgctccggcattactgatatttaattgggtggaaaggtgtacttcctgccccacctcgcaacaataagccattaccgccacatccgcagcaatcacggcactgatgcctgcctccttagccgcatcgacaatggcacgcatcaaagcaatatcttcatcataaataatggtattgattgtaaggtagctcttgataccatgtttatcacagatctgtgctatctcacgtaaatcattgacagtaaatgtactggcagaacgtgcacgcatattcagactctcaattccgaagtaaatagaatccgcacctgcctgtatagctgccgctagcgactcacgtgaacctacaggagccattatttcaaagtcttttatagaagctttcattattcttttgattaatatgtgtgcaaaggtaggcttttttccgtatttttgcagcctgatttcaccacagattacacagattcacacagattataaattaatactcaaatgaatctgatttttctgtaacccaaagataaacatacaacaatgaagattagaaatatagacctggacaaatacccaattttcctagccccgatggaagatgtaacggaccccgcttttcgcctgatgtgcaagaagttcggtgctgatatggtatataccgaatttgtatcagcagatgcactgatacgctcggtaggtaaaactatgcagaagctgaatatcaacgatgaggaacgccctgtagccgtccagatttatggcagagacacggaaacaatggtagaagcggcgaaaatagtggaagaggcgcatccggacatcctggatattaattttggctgtcctgtaaaacgcgttgccggtaaaggagccggtgcaggtatgctgcaaaatatcccgctgatgttggagattacccgtgctgttgtggatgctgtaaaaattcccgttactgtaaaaacacgtctaggttgggacaatgagcataaaattatagtagatttggcagaacaattacaagattgcggcattgaagcactgaccattcatggacgtacccgtgcacaaatgtacactggtgaagcggattggagtttaataggtgaagtaaaaaagaatccccgtatgcatatacctatcattggaaacggagatataactacgccacaacgtgccaaagagtgttttgacctgtatggagtggacgctattatgattggccgagccagttttggacgcccgtggatattcaaggaaataaaacattatatagaaaccggtaaggaactccctgccctttcttttgagtggcggctgaatgtactccgccaggaagtgttggacagtgtgaatctgcttgacgagcgccgtgggattcttcatgtacgccgccatctggctgcttctcctttatttaaaggcattcccaactttaaagagacacgtatcgccatgctccgtgccgaaacagtgaaagagcttttcagtattttggattatatcaggggaaattacggaatgaattgttaatgctacaatatattaatgtgccaattggctgtgctgtattccgcatggcaattggcacattaacatattggcacattgtagcattaacacattatttattctattttacgcaaacctcttttaggagagaaatcaatgtttttaggattgcccttataagccacctcaccactactggatgctttcgcagtcagcgaaccggtcacataacattccacatcaccagaggaactggcactagcagttacatttaccgctttcataccttttgcctttacatccccactactactggctctataagaagcgttctcacaaatacctaccaaaattacatctccggaagagctggcatcagcagatacattagcagcgttcagattcttgacagatacatcaccagaactactggcatcagcagagaaatttgtacaagataccttttccagaatcacatcacccgaactattagcggtagccgcaaaatcatcacaagaaataatgcttcctgttacatcaccgctactgctagccttaacagtaactttcccactcgttttcagtccattctttataataatgtcaccagagctggaagctttcaagctgttcacagccggagcagaaactcttacttcctttttatgttttccgtttattgaaaaattgtttcttggcgatttaaaaccaaccttaagtactccaccctctacacggacatcaatatagtccaccaaattgtccggagcatatatttccacatcctgtccaccggaactttgagtatagattacatccaccgaagaactggtagagatagcattaaaactacccacattcacttttttggtaacatagttcttgctaggagttattctctctgcacatgctgttaccgacactaacataagagttaccgtcattaaagttgatactaattttctcatattacttttgttttatttattagacgttatttctatgccaaacgttgcaacgtttgaccattatttttaaagcaagattcatgccagcaacatttatcactgataatcaacaaggtataaacaaagcagggtgtccgaaaatggacaccctgtacgcttttatatgctttttaaaactatttcagtacaagttggaagactacagaagcaaaccaacgcttatacatataagtagccgtaatataaatacataccgccgaaatccatccggcaataacatcaatcaaataatgcgcctgaatatagaccgtagcacaacatagaagtacatagaacggtgccaagaaataacatagtttcttattaacacgataggccataatcatcacaatggtagatataccgacatgtgagctaggaaaagcagcagtaggccgttcccccacttcttgtgaggcttccaccaaattaaagaagaaaccatgatcaaaaccgggaccaggcagcagaatatcattattattaaaataatcaccgatagcagggaaatgctgcgccatcacattatccattccgatagcagggaaataaaattgcggaccggcaaccggaaccaatatataaataagataatagataaaaaacgaagtgaccaacacaaaagaaaccttttcaaaccactcaaaacgaaacaagaaataataaatagtcacaatcccaatcattggataataagcaaaataccccatattaaatggttcactgaaccacatggaaggaaaatgttcactaaattctaccgaaggctggcaacggaacaaaaactgctccgccgaagcgaagaaattatccagattgggaaaaagacgattaaattcaaaggtatcgggataccaatacgctaaaaatgccatctgcacagccattcgtataaatgccgtaagtttacacggatacttacgatacaaatatattaatgcaaacgtaatggccacaatgcctgcacgctccgaaagcataattacagggtgatccatacgaggaaataatattaaaaccattatggtcgtgagggcattatatatcagactaatgctctcgacggcaaacaatcctttcacactgtctacccgtttgaataaatttaaagccatccttctttcttataccatgcaatgatttcctttactcccttgtctaaagggtactcaggacgatatcccagttcttccaccaagggtgaaatatcgcattgccaattacgttgtttcattattttatatttgtcagcattcagcgtacttacctttcccaggcaacgcgctgaaaattcagcgagcaaagatacaacttttaaaataaataatgggcatttaatgtgtataacccacggattaccaagttctttttgtatcaaatcagaaaaagtacggctgaaatagacatttccgtcactaacaaaataggcgcgctgccgcactccatgttctattgccaaaaaaacagcttgtaccaaatctctcacataaataaaggtaagatcctgccttttaaaaccaggagcaaagtctatatgctgcttgatagacttcaccatcagaaaataatcgcgttcgcgaggtccataaactccagtaggacggaaaatcactgtcggaaaatcattcaatgattgcaggtaatgttccgactttagcttactgaccccatatgccgtattgggcattgccgtatcacgttcactaataggtgcataattatcttcatgaataggaccgaaaatactaagtgaactgatataaacaaattgccggggaaccatatccaaggtcctcaaagcttctacaaaattacgggtataaacataattacctttgtcgaattcgtctttatgacggcatttagtaacaccggcacaatgaatgatataatcccatccctgatgcaattgtttatgaacagccaattgctccgtcaaccttccgggatgagcaaaatccaattcggcaaattgaatgcgaggatctttcaaataggcacgactactgcttttacgtacaccagcccatacctgcatatctctctccaatcctccttccaccaggaaactgccaataaatccgcttgctccggttaccaatactttctttaatcggcaagtattcttctgtgcaaattcttcgttattcattcttcgtattttatttcaccggttccacatgaatacccacatgagtatcctctccaaatttttcttttaatctatgttcaatacctgttgctgtttcgtgcgctttatgcagagaaatgttcccatccatgcgtatatgaatctctatagcataattgttcccaatgcgtcgcgtgcgtaaatgatgcggctcgctcactccatcaaaagataacacaatcccctctatctcacgttccacgctatccggcaaagacttttccagcaattcatccaagcaaggaatcagcaacttaatggaaacccgcataataaagaaactgactgtcacagcggcaataggatcaagtaccgcccaatgaggaccaagtaaaatcgctccgccaataccgacagtcgtaccaatggatgataatgcatcactcctatgatgccatgcattcgccacaacagcctgtgaatcgcatcttttccccactctgactgtatattgataaagtatttccttcaacaaaatagaaataatggcagcaaccaatgccaacattcccggttgacgaagctccccacctcgtagaaaaaccaatatttctgttgctccattccataatattccaaatcctatccccaataatgccataccaatgaaagcagtagccaatgtttcatatttcccatgaccataatcatggctcttgtccactggtttattggatatacgtacaaaaagaatcactactacgtccgtaatgaagtcagatagagaatgaactgcatctgccaacatagcggtactatgccctgcgattccggcaagaaatttaaaaataaccagcaagaaattaacaaaactccccactagtgtaactttataaatttctttttccctgattttcttatcaagttcagtcataacagttgttttagaacggacaaagatagcacgtttcatttagattcaaccaaatttaatgtatctattgaaccgctattccaattattttgtttactttgtagcacataatacattaatatatccccttatggctaaaaagaaagaaaaaaaagcagggaaacgtatgaaaaaaagcgaaatgtctgaacgactgataagcttattccacaccaaaccaaacgaaacattcagtctgaaacaattatcaagcagtctgaacctcactacacatccgcttaaaatgctttgtgccgacatcattactgaaatgattgaggatgattttctgcaagaagtagaaaaaggacactacaaactgaacgaccacggcctgattatgactggcgtctttcagcgtaaaagcaacggcaagaactccttcatccccgatgatggtggagaaactattttcatagccgaacgtaattcggcacatgccatgaataatgacaaagtaaaaatagccctctttgccaaacgtaagaatcggaatccggaaggtgaagtgatagaaattctggaacgtgccaatgatacttttgtcggtacactgaaagtagagaaattctacgccttcctgctgaccgagaaccgcaccctggcaaatgatatttttatcccgaaagataagctgaaaggtggaaagaatggggacaaagcggttgtgaaaattgtagaatggcccgaagaggcaaaaaatccgataggacaagtcattgatatcttgggaaaagcaggagaaaacacaactgagatgcatgccattttggccgaattcggtttaccttacgtatatcctaagaatgtagaaaccgctgccgaaaagattccggcagagatttccgaagcggactatgcagaacgtgaagatttccgcaatgtaacaactttcaccattgaccccaaagatgcaaaggactttgatgacgcgctctccatccgtctcatcaaaccgggactatgggaagtaggcgtgcacattgccgatgttactcattacgtaaaagaaggaagcgttatcgacaaagaagctgaaaagcgcgctacttccgtttatctggtagaccgtaccatccccatgttgcccgaacggctgtgtaacttcatctgttccctccgccccgacgaagagaaactggcattctccgtcattttcaatatgaatgaaaagggagaggtgaaagactcgcgcatcgtgcacaccattataaagagcgaccgccgtttcacctatgaggaggcgcaaaaagtgattgaaacgggtgaaggcgactacaaagaagaaattctggagctgaacaaactggcacaaatcctgcgtaaacaaagattggctgccggtgctattgactttgaccgcatagaagtgaaatttgagatagacgaaaccggcaaaccactcagtgtctacttcaaagaatccaaagaagccaataagttgatagaagaatttatgttgttggccaaccgcacggttgccgaaagaatcggtaaagtacctaaaaacaagaaagccaaagtattcccttatcgtatccacgaccttccggaccccgataaactggagaacttgaattggtttatcaatcgcttcggatataagatacgtacatcgggtagcaaaacagagatatccaaatccatcaatcgtttactggacgacataaagaataagaaagaacaaaatctggtggaaaccgtatccttgcgtgccatgcaaaaggcccgttattccactcataatattggccactatggtctggcatttgactattatactcactttacctcacctatccgccgttttccggatatgatggttcatcgtctgctcacccgctatctggcaggaggacgtacggtacaggaaacgaaatacgaagagttgtgcgaccatagttctgaaatggaacaaatcgccgccaatgcagaacgtgcttctgtaaaatacaaacaagtagagtttatgggtgaacgtttgggcatggagttcgatggagtcatttccggagttaccgaatggggactttatgtggaattgaacgaaaacaagtgcgaaggtatggttcccatgcgtgaccttggtgatgattattatgatttcgatgaaaagaactattgtctgacggggcgccggcatcacaaaaaattcagtttgggagatccggttaccattaaagtggcccgcgccaatctggagaaaaagcaacttgatttcgctttgatcgagaaataaagattaacatcctgttgtaggggcagactggatctttccctacaacaagacaatagtttcatttacctcactcttctattcaactgattattcgctttatccggcttggatttaccgatccgtttgccaccggacttctttttagtttcctgtttcaccttaaaagcaaatggatttttcttatttaccataaatattccctttttctgcaaaaataaaggattaaagtcaatattcattctatttattggcaataatatagaatttacttacttttgtccttccaaaacattcaattcatgactacattcaattacacgaacatattaacgcaggcagtagatgaattatctgaaagccagtcctataaaggattattccatcaacacaaagatggagatcctttaccatctgccaaatccctatacaagatagtagaattggcacgcgccattatcttccctggttactttggtaattccaccgttaacagccataccatcaactaccatatcggtgtaaatgtagaaaccctgttcggcctgctgactgaacaaattctggcaggactttgcttcggacaagaaaacagtaaaaatgcaaccgatgacaatgaaccgtgcagagaaacagcctctttgctggcagctcgtttcatcaataaattgcccgaactccgccgcattctggctaccgatgtagaagccgcatattatggtgatcccgccgccacatgctttggtgaaatcatcagttgctatccagctatccgagctatcagcaattaccgcatcgcacatgagctgttaatactgggtgtacctttaatcccacgcttcattacagaaatggcacattcggaaaccggtatcgatattcatccgggggcacaaataggacatcatttcactattgaccacggtacaggtgtagtaatcggagcaaccagcatcatcggaaataatgtgaagctctatcaaggggtaacattaggagctaaaagctttccgctagacaataatggaaatcccattaaaggcattccacgtcatcctattttggaagacgatgtcattgtatattccaatgcaacaatcttagggcgtgttactattggcaagggggctaccgtaggaggtaatatttgggtaacagaaaatgtacctgccggatcacgtatcgtacaacgaaaaaacaaagacgaataaagaccttttgtcatcatagattagtttggattacattcataatttatcaagttttaaatatgtgtaaatccatgtaatctatgatcagaaacttctttatgcacccacggaagtctcagcacaaagcagcatctctgtgtataatcggcatcaatcacaagagaacctccaaatttctcagccagcaaccggcagataggaagccctaatcctgtccctcgcataaaatcatctaattgggtaaaacgttcaaatacaaaatcatgcttgtctttaagaattcctttccctgtatcaataataagtaataagtctgccgccccatgcaaaatagtaatattttaaattatccagcctcaaacatactttcttcacctcatccgtctgtttcaatatattctcttcatcattcttataataaaaataatccagcttaatacaataagaaataatttgcatatgcttatcgcccgattcctcacttctttgcagaagagtatcacacatacttaaaacaagaggggaatccataatttgaagaaaaacataaattgacaaataaaaacagaaaaaggagcaccgacactctgatactcctttctcctaaactaaagcaaaccaacggttactttgaagcatatgcgcacaacatccacaccattttttcctgttccttcaaatagtcactcatcaccgctacagtagcctcatcaccggcttgtgaagcgacagccaaaagtttacgctcttccacgatgaaatgactgtaagtttccaaaatgttgttcaatgcttcgtcaccgtttgtaacaccctctacctcttttatattcgatactttcaaataatcgctatacttgttcttcgggacgcctcccagcatcaggatacgttctgccagttcatccactttctcggctgcattgttatacaaatcctcaaatttgctgtgcagtacaaagaaaccatgccctttaatattccagtggaacccacgaagattagcataaaatacttggtagtctgccaataattgttgcaatgattctactacctttgcagctgccgctgaatctaacttgatataatctaatgttctcataatgtttttatttttaaattgattacttttatttttttctctgatgcaaagataagggggaaagtaatgcgtgtcaaactgataatttctatctttgtatagataaaatctattaagctgaaaattatgaacctgcaacaactggaatatatccttgccgtggatgagttaaggcactttgccaaagctgccgaatactgtaatgtaacacaacccaccttgagtgccatgatacaaaagctggaagatgagttaaacaccaaattattcgaccgtaccacccaacccgtccaacctacactgacaggacggaaagtgatagaacaagccagaataaccttgcgccaggccaatctgattaaagatatagtaaaggaagaagcatgttcgttaggaggtatattccgtataggagtcctgcctacaatcgcaccctacctgctaccccgtttctttcccgaactaatggaagaatacccttccttggacatcagagttacagagatgaaaacacaagaatgcctggaggcactgaaagcgggtgaactggaagctgtccttattgccggagcagcagaaggggcccatttccactccatacctctttattatgaatcttttttaggatatgtttcaagacataacgctctctttaaaaaagaaatgatccgttccagcgaagtcagcggtgaacagttgtggctgttggacgaaggacattgtttccgcgaccaactgatgcgtttctgccaattggaatccgcccagtcttgtcaaattgcataccggctgggaagcatggaaactttcatgcgcatggtagaaagcggaaaaggtatcacatttatccccgaactagccgtattgcaactcaatgacgaacaaaaacgactggtgcgtccgtttgccatgccacgtcccacacggagaatctacatagtgacacgtacagacttcattcgtcataccctgctcaatatgctgatagaaaaaatcaaagcctgcatacctaaagagatgctgacattgcaaaatggtcaaaaagtagtatgacagcaaactttttaataaaacagtaacgtcctatacaccttcctgtaacaggtaaatacgatatttgcagtacaataaaaaaggaggtatatatgaaacttaaaagcaatgaatatcagatagaatgtacacccgacggggaatattacgcctttttaacagactaccaccaatgctgcacttacggtgaaactgccgaagaagcattggaaaccctgtcagatatcgccgatgagtttttcagcgaagtaaacgaagtctatctggcagaagaactcgtataaaagtcactcaacctattaatcatagaattctcttacagaaaccatacctgtgcgatacagatatggtttcatttttattttaagcatgccccatacggtatagactgtatcccagataaaccaaatacaaacaagagaccagtatcattaaagcacaaaccacatatcctttacgtttctcattcgtcaattccattttcattctgatttctatttaagtttcttgattcagcaaaaatggcaaattcctgtgtagaatttatttctataggataacaattatattgccggatacattttttcaatttattccaaagatacaccaaatcccgttttcaaagactttttataattgaagataaataaagaaccccggcaaagagagcggatgtcccgatttcatcctcttttttgcttcatcagacagattaattctctaaataattgattagcaaacagaaaatcattaaatttgtcccatcaattgaaattacgtaattatcatttaagatgaaggaagaattcgagctaatcgccaagactttccagggactggaagaagtactggcaaaagaactcaccgagctgggagccagcaatatagaaataggaagacgcatggtagcctttatgggcgataaagaaatgatgtataaggcaaacttctgcctgcgtactgccatccgcatcctgaaacccattaaacattttgaggcgaagaatgccgacgaagtttacgaagctatcaaaaccattgcatgggaaaacttcttggataaagataaaagttttgccgtagacgctgtggttttctcgaacgaattccgtcactccaagttcgtggcctataaagtaaaagatgccattgtggactatttccgtgaaaagacaggagagcgcccctcggtacgcatcaaccatcccgatgtggcactgaacatccatatagccgaagataaatgtactctgtcactagatagctcgggtgagtcactccaccgccggggttatcgccaggaagccgtagaagctcctttgaatgaggtactggcagccggtatgatcctgatgaccggatggaaaggcgaatgtgatttgatagacccgatgtgcggttcaggaacaatccctatcgaagccgccctgatagcacgtaacatcgctcccggcgtattccgcaaggagttcgcttttgaaaagtggaacgattttgatcaggaactatttgaccgcatctacaatgacgactcacaggaacgtgagttcacacataaaatttttggatatgacaacaatccgaaagcaaatgaaatcgccactcacaatgtgaaagcagccggactgagcaaggaaattatcttaaaaatccaaccgttccagcaatttgagcaacccaaagaaaaaagcatcatcatcaccaaccctccttatggagaacgtatctcaaccaatgacttgctgggcctgtatcaaatgataggcgaacgtctgaaacactctttcaccggcaatgatgcatgggtactaagttaccgtgaagaatgttttgaccagattggtttaaagccttctataaaaattcccctgttcaacggttcgttggaatgcgaattccgcaaataccaattattcgacggcaaattcaaagaattccgtagtgaaaatgccgatcgggagttcaagccccgccgagaagaaatccgtccgcgccgtaacacggaaaaagtagaatatggagaacgcagagaacatcgtagttttgacaacagacgtgaaggacacggagagtacaaaggaggagagcgcagagaaagacgctcttttgatgacaaacgtgagagacgtggcgatttcaaaagaggagaacaccgcaactttggtgacaaacgtgaaggccgcgacaatttcaaaagcagcccccgtaaatttgacgacaataaggaaaagacagaagaataaacagttatgagaaaattaatcaatctgatcgccttattaatcatggcttcatctgtaacatgggcacaagacaagaaaagtttcacactggaagacttgatgccgggaggaaacaattactataacctgcttccacagaatctgtatggtttgcaatggtggggggatgtatgcatcaacgccgacatagaagaggtaaaaaccatccatccggcaaatggaaaggaaaacgtacttatcactttgcaggaagtgaatgaactgttggcaaacaagaaattagggaaaatcaaccacttcagaaatgtatctttcccatacgctgaaaagatgatgttggtaaataccacatccaataaagtgctgatcgatttaactaaaaaggaaataatatggagtcagcctctctctcctaaagccgccaaccaggactggaacaaggaaagccgttcattggcttatacccttgacaacaatctgtttgtaacgactgccgacgggaaaacacaacaagtcaccgatgaaccgaaaggcatcgtatgcggacaaagcgtacaccgtcaggaatttggtatctcaaaaggtactttctggagtccgaaaggaaatctgcttgctttctaccgtatggacgagagcatggtaaccgattatccacaagtaaatacctccacccgcatagcgacactggagccggacaagtacccgatggcaggaatgaccagccacaaagtgactgtcggcatctacaatccggctacccaaaaaacagtttatctgaaagccggagaccccaccgaccgttatttcaccaatatcagctggagtcctgacgaaaaaagcatttatgtcattgaactgaaccgtgaccagaaccatgccctgctatgctgctatgatgcggaaacaggagagccactgaaaaataaccccctttacgaagaggagcatactaaatatgtagaacctcaacatcccattgtctttctgccttgggaccacacgaagtttatctatcagagccagcgcgacggctacaaccatctttacctgatggacaccaagacttccatatatccggaatcacatggagccgcggccggaggttcttaccgggaaagctacaaaaccagacagcttacccaaggcaactgggtagtacaaaacatcctcggattcaatgaaaagaccaaggaagtcatcatcatgagcacagaggtttcccctttgcagagcaacgcatacgctgtgaatgtaaagacaggcaaacgccgcctcatcggcaataaagatggtatgcatcatgtacaactatccggtagcggcaactatgtaatagacaattatacttctttcaccattccccggaatatcgagatcgttcccacttccggaaaggaaaagactgtcagcctgttgacagctaccaatccgatggaagcatacaatatgcccgaaatcaccgtcggtaccctcaaggctgccgacggcaagaccgacttatactaccgcctgataaaaccggtaaattttgacccaaacaaaaaatacccggccgtagtctacgtgtatggcggtccacatgcccagctaatccacaacaaccgcaactatgacgcccgcggatgggatatttacatggcacaactgggttacgtcatgctgaccgttgacaaccggggcagtgacaaccggggactggaatttgagaactgtacgttccgccaattaggaaccgaagagatgaaagaccaagtgaaaggagtggatttcttaaaatcgttgggttatgtggacaataaccgcattggcgtacacggttggagtttcggtggtttcatgaccaccaacttgatgctgacttaccccgagttattcaaagtaggagtagccggcggccctgtcatcgactgggcttactacgaagtaatgtacggcgaacgctacatggatactccacaaaccaaccccgaaggctacaagaacgccaacctgaagctgagagccggaaatctgaaaggacgcctggaagtgatcattggtgccaatgaccccacttgtgtccctcagcacagcatcagtttcctccgtgcctgcattgatgccgggacccaacccgatttctttatgtatccgggcgacggccataatatgttcggacgcgatcgtgtccacttgtatgaacgcattacacgctattttgaagaccatttaaaataaacaaaagataagattatgaaactgttgctattaggctcaggcggacgtgaacacgccctggcatggaagattgctcaaagtcccaaaattgagaaactatatatcgctccgggaaatgccggcacaagtaatgtaggcgagaatgtagcgattaaagcagatgactttacagcaatcagggagtttgtagtaaagaataatatagatatggtagtggtaggtcccgaagacccgttagtcaaaggaatctatgattatttcaaaaaagatgaagcgctgaaaaacattcctgttatcgggccttcaaaagcaggtgcggtactggaaggcagcaaggagttcgccaaaggcttcatgcaacgccataacatcccgacagccggttacaaaagtatcactgccgcaaatctggaagaaggattagcctttctggaaacattggaagctccatacgtactgaaagccgacggtctttgcgccggaaaaggcgtactgattcttcccaccttggaagaagccaaggaagaattgaaaaaaatgctgagcggaatgttcggtaacgcttccgccaccgtagtgattgaagaattcctgagcggtatagaatgttccgtattcgttctgaccgatggaaaaaactacaagattctgcccgaagcaaaagactacaaacgcatcggcgaaggcgacaaagggctgaacaccggtggtatgggtagtgtatctcctgttccgtttgccgacaaagcatggatgaaaaaagtggaagaccgtatcatccgccctacagtagaaggactggcagcagaaggcatcgactataaaggctttattttcttcggcctaattaatgtaaagggcgaaccgatggtcattgaatacaatgtacgcatgggcgacccggaaacggaaagtgtcatgttgcgcatcaagagtgacttggtggaactgcttgaaggagtggcaacaggcaatctgaatgaaaaagtcttggagatagacccccgttcggcagtatgcgtcatgctggtatccggcggatatccggagcattatgacaagggatttgccatcagcggaatagaagagattgaaaacagcattgtattccatgcaggaacggcactgaaagacggccaggtagtcactagcggcgggcgtgtcattgcagtcagctcctacggcgccaataaagaagaagccttggcacaatcattcaccaatgcgaagaaaatcaatttcgacaagaaatatttccgttctgatattggattcgacctgtaatcagcggactattaacccatggcaggctatgacaaattccagacagatatggcaaagggaagattcaccttccctgttgccatccttatatgcctgcttctccggatcatcaccggcaatgaatggcaggatgtaatcaatttgctagtctgtgctttgactgcttatctgctgatcgagataaacaccgccttcacgctgatacggacacgcagtaccttgcatgtcagcttttatatattcctgtccacaacctgtctgtttctgcattccttccagtatgccgtttttgtgccgctcgcctttctgatcgctacttcccaattattcagtagctacgaatctccctatccggcgggaagtatattccacgctttctttttcatcggactgggaagcctgttgtttccacagttactttattttgtacctctgttctatttgggaatgattagtttcagatccctgtcactcaaaagtttctttgccgggcttacaggactctgtatgccctactggctctttttcggttacgcgttctattacgacaaaatgaatctcttctatcaccctttacaggagcttattcattttcaacccatcagttatgggacattaggaatggacaggatcatatcctgtggaatcatcaccttgatatcactggtcagcagcgtgcattatttccatgtttcttatttagataaggtgcgcacgcgtatattcctttctttcctgatcaccgttgaagcctggatttatttactgggtatcttacagccacagcatttcgacatcctgttacagatgcaaatcattgtagggtccattttaacaggacatttatttactttaacccacaaccgctttaccggcatctttttcatcattacatttgttttattaatagttctaactatatacaatttatggatgcaattcttcaattcctgatcgactggggatattggggccttttcctaggctcttttatagccggaagtgttctcccgttcagctcggaggccgtactggcagcctgtgtcggtccgttgggcttagacccggtgatcagtatagctgccgccaccgccggcaatgttgccggcggcatgacctgctactggatgggacatctgggcaatatggaatggatcgagaaatattttcatgtaaaaaaagagaagatggaccgtgcggagcggtttgtacacggacggggtgcctggatggctttcttcgcctttatccctattttgggaagtgccatatccattgtattaggcatgatgcgtgccaatatatggattgtcattctcgctatgaccatcggaaagatactccgctacgccttattggtatggggggtattggaagcctccgctttaatgcattaaaattatgaaactggaacaaacagcagatggaagttataccctctatgtacccgaactggacgaacattatcattcggtgaaaggggcactgacggagtcacaacatatctttatcgaaatgggattaaaacattctcccgtttccgagccccacattctggagataggactaggaacagggctgaatgcctttctgacactgctttcagcagaagaaacccgacggaaagtacattataccggtatcgaacgctatccgttagccgaagaaaccttgaaacaactggactacccccgcctgatcggcaaacagcatgaggaggattattacgccatccaccaggcaccctgggacacggaaacagaggtatccccttggttcacattacataaaattgaagacgattttacccggcttttcaacccggtggaaggcagccgttctgccgttcccttatacgatatcgtctactttgatgccttcgctcccgacaaacaacccgaaatgtgggaacaatctctcttcgatactttatacaaggtattgaatgacggaggtatcctgacaacttactgtgccaaaggggtggtaagaaggatgctgcaaacagccggattcacagtagaacgccttcccggccctccggggggaaaacgcgagatactgcgggcaaccaagtctgattaaacttctaggaccgaaactgataaatggtcaagtttcacctaaaacagtaaaaccgttgtaaaatccttcaaatccgtcatatatgcataactgcatatttatcagcaaattaccatgaaacattcatcgctgaatccgtcatagattcttcatattctttttccacgctgagatgattgccgttatatacataaaaaatctccggcttatcacaagccagagattctgttttataaatttaaagtttttattatataagattctcccgtcggagaaagtcttatcttggaattgttagtgagagtgccccgaaagtcactctcattttttaagactctactgttagaaacaattagttcaaagtctgtacatagaatgtcaagtctttagtcatgccaaatacatctgtgatatgatatgtgatttcgataaccttaccattacctacttccttggcaatatcaaacttcatcttgttggtattggcagtttgagcagcaccgtctaagatataagttaccacatttgtagcctgttgatccatcttggcagaaggatacaagccatagaatgaaggatcagccttatctacaacaatgctttgtctgttatttaccaatgaagagttcaattcggcacgtaatgcagcagttacaccttgtgcggcagcacggtcaaacagatagtacggtttgtcgaatgcatcagccaaagtgaaatcagtattgcttacttcgaatgcatacttcaaaatggtctgcaaaccatctgttgaataaacagcttttgcaatgaacggattctcttttgtacccttagatgctacttttgcaaccttagagtcagcaatacggctggcgaactgtaatataatatcatccttagcttctgtataaacattgaagtgatgatatttaacatcggtcaaagtatatgcatccatgttaccggctgtgccatagaagccgattgtattccattcagtatataatgagctatttgagatatcggcaagagttacatagctttcattagtcttaccaataatttggaacgagttagtcggaaccaatacttcataccagttagcttcaacatttgcttgtgcattgtaagcaccattctggtaattataaactcccttgaatgcatcacgcatatcagcagcaacagcatcatagcggtccaacagtttttcaccatatactttcaatacatcatttccgtctttgtctttagaccaagcagacgtacggttagctacagattcacgtttgatcgggcagttagtaggcatctgcaattcgaatgagaagttcattcttgccacttcgtattgatcataacgagttgcgatttctacacggaacgcgttgtccaaaggcaatgcaatcttcgtgttgtcaccactatactgacgatcgtctgttgtgtaataaggagcagttacatgtcctcctaattcactgtcaaccttgaatgttaccttcaatgcggtaatcttatccaaatcacggatgtttccggtcagacaagacttgccggttgcgtctacataatcaaattcaatgtatttgtccagcaatgcaccattgtatgcaacacggtcccaagtaccttggttgttgataggatcaccaccggtcagttctacattgaagtcaaggtcattgctaccatatttcttatcgaatacacttctgttgatttcttgtggatcggttgaattacccatgctgcgtgcaatcgcatcaatccatttcatcttgcctgcatctcccaaagtattgaagaattctgtcaagtcaagtgccttactccatccataccatctggtttgatcggcaataaccgtagcattgaatggcgcaacgatatcttccaggaacttgtcaggaacagtcacagcctcatcattaaagttgacagagaagtaagtcttacctttctgaccgtttatcaagatgtagttgtaaatgaacggaatagtattgttcactacagcttctttcttagcgatgaaacgataaccgtcttcagtaatctccacaccatattttctgatggattcatctgtaatcttactcttgtctatttccagatagtagtcgtataccaatacagagtcttctgcccattgatcatagccgtcagaactaaatcctagtatatcgaaggaaggagtatattcctttccatacaagaatgagcttcctgaaggagcaaatgtcaagccattaatgtaaatgttttcagttgcgtttacattgctggctttgaatgtatatacaaacggggattttactacttctccattattttttgatgtagctttcagtgcaaacaggtacttgtcaccatcattagccttgaactggcctgcatagtcaggacgtccctggcttccggctgcatccaaatcccatttctgtacgtcacgaggcagtaaccacataccgttggccgatgtagcacgggtagctgtagtagctttgccggtccatgcttggggagcaccaaaattcaatccccaaggagtggtgttgtctgtagatacaaacgcccagtcataagcgtcagcatcagcacctgcgggattcacttgcatcttgatgtcgcggtcggcagtaggatacatacctttcaacattttgccgtttacagctttatgtcctgcccaatccacgtcattattcaatataccataatagatatcgaaatcttgagcatagttttgtccgttcagttcaggaataatgcttaacaatgcagctccacccggaataaagatagttttcggctcaccgtttgcttctgttacagtaaagttgtaaccaccggcaacttcaaccactctcagaccaccggcaatatattcggtatccacgtatgcacctttttcagcatcccatacctgccaataaccagtttcctcgttcactttggcatcgtgtccggcagcggcagcatcacccggttcgccttggtcacctttgtcacccttatcacctttggcaggatattcagatttcacaccgtcaaatgcccagtaaccgtcgataatggtcacaactgtaccattcttaccgtcttcacccttgtcacctttaatagtttcaatggtactcgtagagttgtcactccaggttacagtgataccgtcaccgttcttcactacgttggtaacatacttaccagcatcaacttttgcctgtaaagctgaaagagccgacttgatatcgaccagttccttgtcgatgcggtcaatgtcctcatcatagtctttacaagacacaaatgttcctgttgacgaaaccattaaggctccgaacagaactgcacttaaaaactttttgttcataaataaagatttaaatttataaatttaaaaaactaaaaattggttatacatatactgttataaaaggacttcattctttatttccaagtttaccagattcctctcgcgcgccgcataccgtttcggtgtcatacccgtctgacggacgaaagccagatagaaaggactcttcgagccgaagccactccgtgacggaacctcacccagcggacaaccgccgttgcgaagcaactccttagcgtattccacccggtagcggttaagcaactccttcaggtgacaaccgaagtagcggttcaccgcattgctcaggtaagtctggtttgtttcgagcatcacactcagtttctttaacgaaagagaggaatcaaggaatgcccgacgtatctccaactgatacaatatacctttatatataaggctgtctgccggacgaacatccgacagtgacgagaaccgcgccgtccactcgcgaccggcggcacgatagagcaatgccttctgccttacagaagtgccgctcgtctttttacgtctcagaaacaggtattccatctaaactcgttattcgttcttattggctttttatgcagatctcttagtaagagatcgacaaacagacgataacaagctttaaatcaaaacattaactatacacatacaaggttaaaccagagctggcagaactagaagaaatactttttttcacaatattccatattttttccgcgaaaagtgtactagttatcaaaactttccttatttttgcacgtgaaatgtcgatctcttactaagagatttatattttttcatcttccagacatataataacttattgattttcaaccatccacaactaatccctacttcctccattaacatatagtaagataaatacatgaaacaaagattgaaaggatttttttacaattcttagtcttcatgaatacgagagccttatatggcctcttaaaaagattgacaaacgataagacacttcccacaaaatataaagcgcatatttatagagaactataaagactacatagaatgccatatagaatctcttacctgaaaccaaggcttctcatacagccacagagcaaccgtatgaaaagccttaaccaaactgaaattgcttatcaattgagcaatttgggaagtatttgtacctgattaatgagcaatttgcgtatatttgttgttgttaaacagaaaagataacattcatgagaaccagacatcacatattttcccaattgcatcccggtaaaagtatcctttgttcatgctgcatggcactgatagtgtgcctgtttaccgcctgtgacagtaaacagcccacttccagaaaaccgaccctgactgtcaccctggagcccttgcgctatttcacagaaaccattgcaggcgataaattcaaggtagtcagcatggttccgaaaggaagcagccccgaaacctacgaccctaccccccagcagctggtcaatctggataagagtatcgcctacctgcgcataggctatatcggttttgaacaagcctggatggataaactgaccacgaatgcccctcatctgaaaatattcgatacttcaaaagggatagatgtcatacaggaagcaggatacaaccacggtgaccatcatcacgaaggggggatagagcctcatatatggaactccgcacgcaatgcctcagcaatcgcccgtaatatctacgccgccctgagcgaactggacagtgcaaacgagccctattacaaacatcgtttggacagtctgcaacaaattatcgcacagacagacacggaagttcgtgaccggctacagaatgccgacaccactttcctcatctatcatccggcactcagttattttgcccgggactatggattgaagcaaatcagcattgaagaaagaggaaaagaaccctcgcccgcccatctgaaagaattgatagaaacctgccgccgggacaatgcccgggttatttttgtccagcaggaattcgatacgcgcaatgccagactgatagcagatgaattggggattaccgttgttcccatcaatccgctaagttacgaatggcaggaagagatgattaatgtagcaaaagcacttgccaaataatacagccttatgacgaatcccattatacaacttacagatatttccgcttcttacgatgagaaaacagtgctaagccatgtcaacctcaccgtatatgagcatgacttcctaggtgtaataggtcccaatggtggtggaaaaaccacattaattaaaatcatactaggattactaaagcctatttcaggcacaatccgtttctataaaaatggaaaagaaatacccgagatagccatgggatacttaccacaatacaacagtattgacaagaaattccccatttcggtgtacgaggtggtattatcagggctcaacaagcagaaatccctgttccaccgctacactcccgaacagcacgaactagtgagccggattattgcccgcatgggattggaaggtttggaaagccgtgccatcggcgaactgagcggaggacaactgcaacgcgcgctcttgggacgcgccttggtttcaaatcctgaggttgtcattctggacgaacccaatacctacattgacaaacggtttgaagccaaactctactccctgctggaagaaatcaacaaggaacgggccatcatcctggtaagccatgatataggcactgtgctgcaaaatgtaaaaaccatagcgtgcgtcaacgaaacgctggattatcatcccgatacggaagtacccaccgaatggctggaagagcatttcggatgccccatcgaactgttaggacatggaaacttccctcaccgcatcttgaaatgccatcatcacgacgaataaatccgattatcgtgacctaagtcttttcatgcgacaggttaagccctatccaccttatcattaagcattttcttacggcagacttctacagtcgccggcagtgctccgtacagtccattgcaacagaccgtacggaccactatagcagactgtacagtccactgtagcggtctatactagtttaccgtataaaagaccttaacctagccattaatcaagcttaatcatagagtagaaaaaggttaggaatccaacgattccctccatctgcacaaactgaaatttcagaacacagcatacaaaccagcaataaaacatagaaattccgttaaggactgaaagaaacattttctgccgcatccccgaaggataacactaaataacagaccattgtacccctattccaactttctttcgtatctttgcgcccattgaacgttaacgaaacaataatatattcatgaaacagtacaaattagtcaacaacctggtgggttggttcgcttttgtcatcgcagcttttacttactgtatgactatagaaccgacagccagtttctgggattgcccggaatttatcactaccggatataaattagaggtaggtcacccgcccggcgcacctttctttatgcttaccgccaacttattcagccaatttacaagcgaccccagtcaagtagccagaatggtcaataccatgagcgctctgatgagtgcggcttgtatcctattccttttctggagtataacccatctggtgaaaaaactgatatgccccgatgacaaggagatgaccttaggcaaactcatcaccattatggggtcaggactggtaggagccttggcttatacatggagcgacaccttctggttcagtgccgtagaaggtgaggtatatgcttactccagtcttttcaccgcagtagtcttttggttgattctaaaatgggaatccgttgccaatgagcctcacagcgaccgctggctggttttgattgcttacctgaccggactttccatcggtgtgcacttgctgaacttattgtgtattccggccattgtactggtgtactattataaaaagaatcccgatgctaacctcaaaggcagtctgttggcacttacaggctccatggtgttggttgcagcagtgctgtacggtatcgtgccgggcgtagtaaaagtaggaggatggttcgaactgctgttcgtcaacagtttcggtatgcctttcaacagcggtctgattgtatatatcattctactcgccgcatccattatctggggtgtttacgaaagctatacggaaaagagccgcaaacgcatgaatatctccttcatggtaactatcgccatgctgggcatccccttctatggctacggatggagcagcgccttgataggcattatcatactaggaatcttgggcgtttatctgtttgctgatttgaataagaaatatcagattagtgcacgtactttaaatacctctttgctgtgcatcatgatgattatggtaggatactcctcgtacgcattgattgtgattcgttctaccgccaatactccgatggaccagaactctccggaagacatcttcactttaggcgaatacttgggccgtgagcaatatggaacccgtcctttgttctacggacagacatacgcctccaaaccggcactgaaagaagtggacggaggatgtgtatatgatgtgacggaaggcgctcccgtgtatcaacggaaggagaaagcgactcccgatgaaaaagacagctacgaaatagtgcgtcataagaccgattacaaatatgcacaaaatatgctcttcccacgcatgtacagcgacgcacacgcacaggcctacgaagactggctgggcggcatcaaaggcgtgcaggttccttacgaccagtgcggacagatggtgatggtgaaagtcccgacccaatgggataacatcaagttcttctttatctaccagttgaactacatgtactggagatatttcatgtggaattttgccggacgccagaatgacatacagggacaaggtgaaatagaacatggcaactggattaccggaataccgtttgtggacaagttcctggtgggcgaccaaagcctgctcccctccgacctgaaaaacaacaaaggacacaatgtattctattgcctgccgttgattctgggacttatcggtctgttctggcaggcttacaagacaagacgtatcacgactcccaatggggaagaaatagaagaaccagtaggtatccagcaattctggatcgtattcttcctattcttcatgactggtctggccatcgtactttatttgaaccagacaccgatgcagccccgcgaacgtgactatgcatacgcaggttcattctatgcatttgccatctggataggcatgggtgtggcgggtattgcccaatggctgcaaggcaaactgggtgagaaaccagcttccgtcattgcaactgtagtttgtctgttcgtacccatccagatggtgagccagacctgggacgaccacgaccgcagcaaccgttatgtggcacgcgacttcggacaaaactacctgagcaccgtacaagaagaaggtaacccgattatctttaccaatggtgacaacgatactttccccttgtggtacaaccaggaaacggaaggtttccgcaccgatgtacgtgtatgtaacctgagttacctgcaaacggactggtacatcgaccaaatgaagcgtcaggcatacgactctccggcagtacctatcgaatggagccgtctggaatatgtacaggggcataatgaaggagtggctgtacgaccggaagtgatggaaagcatcaataacttctacaagcagaatccggaagaagccgccaaggaattcggagacaacccgtatgaattgaaaaatattctgaaatactgggtacgctcacccaaagaaggtttacagctgataccgacggacagcatcgttatcaagctggacaaggaggctgtgaaacgctcgggcatgatgattcccgactccctgcatggtgaaatccccgattatatgagtatctccctgaaaggcaaacgtatgctgtacaagagcgagctgatgatgcttgagatgctggcaaataccaactgggaacgtccgttgtacatggctattacggtgggtagcgacaatcatctgaatttaggcaacaacttcatgcaggaaggtcttgcctaccgcatcactccgttcaacaccacccagctgaacgcacgcatcgacagcgagaaaatgtacgacaacctgatgaacaagttcaagttcggaggaattgacaacccggatatctatatcgacgagactgtgatgcgtatgtgccagactcaccgccgtatgtttatacagctggctacccagttgataaaagaaggcaagaaagataaggcgttgaaagcccttgactactgttcggaagtaatcccaagcactaccgtgccccacgattacatcatgagcagttccaaagaaatggccgatgattatctggcgttaggtgaaaaagagaaaggtgaggctattctgaatgatttggcaaacaaatcggtggaatacatcacctggtacctgagtctgaatgaccaacgtctgcaaggttcatacgaggactgtctgcgcaatttctatattctggatgaaatcaacaagagccttgcccgcgcaaatgctgccggcggtgtacaaggtgaaggcgaacaacagaataaatcggatatggcaagccactatgccaagaagtttgaagagctctatgaggtgttcaacaaacgtgtaggcggcggagcaggcagaaagtaaataaaaggtgtggattctgcggtgaatccacacctttatatttgtataaccaacaaaagcacacacattcatgtttatagaacaacccccgctgatactccgctggctttatccacgcgccttctggcgaatggacaagaatgaaaaagcggtctatctgactttcgatgacgggccgattcccgagatcacaccgtgggtactcgatttattagacaagtacaatattaaggctaccttctttttggtgggcgacaatgtgcgcaagcatcccaaggaattccagatgattgtagaacgaggacatcgtttaggaaatcatacttttaaccatatccggggattcgaataccgaagcaagaattatctggccaatacggacaaagcaaacgaactgatccataccaacctgttccgtccgccacatggtcacatgcgctggatgcagtacatggtgctgcgccataagtatcaaatagtgatgtgggacttagtaacccgtgactatagcaacaagctgaatgggaagcaggtactgaggaaagtaaaacattatgtgcggaatggttccatcattactttccatgattccatcaaggcagagaaaaacatgaaatatgccttgccccgggccatagaatggctgctggaacaaggttatgagttcaaggtatttgactgataaagccaaataccttgagttatttatttagtatatgtaaaccccagtttattcaacccattctgtacatcgggatggctcataaacagtttccataacaatcccgaacgataattctctatcatcactgctatagggccctggtcaatagccagataacgtttcggataccagttatccatttcactgaaagcatcataaaagccatacgggccgaatactttctcacccattccatacagatgacgcattacctgcaaagaatattcaggagtatagacaatagaggataaagcggcagtcggagagatcactcccaaatcttctttctcattaggagcgtgtgccgcataaccgtttaccgaataactggcagtcaatccccaacaatccgggccaaagccggtataatgcttgggattacggatgcagtaggcacggttgaccaaggtaagattacgcatttcattgaaataactgggacaatatttatcctgcaaaccgttgggattcatgcccagaaaagaatattgcgcccagaacaacggtcctgcttccgtaccctgataacgaagatgtaatttaatcccctctaccgtatgaggagaaacaatctgtccattctgtgcccagccctcattataaaccgtggcaggtatcccatgagtaggagaagcagcagccagaatatacataatcatacattcattgtatccatgcaccggaaagttcatggcccagccatctgtggggctccaatgccaataaagcacattttgcccgttctgacggtaaaagttccagtctacctcacgccacaatttatcaatacgtgccgccaactctttttcatccgaagtgccatttacataatattgatgcacagccagcaagccttgcatcaaaaaagcagtttccaccaagtcaccgccattatctttggaaccgaaaggcaatactttacctgtctcaccattccaccagtgaggataagccccatgaaaacggtcggctttctcaaggaaagtcacaatcttgtccattctttcgagcccttcctgccggctcacatagccccggtctataccggacagaatagccatgataccaaaaccacttcctcccgaggttaccacctcgggtcctcctgcgggatatacattatctatatgataacgctcacgagccataccgctataaggttcgcccccctcccagaaatattggaaagtacgacgctggacagtatccatcaaagcatcatcggaaagcgtgtcggacgccgatgccggacgcttgtcagaagaagctgccggcttgtttttacaagccagcaatgagaaaagcagcaacaccgctgcacataagggaattcttttcattttttcacaggtttaggttagtgcagcacaaatgttgctgttttcacatgctggctgtccgtaccaatcatcaaatcgaaagctccgggttcggccacgtattgtaactcgtaattataatatttcaataaatcgggagtaatcttgaaggttatctcacgggattcacctgctttcaggaatactttttggaaacctttcagttcttttacaggacgggtactttcagctaccttgtcacggatatacaactgcactacttccgcaccatccctgcttcctgtatttgtcaatatcactttagctgtcagacttccgtccataggcattgaagtacggtccaacgtaatatctccatagttgaaagtagtgtatgaaagcccataaccgaatggataaagcggttcgttgtccacgtccagatagttgctacggaatttctcaaaccatttcccttcgtgcagcggacgtccggtattcttgtgggcgtaatacaaaggaatctgccccacattcttcgggaaagtcatagtcagttttccacttggattaatagcgccaaaaagtacgtcaccaatagcataggcagcttcgctacctccaaaccatacgttcagaatcgcaggaacatgagcctgttcccactccaacgtcagcggacgtccggtgaaaagtaccaagactacaggttttccagtttttagcagttccttcaacaaagtacgttgtacatcggggatatccagtgaagtacggctgctgctttcaccgctcatttctgaagattcgcccaaagcagctactatgacatcggctttctgagctaccgtcaatgcttcttgcaacagttgggcatcggtacgggcatcccgatgaaggctgcgcccgaagagagtcgcccgttcttcataggcggcatcactggtcagattgctgcctttagcgtatgagatggtagcttttccggcagtcatctctttcaaaccttctatcagtgaaggggatttatccagtatagcggccacgctccaagttccgggcatattggtacgagtatctgccaacgggcctattacggcaatattaccctgcatcttcaaaggaagtacaggttgcactgtgcttccggacggattcgatcctgccctatcggtagaaggttcgtttttcagcaagacaaagctttctccggcaatacggcgggctacggcacggtgttccggagtgaagatatcacgtgcgggacgtttcagatcacaatatttataaggattggcaaataaccctaatttatactttgcctccagaataagacgacaggcagtatcaatggtctgcatggatacctttccttcctgcaccgactgtttcaatgttcctacaaaagcatcgctcaccatgtccatatctactccggcattgacagcacgggcagctacggtttgcaaatcaccgattccatggtctatcatttcatagattccggtatagtccgtcaccacaaagccctgaaagccccactggttacgcagcacatcagtcatcaaccatttactggctgtagccggaatgccatccacttcattaaaggaagccatcacactacccactccggcatcaacagctgcctgataggggagcatgtactcattgaacatgcgttgacggctcatatccaccgtgttataatcgcgtccggcctcggaagctccatacaaggcgaaatgcttgacacaagccattatctcatcattgcgtttcatctggccgccttgatagccacgcaccatggctttagctatctcagcacccaggaacgggtcttccccactcccttccgaaacacgtccccaacggggatcccggctgacatctaccatcggactgaaagtccaggaaataccatccgcactggcctcaatggccgcaatacgggccgattcctcaatggctttcatatcccaggtacatgacaagcctaaagggatggggaaaatcgtttcataaccatgaatcacatccataccaaacagtagaggtatccccagacggctctctttcacagccagttcctgcacatccttgatacgggcaactcctttcaagttaaacagtcctcctacttcaccccgttttatacgggctgagatatcgctgctctttgcctgtcccgtagtgatttcaccggtaacgggcaagttcaactggcctatcttttcttccaaggtcatctttttcatcaaattatcaatgaaacgattcatatcctgaggtgatttctgcgcatgcacactcagggtggcaaatagcagcatgggagccacttgcttcattctttgaaatattctattcatcatctttaaataatgtgctaatgtgtcaatgtactcatgagcctattgacatattgaataattataaataatcaggattctgtttcagcactcctttcgacttgtctatttcatcctgcggtataggcaaaagtgcattcttcggttgataattcaacttacctgccgcatgaagaacttgctcagcgattccccaacgcaccaaatcatagaaacggtcgaattccagtcctaattccaccctacgctcgtgtcggattgcttcacgcaataccgattggtccaaagaagtaatttcaggtagtatatccggattaccgccacgcgcacgggcacgcaccatctccaaatccttttgcgcttccgaagtattacctaactcgtttgctgactccgctgccattaaaacgacatccgagtagcggatcagccggatattcacccaaaagcctttattggtaaactcctggcgcaatgccggattggtataggctttcttgttgaagtaagcaccttctgcctgcgacaccggggactctccgtatggcgtattggtattctccggagtaacagggtcggaatcactcttacggaaataaagcaaggtggcatccttacgggggtcaccaggctcaaaagcctccgccatcagttcggtagccatgtgccatccccaacccaaatcccattttccggaaccacgaatcccctgtacttcacagaattggcttcctatcttatcactttgcggcaaggcggccgtagacaagcactgcaactcaaacaccgaaccaccgctgttctctccctcgtcagtaaaaatcttatcgtaaggggtatccagattataaatttcttttcccattacatccgaggctgctttgtacatattctgccaatcattgcgcatcatataggtacgggcatgcagggaacgggcagctccccacgtcagacgtcccaaataggcagccggccactgttcgggaagcaaatcttccgcatctttcaagtccttgtctatctgttcataaattttgtctaccgttgttttgggtacattagcctccgaagcttcatttaccttaaaggtaaccaatggaacctccccgaaggctcgcactaaattaaagtaacagtaggcacggaaaaataacgcttctcctttattatagaggtcattctcttctgtcagatgaccggtctcaatggcatccaccacctcattgcattgataaataatcgcataattctgactccaataggcctttatcaacccattgctggcattgtactggaaatcatcatacattgccgcctgttccgacccgtcgctggaaatacttcctttctccgaatcttcggaacggaaacaatgaatagcgaatgcgggagttcctgcagtaatattgaaattacgcatcatggtatagatgttgaatatctttccttctgccaatgcaccgggattatcatcctccgtgaactgaccttgaggactgcggtcaaggaaatcattacaaccggtaaaggccaggattcctccaatcgcccaaatgtatagtatatatttacttcgtttcataatcaatcaaaatgtaatattgagtccaaatgtataaatcgcaggtaccggataacttccattatccacaccaaaagcaatggcagaaccaccaaactcaggggtgtagccggtattatgtttccaagttttcaggttctgaatattgaaataggctttcaaagccttcaaaccgattttggatatcagggccttatcaaaagtatagcccaattgcaggttacgtatacggaagaaactgccgtcttctacataatactccgaattttcaaagttaatggcatgaccggtatttaggacaggttgtgtattggatgtaccttcgccgtgccaacggtccagacgctgctccatatagttgaactgcgcccaattgtaattgtcccaagtacggtaaatctgattaccgctttgtcccatcatgtcaatacccagttcccaacctttataggaaacacctaatgagattccataggtaacatccggagtaggatcaccaatcaaagtacggtctgccggtgtaatctcaccatccccattcacatcggcgaacttcaaatcaccgggagtcactgtagccagtgtattcttgggtgaagcatcaatatcggcctgtgactgataaacaccatctaccttatatccatagaagaaaccgatgggataacccgccatagtatagctctggctcttgtctccggcaataatggaatagccgtcttgtaccagactcttcaccttattcttgatagtagtcaggttgactcccacattatacccccaatcgccaatctgatcccgccaagtggcagacaattccacccctttattctctatctgtcccagatttcctattccgggaatggttccggaaagtccgggaacctttgccagcaagtccttcgtattctttttataataaactccttccacatgcaggcggttgcgaaacatattcgattcaaagcctgcttcccaagcttccactttttcccatctaaggttcgcattaggcaaataggccaactgatagcccggatagatggtggacggattgccaaacacagctccaaaagcattttcaagcaacggctcagccggataagcagtatccagattctgattgcccaacgtaccccaggaacctttcaacttcaacatatccaaccaagaaatgtctttcataaactcttcttcggtcatcagccatccggcacctgccgagtaaaagttctgccattggttgcccgtatacgaaaaagccgaagaaccgtcccgacggaaagacccgttgaacaaatattttcctttgtaattataaatcacacgccccagaaaagaaacagtagtacgttcccactgtgtacttccattggtagctgtagccaaatcaccaatactgacgaaccatttatcgggattatcgggaataaccaatccaataccttgcccacgggcggcatccagacggctgagagaattgtaataagtagtgaaaccggcggttgccgtcagattatggtcgccaaaactatttgtataagtcagcacataatcactttgcaccttcgtttcattttccttgaactggctcacttcagtcttacccgttcccagtgtagccacatttcctttcactgtgttatcatataccttgataatcggctgataggtacgcccgttattcgagccgtaatccatagagaacacagccctgaaattaaaatgttccagaaaatccacctctccataaatgttacccgatgcacgataattctctgcgcgagtggtgttggcttttaaatccacatccaccatcggattcatcatctgtgctttctgaaactccggcaacgccgcatacaactgatattcttcattgaatacaggagctataggagtggtacggacagcattcaggactgatttactatcagcaggcagcatacgtgctccgttaaactgaaacccgacctttatcttgtcggttatcttatactcattgctgacattcaaggtgattttgctgaacttctcgtgctttatatttccttgttcgtatgagtatcccatccccagataaaaactatgtttttcagaagctcctgtcacactgatattattattggtaatgaagccattctgaagcacttcatcctgccaatcggtatcagcattccagccggaaaaatcaaaagcgggattcttttcattaacaagctgctcactatacaattctttgaactgagaagcattcaccatcttgattctgtccaccacatgtttccagccgaatgaggtgttgatattcaccaaagtctgcccctccttagccttctttgtagtgataatgataaccccattagctccacgcacaccgaaaatagccaatgaagacgggtctttcaacacttccatagactcaatatcctcgggattcagaaagttaatgttatcattgaacaaaccgtcgacaatgtaaagaggtttgtagccgttaatggagttcgttccacgtacacggatttcggggtccgaacctgcttgtcccgagttgataatctgcacaccggctacctttccctgcaaggaagacaagggatttgtagaaggtttattagcgatttcggctcccttgatattcgtgatagagccggtcaagtcacgcttcttcgcactaccgtaacctatcactactgtttcagccagcatttgtgaatcctctttcagctgtacatttatcacatgctggctgcctactttcacatcttgcttcaccattcccacgtacgagaattccagtacattgtcgggtgaggcggtaatactgtacttcccatctatgtcggtaatcgtaccattggaagtaccttgaatcactacggatgctccaatcagaggttcattggtcgaatcggttaccgttccggtcactgtcttctcctgagcaaacagcgacgtagtcatcaacagcagacagactaaagcactaaaagtcctcaatccctgccgcccatgttgtaaaggtttaggtttattgtccattgcattttctattaacaaataaataactagtttaatttcttatattgcaatgaaacaaaaggaaccggaaaaagatgtttaagacgagagaattaacactttaacatcccatgaaaaaaagttacccgaagagcatgtgctcctcggataacttttattattcttatatcaccattctatggtacatggaccaccaagggattacgtaccttctgagcgtattcttccaaatatttgttccaatcggtatcggcttcgaaaccatatttgctccagcctgatccccaataataaatatactcggaacccggttcataatcactgaccgacaacacatgacctaaagcacctccacgttctttctgctctttttcggagaacatttggggcagcgctccttttatattagccggaaatacagcacctatataaatcactccattgttattggctgcattctctgtagagtccgcataggctatataacctgcatttgcatcaaaactataccccgtaggattctgtttgtgcaatacaatgccggtcaccaccggagttgtttcctgcaaattatcaaaagaaaccacagtcttgttcaactgcgatcccttgtccaaagaaatgatacgcgtttctatcacatttgaatctccttttacaaccaacggattataaactaacttggtggtgaatcgaagcggaccgttatccaagacttcacaatccttgtaacaatagggataaacaatggtactatcggggaataaagctgctgtcccgccacccagagtcggacccaccgcataacaatccattccgtttccatgatctatgtgataagagattccttgattcaaatcaccgtcataacgatcttccaccaccggttcgggtacattcttggtccagatgtcataaccaaaggcacgctcgcccttctcctgcaaagcaggaccgtatgcacgataagcggcgcgatcgttttcccatgccacatcatccagacgctcgggatattgacgcccacaagcaaccacatccaccggctgtggagttccttctgcaattgtataagtaaccgaagctccccctttcaccgaaacaggaaagataagcatatcatcgtatgttatctgataaggtacttcaagcccgttctcgtccaatacgataacttgtgccgtatcgggtaattgtagtttgcctgttatttcagccatagagatttccaccatttctccattcctatcaatagaaagcggattggttatagtgacagtcaccggctccttttgcgaacaggaaaacatagctaacgccgttgcgactgttaaaaagatttttctcatactatttattgtttgtcgaactgaaagacaaaaatacaaagaatctgcaagtatcaacaaagacacaagcagattcttcctatttatatctactaattatttaggctgtttaccaatgtaggccagaataccgccatctacatagagaatatggccattcactgcattagatgcttcggatgcaaggaatacagcaggaccagtcaattcctgcggatccaaccaacgaccggccggagtcttggcacagatgaatgtatcaaacggatgacggcttccatcgggctggatttcacgtaacggagcagtctgcggagtagcgatatagcccggaccgataccattacactgaatattgtattctccgtattcagaacagatgttacgagtcaacatcttcaaaccacctttagcggcagcgtatgcagaaacggtttcacgacctaactcagacatcatagagcagatattgatgattttaccatgtcctttttccatcatcgcaggcaaaactgctttagaaacaatgaacggagcattcaagtcaatatcaataacacggcggaaatcggcagcttccatttcgtgcatcggaacgcgacggataataccggcattgtttacaagaatatcaattgtacctacttcctttgcgatagtggcaaccatagcctgtacggcaggctcgtcagtaacatcacatacatatccgtgtgctttaattcctttttcagcgtaagaagccaaacctttatccaccaattcctgattgatgtcgttgaaacagatggttgcaccttgttctgcaaaagcagatgcaatagcaaaaccgataccataagaagcgcctgttacaagggcgactttaccttccaaagaaaaattcaaatactgattcatgatacttatattattaaattaatgaagttatattatttatttcaagtctgtaatcaatgagaagtcttgatcaccataatccaaattctctccacccataccccaaataaaggtgtaattgtgtgttgccgccgcactatgaatagaccattcgggagacaaaactgcctgatcgcctttcatccatatatgacgtgtttcatccacttctcccataaaatgacaaacagcgtgttcatcaggcacttcaaaataaaaataagcttccatacgacggctgtgcacgtgtgccggcatggtattccacacacttcccggtttcagttcggtcatccccatctgcaactggcaggtaggcaatacctgacttaccagcatcttgttgatgcaacgatgattggaaccttccagtgaacccatttcagcaacgatagcatctgccttggtcacttttttatcgggatagttacgatgagcggtaacagagttaaaatagaatttggcaggatttccggcatctttactttcaaaagtcacttcccggtctcccgaacccagataaagcgcttctttataatccagttcgaacacggcatttccagctttgaccacaccgggaccgcccacattaaaaatacccatttcacgtcgggaaagaaagtaagatgctttcagcggatcaatggtctccagttttaatatctctcccaccggtttggctcctcctacaaccatgcggtcatacatggagtaaaccatgttcacctcattgtccgaaaatactttttctattaagaaatcccgtcgtatcctttgagtgccatagcttttggcatcttcgggatgcgcggcataacggatttcataatttgtcttcataagcagctattttatgtttttatagtattccgaattatttcgacttgggcaaagttacgaaacaatcttgtttcgatgctgcaaaaatcgttcagaataggtataaattttgtcctattatatgcaaaatctgctacttaatacgtttcagaacactcaaaaactcaaaatcaacgagataaaatatcacaaaacttatcttgaaacgcacgcgcccggcttaatttcagtacgttttggttaatgataacaaaggccaattgatgtccattagcagcttttacataccctgccagtgaactgaccccggttacagaaccggtttttgcatgcacatttccccgagccttggtctgtttcatccgattttgtaaagtaccgtccactcctgctatgggcagagactcatagaaaggaagaaaaacttcccgatgataataggcatacttcaaatactccaatagtaaacgtggagagatataattataaacggaaacaccgctaccgtccgctatcttatagttctccggattaaaccctaaagctgttttcataaaggcgtgaatggcatcggttccatcttctcctgtcacccgtttatgcagggaacgcttggcagccaaatgataaaacattgattcggcacacaggttatcacttttcttcaaagctctttccaacacttccttgagtggtcttcggacggtataaagcgtaactatactgtcggccgttacaggacaatcggcatacgtgcaggttcgcgcttcaattcctttgctgcgcaaacggctgacaaaggtatgaaaaaagaaatctttggaagtatatacattcaatttctcagtatagggataagaaacattcccggaaacggtaatgatattgccattgctgagccagttacgagtgattttcagctttccggcttgtggattacggctcaccccgtgattatgaacctgataataatcggaaaccggcgtacaaactactttgggcaacgagtctttctgagcaggagaaaccgatacatccacgcagcccctattcagcatgagaggggaaagatagggctggaaggaataaggagtatcgtcccaacaccaaccggaaccccaataagctgagtctgtcatggaaacatccgctgcaagggtatctgtcacataacggatgcctttacttgccaatgcatctaccagacggtccagatcctcgtccataaattccggatcaaaaccgcctatcagatacaagctgcctttcaacgtgtcattttctatttttccacgataacgaagactggtatccatggtataatctgctcccagttgtaccaaggcggtaaccgaagtgattattttctcaacagaagcaggccggtacagtttatcgtcttggtaacggtaaacggattctccggcggtcaaatcaaatacggcaatacccacttcggatgttttcagaacttcttcatgcagtaaagcgtccagccgctgagatagcggctgggcgtttatgaagtgaatagacaaaatcagtaaaaagaaaaataaaactcgtttcattatagttccctgaatatctcacccacagtaggatgaggaaatacatatcgtttccaatcctctatggtcttaccatcctcaatagccatacctgccaatacaatcagctcggaagcaggattacccaacatgtgcgctcccaatacagtaccgtcttcggctgtcaaaactttgcagacgccgttcactccttcattctcggctacaaaacgcccggagtaagccatcggcaacttaacggctcgataaggaatacctgcggcctgcaaagcttcctcgctcatacctaccccggcaatctcgggatttgtatagaccacacccggtatggcacgataactcatcgcatcttccttacctgtaatatgatggacagccacttccgcttcacgcacggcggtatgtgccaacaaagagactccgttcaaatcaccgcatacatagacaccggggacagaagattgcaaatgttcatctactttgatgcatctgcgctccgtccattccaaattcagattttccaatccgaaaccttttgtcaccggacgacggcccacactcatcaataacttatcagctgtaacagttcctgttccatctgcattttcatatgacacagtaataccggtttcctctttggacacccctactactttcgtactgagcaggaacttgattccttttttggcatattcagcccggagcatagccgacagctctttatccatgccacccaggatctcatccaacatttcgacaactgtcacctgtactcccaaactggtaaagaaagaagcaaattccataccgatcactccaccgccgacaatagtcaatgaagcaggtacttctttattatccagtgcatcacggtgcgtccagtaatccacattttccactcccggaataggaggaataaatgtttcactgccggtacacagcagcaaattctcacattcataggtttccccaccacattggatggtattcttatctacaattacagcttctcccgttactatatttacctgatgcgcagtcagttttgccttgatacccagtaccagtttacgaaccacctttgatttacgcgccacaatttttcctaaatcaaaagaagcttcaggcacattcacggcatactttgaagcatgtttcgcataatcatatactttagccgaataaagcaaggttttggtaggaatacatccctcattcaggcatacaccgcccaaacttcttttttcgaacaatacaacactcagtcctgcctttccggcagcttcggcagcagtataccctgcgggacctccaccgatgattgcaatttgatatttcatggtatttattttgggttaattagtttttatctgttcaaagccttcaacagacagatttggatctatttttatcaatgcttctacaaattccaaaggcttatcagggttaatcattacaaaaccttgggcatgctctattttcactttttgcattcctattgcattcggattataagacactttacggattccgtctacacatattctgttcccccatcccggtttgatttccagaacaccattgtcttttacaatataagtagttttcgaccgcgaataaaacattaatacaggaataataattcccccaagcgccgaaaaagcccaacttttctccaaatacacattcagaaaaataatcagaacaaccagaccgactataatgatccaccagttacgggttctttttgttttaaatactttctccataatttattcctcctctatcctatgctccaaccgcttcaccaacgcattgataaattcttccggctttacaggaaccaatgacaataaatttttcttctcataatgtatcaatacatatttcgaaggcataattccaccgaatccggaacttcgtttcagctccacatccgtaatgtcagtcaagggaatggtcttccctttataaaaacgaccataatacaccactaactttccatccgcagtcagcatataagtagaatggataatacgttcaataataatgatcagacccaatgctactaccaatcctatcattgccttcatacaccaaaaagcaaataccatgacggctgtcagcagtatcaggagaaaataagtacctcctgctatcttcacatgaaaaattcgattcatcatcttattgtaatttgcccgaaagataataaatttatcgtttatcgacctcattacggcgcagaatgagagaatttatcctttttttgtcctctttactgtacgtttcatcttcaaagcatacaaatttaattcgatagaagattccgtttctgttatatcaccctcatcagtcagcagttcattcagcagttctccactacgttgtaccagactcttcctcttttcctcatcatactcggtagccatgatatttacattccgtactaatgtccttaacttaaagaatgattcgataatggcaaaagtagttgcggtagctctcggacttcttaaaattgtagccagcatataaagccctttttcggtaaatgctttaggttctacgggagaatgtttcaaactactgaaccggtcgaaattttcgaccagttgctgtttttcagatacttgcaacgaaaacatataaccatttgggaatttgtcccgattgttttttactgcttcattaattcgtttggtttctacgccataaagcttagctacatcccggtctatcagtactttctcacccctcaactcaattataagttcttttacctcactttcgtgaatgatttctttattgttttccatcctattctatttaaaaatgcagaaagttacacttttaatttcatacttgcattatctatttcgtttattcttcacgaaaaaaatagtaaaaacaagagtaaaaggtacaatgaataaaggtttttcgtagctttgcacccataaagcatattatcatggttaaaaaattcgatttccttgttatcggctcaggacttgccggaatgagcttcgcactgaaagtagctcacaaaggtaaagtcgccctgatttgtaaagcaggactggaagaagccaatacctattttgctcagggaggtatagcatctgttaccaacttgaaagtagacaatttcgagaaacacattgaagacacgatgattgccggcgattggatcagtgaccgcgcggctgtagaaaaagtagtgcgagaagcacctgcacaaatccaggaactgataaaatggggagtggattttgataaaaaagaggatggagaattcgacctccacaaagaaggaggccattccgagttccgcatcctgcaccacaaagacaatacaggagctgaaatacaaaccagcctgatagaagcggtaaaagcccatcccaatattaccatatttacagatcactatgcggtagaaatcattacccagcatcatttgggaattattgtcacccgccatacaccaggcatcaaatgtttcggtgcttacgtattgaatgagaaaacaggagaagtggatacgttcctgtccaaagtaactgtaatggcaacaggcggatgcgaagcggtataccgcaatacaaccaatccactggtagctacgggagacggcattgctatggtgtaccgtgccaaaggagcagtaaaggacatggaatttatacaattccatcccaccgcccttttccatccgggggaccgtcccagtttcctcatcaccgaagccatgcgcggttacggtgctgtcttaaagaatcaaagtggcgaagaattcatgcaaaaatatgatccacgcctgtcattggccccacgtgatatcgtagcacgtgccattgataacgaaatgaagcagcgcggtgaagatcatgtatatctggatgtaactcataaggatccggaagaaacaaaaaaacatttccccaatatttataaaaaatgcctcagcctgggtattgatattactaaggactatattcctgtggctccggctgctcattatctgtgcggaggtatcaaagtcgatctggacggacagagcagtatcaaccgtttgtatgccatcggcgaatgttcatgtaccggtctgcacggaggtaaccgtctggcttccaattcgctgatagaagctgtggtctatgcggacgcggcagccaaacatgcactaaatgtactcgaccgatatgactttaatgaggatatccccgaatggaacgatgaaggaaccatgaacaatgaagaacgggtactgataacccaaagcatgaaagaggtgaaccaaattatggaagcttatgtaggtattgtacgcagtaatacgcgattaatccgtgcttggaaccgattggatattttatatgaagaaaccgagcgtcttttcaaacgctgtaaggcttcacgcgagctttgcgaactgcgtaacatgattaacattgggtatttgatcacccgtcaggcaatggaacggaaagagagtcgcggactgcattatacgattgactatccacatgccgctgaagaaaaaaagtaaaaaatatttttttacttcaaatagaactgattatttttataactcccgttagcagaattactttttcttgttgaccattattgcactacgaaaattaaatcaattctgctaacgagattatttttgtcccattcgtataaacatgaactaaaaacagcaggaacaatgacggaatcatctatccgtaataattatttttcctcaagcggattaatattcagaatgattctcttataagattttagattgggaattccattatctgtaagttcaagtatcaaatgtaactgtttgcccggattatccggtacaattatctccgccctcttctcatcggcgtgctttatagccacctttgtttgcacactgcctgcttcccgatattgccaccattggtaagacaatgaatttttatcagggtcaaatgaagaagaggcatccagtattattttttctcccggccggactgtgcgtacactttctcccaatatccgggcaacaggttgatgatttgcctttgaatattcatcagccacgcaccagtcggcacgagccgcccagtcattttgtatagcaggcaaccaacgctggaaagtataatgcgaatccgacacaccgtttttcaaatcattcccatcttgcatgtgattgccatttttatactccgggcgtcctccccatcctcctaatgtatagtctgtatgctgttcaagtccattacgtataagaggcataaaagaaggagtatccccctcactggtatattcctgaggataggcggcacaaagtggtccgtgcccattcttaatatggtcagccaaccaaggtttatccatgatttgttgcaactcttttgaatttttactaagtctgtttttaaaataatagtccacactcatgtaatcccatacatatctccatcctccatcatgatccggcgcgcccgattcataaataatgatttcaggaagattctgttctatccattttccaccgccgtcctgataccaaatacaatataatctggcttttgataccgcttttgcccattctgcagcagaatatttctgcttgatctgccataaggcattggcctgggtgttggctccgccccatgctaaaatatgaacaggcctcggatcagaatcaagcaatgtccttatgatgagctgtgccccctcgctatcagacagtaaaggaggcaatttatgcaagtcctctctgttctcattaccaaccgccaagacacttagcagatattcagcatcgggataatcgggattatgtttcctcaaattaggcagacattccgcatatttggcaatttgtgattcgatccatttatctttactatgtccgtctttctgtaccccattgacttgaacaatgcctgcgacatcataatcagaagaatacataagaaaacgaatcatagaactttgatcgtcaatctcaccatccgtagtgacaataacccggggcttctcctgctgtcgggcaacagcagataacattgacacaaacaaaaaaacaatacagcataaaacaggggtcattttcatattacaaactgttaaattagtaggccaacacattccaaagatctctgatacgttgttcggggtcccatttgccattgaatgtccacttggcggtaacgccataaaactccggagcattctccgcctccttcaaattatcgtttaaccagccactatgccctccttcacgggtacaaccataataataggtacgtagcccccacggacagggatcaagcactttatccgaataagcataatgaatattcccgtcaagcacattcttcgacattttacatttgatgagataaaattgggaatcatgatgatagcgtcctaaaagtgtcggtgtcttagcatcaaatgaagaattggtaataaccagtttcttgttcttgtcacctcgtccgtcatgccaaatcatggcacggctatcaccataaaaatggcagcgtgtggcatagcaccatccgcgaggacaaagaaaatccacacccggacaacgaagatagagatcggcatgataatacataccattgcttccgggcgcccacaaggaaagggcatcgtttccatcggcccatacattactgttgatgatgatggtacgagtggcacgtccaaaaatcgccatctgatggatggtcgtattttcaacggcagttccgtaattgttgtaaacagtcagtccgctaataacacaatcatccgcaccttcctgcaacacaatgacaccattgcctaccggacgtccatgatattccgtgatggcacgtgtctgggctgtttcagccaagacaatccgcgtactgtcacggttttcccccaccaaaacaatattaggcctgtcaataatcactttttgatgatacgttccgttcagcaataagattttaaaaggttctgtcggaatttccggagccttttcaatagctgcctgaatactctctcccggctttaccaccacatcaaaagccgtacgctctgccatgggacgacgatacatttcaataagcccgttttcattcgctcctttggttgccagactgattgccaccttatgcttcggatcatatttgtccgcccatgcattgtatatggcaaaaagctcagccggtctgctattgtaccaactatatccgttacgacgttctgttcctatttcttccaaatggcgacgtggcagcccatcacggtcacatacatacggttcacaatatttcaaatcataataacgcgcccaaataggcttggcttgaggatcttccacaagacgagtatcccgctcaccatttgccagcacgatacgctcgcatttcaaaccggtaagtttatacctgtcaaaccatttcatggctccgtgaaccgcccgcttcacgcgtgcgtcgggtgcaggtaattccatgagcagacgcacaattccggcactctccgccgaacaataagacggcaactcatacgcacgtgccggtgcaggcttcaatgtttccctatcattctgctgacaccacactgaaggttctccatcctttataatttgtgtagccagtatacactctattcctttattaaaggcttttcccaaacgtacacacaaagccttgtctatcaaatcatcctcataaggcgctttgtgattcatcatatcacgtatcatattcaatgtattgacaatggcatcgtcattaaaagtaatatgtacctgataaccacgcggaccgggccagaattgcggccatcctccgttttcgtattgaccactcagcaaatattccactccctgaaggaaagcatcccgataacgtatatccttagtctgcctataaagacgggctaaaaaaatcatctgggcagttgtggcattattatctatcgtagaatcatcacgacgtgatttatcctttatcactttagccagctctttatcattcatgcggcgggccatatctatattcttcggccaaccgcccgtacagcgttgaaaagccaatacattttcagcaatccgccgagcttcatctgtcagaaagaaagaatcctgctccatacgtgctatttgtttccattccttaggatacgactcattatcctttttatgagctctttgctgcgcaaaggagccggttgccatggcaaaagccataaagccaataaacacttttttgaatgtatttttcattattcctatatgttttgataaaaaccagcaaacaaaattatgcgttttccgatctgaatacagagaatatttggtctttttcaggcagattttgcacagacatcatcaaacctatacaatttttgatactctgcccctttacctatacataaaaaagcctatctatcacagatcggcttttctatcaaatatttgtctttcaaaatccaaagattctcagaagacattcacattataataactataaaacttatcaaaccccattctactatctaacagaaccattacgccatttagccgcaccaatgttcaactgataaatttttgactccataactttacctgtctgattgtaatacaagtttacaccatgctctccagccgtaccatcaagtgcatctgcacgatgcatatattgatcgttatcagcagtagccttatgtggtggatttggacttaccatcagttctaatggagaaatatcatctacaagaacttccaatgttccatttaaagtagcagaaccattgttgaccaaggtgccaaaattatttttagtcgcagtccatggattattgctaaaaatttgtccgttggataaaaaagtatttgtagaataattattgtcaaaattcaatgtcacatgtccggctgtaccgtctgccatagtcattgtcttacggatatcagctcctgccatagtcatctttcggacatcaccgtcctgcttggtcaaaacaatcaggttatttttcaccgtataagtacttccatctggaatattacgcatattgaaaatatttcctgctgcacgagtgttccagttaaccaaagtattgttttcaaacgttatattccatgcccctcccttccatgcactctgcttggtttcactgaaaaatgaagggaacggacaatcatagaaagtgtttccacgaaccacaaagtccttatataaattagaattcgcattattcccggaaccggcaatccatggataacctccggcaccattactataatagccacagtcaaagaactggttatcctctatcaagacatgatcccaaattttgtaattaggcccctgctcacgaatgaacccacgtaccagacgcttgaaagtacaatttttcaccacaaaactttccaaatgtacagccataccattagaaaacatattaatgaaataattacctgtagccgaacccaaaccggcaacattatcaccataagtaagagccattggacaatcgaaatcaatatcataaaattcgagcatcttcatataaatttctcctccttctccagcttgtggctggcgcccgaacatcaaattcatagaattaacattagtacctgtcatatgcataccacctaacaatactttagcacgtttacctgctgctacatcctcaggacgagtacgaagaacaaaacctttgcaggtagttaaattatcaaacatacaataagtctttccaccttccaaataataagtctgtccttcggctaaatttacatcggaaatgaagtctgttaaaaggaaatcaatacgcattgcattgtatttcagagcagcctcgtgctgtatcaaagcattttgataagcttcatctgaatcaaaccggtcacgacttggagcacttaagtcatgagttactaaaataggctctcccggttctccgtctgagcgggcagaacaagtattgtaatatgcatcccattttaccttcacattctcgttgcgaacattaatcacataaacagagtttttctgaagtccgtcaatatctacatatcccttttcaaaatcctcatcggttaatttatattttctccatttttcattcactgttgattcaggattattaggagacggatctacttccaaccactgataaacaaaattatcgttagcatcaagctgaaatttttcacgataaatagccttatcatcgtctgataccccttctgttacagttttgaaagcacgattcaacatcacacgcatagtagtctgtgtagtcttagaagcatctacatagacacagaatggagttgcatatcgatcagaagtggtaatgcccatccattctgcccactgtctgccatcaccatgtccataccatttggatgcatgtgaaaaatcagtcacattatcatcttttgttgataacacgcgaatagcaaaacgataatcagtggaatactgttgatctttaataactaaatcaaggacctccggtcctacaatggtatctagtaacaaaagaccgttttcggcagatgtaccccaagcatctgcaccacccgaaacatttggctgtagtgcctgacgaatctggtagcccgcacagttattcactccataccaataaagatgaatatcattgccattcggtccctctgctttacaattataagcataatcatccccttttcctctattattatcacaaatgaacatagtcatccattctctatctatatttgccattcctttctcatcatcagaacacgaaatacatgagaaacctgaaaataacattaatgcatataaaaatatttttttcatcattctgtccttttataaattatttatagccataatagttcttgtatacacctgctgagcgttggatagccgcattaggataaggtaaaatataacgtacaggaggtaaatcattcacctcaggaacagaattaccatccagtggtgattctgttccatctttgaccaacacaatcattccttgttctgtatgacgaatatatccatagaatgaatatttacattggttagtaggctccgaatcattactccactgataaaattccgccatcttccaagttgctccatcaacagctaccaaagctgtcgctggttgattagctgatttgtaaggattataaatatagagcatatccaatatcttattgggataaggatagccataaacttgatttacatccacacgccattcaaccgtttgtggaagaacatggtaatacatagattcgggaagatcatccaaataagcactaccatcatgttcagctatatcatcttcgaagccagtagaagaaccggcattagacattcctacagaaagatagcgcaaaaaactataaacaatttcctgtccataaagattattacggacaagatctctccagcgcatattctcacccgcaaactcccatttacgttcatcaagcacggctttcaaaaaagtttctttagaagaagccacctgagcaatataggcagaaacaacactttggtcatcgaatgcccgtgcatggacttgacgaagtgactcctgagcagtggcagtaggtccttccaactcattaacagcttcggcattcatcaacaaaacatccgtataacgcatataagggaagttaatacctgtattactggcactcaaattggtaaactgtcccgcattcgcccacaatttagaccatttattattatggacagtataatccgcacgaatcatacaagaatcctgagtagcattattagcactgttaccataataccaaagtccattaataaaatctcgacgcttatcattctcatcgaatgaataacggtaaaaagcactcaaacgtatatcacctttagattctccccatacattcttacccaatgtctttccttcattaacggttgatgtaggtccttgagaataccctgtattacctgtagactccttagcaaaaggaatctcaaaaataggatcacctttagcaataatttcaaaattgctttccttggtaaaaatatcttgataagaagtgcctacagagtgtgtccccgaagcaataaccaggctagtatattcttttacgatttgataatacttctgataatcttccggacgtttcatcacaccataactatttgcattatttttatccggatgaagtgaataacctccggcagtcaatgcaatacgtgcaattaatgcccaagcaaactccttagacgcacgttctactgttgttgttgtagtagaagacatcttaggagcaatatcctgcaaatcttcaataagtttattttggatttcttcgcgattcattacaggaatcacataattatcacctaattgtgaggctggcaggaaagtgaaaggaacatccccgaacatcactaccagatcatgataaaccatagcacgaagacacttggcttcgcccaacatctgcataacagcggtattctcttcattataaagcggaccagtttctacaccccggataaaacggttagcatcttcaatagctttataagaagctctccaatatttatcaatttcgccaccttgatcgtcacaatcaaaacgtgcatagctattatgggttgctacattacctgtatacatctgcatatcaacatcactgttcaaattaaaagttttctgataggcactgccataaagatcacctaccaagatagaagcataaacaccgttcaacgcacggctaatttctgtttcttggctgaacacaaagtcctcattgtaacttgatggagaatccacgtcaaggaaatcattgcatgatattagagtcaaagttgctaatcctattattaaagtatttttaaatttcatgtgctttcaaatttagaatgtaatattagtacctagtacaaaactgcgactacgtgggtaacggttatagtccataccacaagttaatcctgtctgaatatccacttcaggatcataacccgaatacccagtaataataaacaaattagaggctgatacataaaaacgagctttcgaaatcccccatttagaagtcagatttccaggtaacgtatagccaacagtcaaatcctgacaacgcagaaacgatccatcctcgataaaataggaatgagttattttttttgtcacatccgtcggattccaaagtgtcctaccttcgtttaattcacggtacatatccaacgaaccatcaatatagtaacatttgtacaagcattcgccatcaccatcacgggtataacgccaacctttgtcagcaaatgtggaaagcacattgtagaacttattcttattgctttcggatgaggaaagctggtaagctgtcgcattattcacatcaaaatcaagcataaagttgaagttcatggcaaaatcaaaacccttccattgtccgctcaatccaaaacctccctgcacttttggattggtattacctataacagtacggtcatcttctgtgatatatccgtcaccattcaaatccttgaacttgactttgcccggcagagtagctatgcctgaattagaatctcctgaaatctgattgattattgtttttggatgttccacaccgtctgcatccataataggtgcatctttcgaagttccgttttcagcggccgttgatccccaaggtactgcttgcaagttattagtgggatcaaaatagaattcatccattgaatataaaccatcatatacaaaaccataaataagtcctacttggtcacccaccttcaaacaataatcattgtaacttgatttccaacggttattctgatcccaaatcacattgtctgtaccatttaatttatcaactttcattttattcatacctaaagaaagatttgcggaaagcacataatccctgccactgagaatatctcctgatatagttaattcaacccctttattagttacttgtccaatattttgcatctgacttacataaccagttgctgaaggaatgtccgatttataaagtaaatctttcgtcgtattccaataaatctccggagtaacagtgagacgaccattaaaaagcgtgatatcagcagcaagattacgagttaatgtagtttcccatttaatatttttattggcaaaagtagtacccccttgattaccataccattgctctccaaactgagttgcttctccaaatccaggtccgccggtagaattaacagtatataaataacgccacatatcatcactgatacgattatttcctgccaaccctatagctgcacgaagttttaactgatcaatccattttatatcttccataaacttttcttctgaaagcacccaagcacctgatactgaagggaaatatccccattgattacctggagcaaatttagtggaaccatcagcacgcatagttacagagagtaagtatttgtggttatagttataacttgcctgcccaaagaaagaagcagtgcgatctggagtcgaaagtgatgaagttgactcctgcggtgtaccgaatcccatattatcccaagcctgtccagcctcaaatgcacgtgggaaataacgattcttttggaagttcttcttattttggctatgataaatttcttgccccaataacatggaaaaattatgcttatctttaatagaaaagccataagatgccgtattagtccaaatatatttaaaagactgatctttctgaatacttgctacaggcaacgaattattttttgtaccttcacctgtcaaggcaccccaaaaacgatattgatctttccagtttaaactaagagtggcttctgtacgaagcaccaatcctttaacaggcttccattccaatgaaatagcattagtatagttataagcatacttattctgttgattaatggcaatatcacttttcggattagtataagtaaacaatgcttcttcatcagggtcagcataagaaggatctatatatccgaattcacgtaatccgttagtgggtctataacggagtacatcaataataccgcctgtaccaatattatcacctccagctccttgatcacggcgaaacgtaaatttaggattgatatgcaatgtcaaatttttagttatatcaatagctgtcttgatattcaaattggtacggcgcacacccgaccccataataatacctttatcttcgctttgagtaagagaagcagtgaagcgcatcttatctgtacctccaccaatagttacattagtagaataattgataggattctctcccattacctcatcctgccagtcatgagtaggcaaagaataatacatatccaaatcttgcggattgccaaaattagcacggaaaaatttggcattgctagaacggctaccattacacgccgaccattcatattgataacgtgcaaactctgctgaattcattaaatctaattttttagacaaatgactagtagacaaatgggcattgaaacttacctgtatttttccagctttggccgatttagtagtaacaaccactacaccattaccgcccttagctccatagattgccgtgatagaagcatctttcaatacatcaatagaagcaatgtctgtaggaggaatatcattgatgttatccacctgaaaaccatcgacaatgtaaagaggatcattgctctgggtcacagacgtacctccacgaacacgaatgttaatatctgcccctggagcaccatcgaccgtagttacttgcacaccagctatttttccctgcaaagccacagcggctgaagtaactggtacagcagcaatcttcacaccagacacggaacctactgagccagtcagatctttacgagccctgctactgtaacccagcactactacctcttcaagcgcttgtgaatcatcttgcagcgtaattgtcagttcttttccggtaaccgcatccacttcttgcgtttcgtaacctacaaaagaaataacaattctttttcctttagacacggccaaagtaaactttccgtcaaaatcagttatggttccgttggaaggatttcccttctccacaacggaagctccaataacggcttcacctgccgaatcaagtacagtaccttttacggtaatgctctgagcaaacatcatcaccggtatcagtaacagcactgaaaacagaagaagtctgcttttcactcctcttaattcatttgtaaatttcataataaaatattaagttaaacaaaaatttaaagtctattttttccgtgaatgtgaaataatataaatcactattgttatttatattctattctaaaaggaaacaattacaatttttatgagaataatagatacttattaaaatagcacacgcattcttataatttccgtgtacgcacacaaaacgagtgaaaaatattagatatacaaattcccatgctaaataaagcacataatcaagtacattaacagtaatgttttccattataatttaatgttagtattagaaaattggtttatttttatactatatacgccacaaataaaaataatattgttgactgaacctaatttttgtattgaaaaaaattagttcaaccaataattacaacataatgaacaaaaaagacacattcatcaatgaaaacacggaattacataaaaaagcagtgctatggacttgtcctccataacactgccacctatatttattataactgacaaactcctacagctacaaacctcactcctcctattttatctcatcccacttcggtggattcacctgcatcaaatggcggacaaagaaatcataccgcttatgttcgccaaaagcttcccccattgtatgatgtgctccgggaatcacgaccaattcaaaatctttattcgccttaatcaatgcattgaccacctgcatagtagaggcaggatctacattatcatccaactcacctaccactaacatcaaaggacggctcaacagatgtgcattttccacattagatccttctttatattgatctcctaccggatagcccaaccaaagttcattccaccaaatcttatccatacggttatcatgacaaccacaagctgaataagccgctttatagaaatcaggataaagcaaaactgcatttgtagattcctgaccaccggcagaacaaccgtaaatacctaccctgtccacatccatataaggatatttccgtgcagccgccttcatccaagcaatatggtccggcaaaccggcatctttcaaattcttataacatacattctcaaaagcacgcgaacggaaagaagttcccattccatcgaccattacgacgataaaaccaagttcggccaaggaagtcatattccagtcataaggacggaaagtcttcggaacatactggtctccgggaccttgataaatgtattcaataaccggatatttcttgttcggatcaaagttagtgggccgggcaatcaatccccacatatccgtcttgccgtcccgccctttggcaacaaatacctccggagcgttccaaccttcagcctccaagcgagtgatatcagctgtttccaacggcatcatcactttaccatccctggcactacgtaacacagctacaggagccttattcaccatagaataaacatctaccaaatacttcatatcttccgaaaaccaggcacggtgcatcccttcttcgggagtaagacaggtaagacctttgccatcaaaaccaatgcggtaataacggatgagataggggtcctcaccggcttccataccatttgccgagaaatagatctgacggttatcctcatctacccgaagcacttcgcgtacataccattctcctttagtaatttgataatcgggctgtgcggtaatacggttgtacatataaagatgattccaattgtcacgctcactcatccatatcatctgcttgccgtcttttaagtcatgacggaaatgacgggtataattcacatatttatcgctggtttcttctaccaacggacgcacttttcccgtttcggcagaaagttcaagcactctgtacacctgatgtccgcgctggttatattcaaaagtcacggcacggctgtcgggattccattcgggaccatatacttcatattgtcggtcgaacaattcagtagaaggaataatgcttcgtccgctttccacttcatagatgcagggcactttaaaaggaagttcgtctcccggcttcgcatactcctgtttgtgaagcttgggctgaagctgatcagccggagaagattccacataataaacatagcgcttttccaccggacggatcttgcaggaagccaccttcttactgtccggtgaccagcggatgtaggctgaataataattacccagtgtcccgtccaagctcagttgcttttcttttccggtagccacctcctttacatagatattctgatttttaataaatgctatccatttaccatcaggagacggaaccggcgatgctgtcttctcatcatccacctccatccaatgcttttgcttgggagggagaggaagcgccccttcattgaccagctgatttttccgggatgcatacatccaacgttgattattaaacacaaagtgtagcgtatccaatcccttactgaccgacaaatgccccaatgcaagagcttccggcttgacctcttttccggatgcagcacccagcgcctttgccagacgatgagaatcaaacaattcttttctagcttttttatctgcatctacagatacatacaggcgtccgtccggagtattccgcacataccaaaactgatgagtaccctctatccattgcggattgacattggaatagaaaactttatccgcactgaacttctctttcaatgcataagcacgccgataatcatcagccgtaccttgagcgatagccatgcccccactaaggaacatggctaccagccaacctaacttaccaaccttcattttgaattattctatttcacttcccattcaaacaaacccgatgaattatcggccggctgaacaatctccagttttaccgcttttgtctttaccgggtcaaaattgactgtattccccgtacctttttccactccatacttatccgctccactcaccggttgccactgaccttgtgcatctttatagtacaccttccaactttgcggtatgcggcatcctccccaaggagcatcatcataccaatatacggtagcactggaaacagtcgcttcggacggaaactcgtaggatatccattcggtagttccctgtttgggccaccaatggtaatagggtacggaacggtcattctcatctttcggtaccagacggtcattaatggcggagatggatttcaccttatgcgaagcatccactttgctttccgatgccagcgtagcaggcatagtcggacgggaagcacttaattcctgaggcaaccatacagccatagcacctgcaccgcggtgtgcccaagcatagtaagggatcaacgtcagctttacatcagtagccgtcagacgacctctatcgtcataacccagaatctgtgcatctgttttcaattggttaataccatacagcaaatccggcttttcaaccacctcgaattgaggagtgcggttcataaacacgctcagcacatcaaaatcattatccggccattccgcacaatatacgacaggaccccgttccacggcaacacgtccccggtcagcctccaccttgttattcgccttgaccgtacgcggttccatgtcaaaatgcacttccaccttgtctcccttcttccaacggcggtctatgcagaaataaccgtccttcagttcactctgtaccggttccccatttactttcactgtatagctcaaacgctttccatccgaataagtgtacaggtcactgggaactacctgattacgcacccatcccggaatacggattttcattgtaaactgtccggcattgtttttgttgacaccgatagtgacatcaccgtcccaaggataatgagtggcctgctccaaagaaacagccttaccctctaccttcaagttcgaagtattggacataaacagattcacatacacgtccttgtccttcaccgcataaacatatcccggcaaagaggggataaaacgacagacattggacgggcagcaggcacaaccgaaccaaggctggcgctgatgctggccgatactttccaacggattgggatagaaaaagccgcctccgtccaatgatacgccggaaatcaggccattatacaaagtacgttccagcacatcataatatttggactcgccgtgaagcaggaaaagacgataattgacatacacattgccgatagccgcgcaagtctcgcaataagccgacatattgggcaactcatagtttttgccgaaagcctctccgttgctggtcgccccgatgccgccggtaatataatatttcttgcctacaatattatcccagatacggtcgatggcatgaatataagccgaatccccggtcaatgcggcaacgtctgccataccggcatacatataagcggcacgcacggcatgtcccaccgcctcatcctgttccgttaccggcttatgcgcctggctgtattcatccgtacggctggtatgtccccgctggtcaaggaagaattttgcctgatccaggtatttctgctgccccgttaccagatagagcttggcaagcgccatctcggcaatctgatggccgggcacacggacttgctgtccgggaccggagcctatctcacggcatacgcagtcggcataacggatagcgatatccagaaaattacgcttcccggtcgcctggtaatgagcaatggccccctctaccatgtgtcccagattatagaactcatggctcagttcctccaccttttcccaacgcttgctgcccgcccattcgtgcggatgcttgggattcatggtacggctggtgtaaaggtatccgtccggctcctgtgcggcagcgacgatcaccagcacgctgtcaatgtatttggccagctttttatccggataagtctgcaacaggtaactggccccctctatcgtcttatatacatccgtatcatcaaaagccagcccgcccactttgatggtatcgctgggatgggccgcattgataaaattccggtatcttcccgtctcctcacatttactgaaagccaggggaatggtcacttcacggctggccttgagacgctgcccccagaacgagtcggtcactttcaccgaagtgaaaggcacagggtctataggataaccgtgtgactggtgtttcacttgtgcctgaccgccggttacggcagccgccaataaagtagtaactaaaagttttttcatggttatatcatttaattgttatcgtcatattccgtgcctgttttacggaggtgcaatttacacattccgaacataaaacaggctccgtattccaagcaatccaggtatataaattcaccaaaatcactatttccgtccttgtaacggtatatattcatcccacaacttcaacgagtgcagataccccgtaaaaggccactctccttccgcattccgccccaaggtcacaaactgagacggttttaccaacaactggatgtcttttccactcacctgttctccattgatatagacctgctccatgcgtccgtcaaaacagatgtaaatgtgctgccacctgcccgtcagctccttcatacctttatatcccgcatcctcataccatccgtaatggttgatcaccccgcagcgcggttccgtaccgttcaccagcatgatcttctccagttcgtcatgcaaggttgtaaaatcggctacacactcattctcggctatggaatcattcagcacccacgcctccaatgtatagggagcattgtcctgcaaagtagccggcaaagagaaactggaacggaacaactggctgccgtcaaaatgaaacgcctttttcccttccgtctccttcacgaccacaggagctttcaaggcctcaaaatatcctttcacaccccggttcgtcaaataaggaacggtatcgccgacagcaaaatcatcagcagtaatgctcaccaccaagccacgtttccgacagtcggcagcaggcagacggaccacatccgtagccgcgtcgtaagcccgttccgccggttccagcttccagttataataccgcaaattagtaataaccaacggctcattgccgctgcggagcgaaatcattccctgagagagacaatgctccgtctcataactccgccatttcccggaacggtaaaccagtccgctcagggtatgttccttggacggggaaagtaaagaatggcaatactccaatacagtgcccggctccagcatcaacgcatcgcgtccctctatacggcaagtacgcgccgcaccttccttcaagacaaacgcaccgcccagcattccctcattattccgccactcgcgtccatcccagtcggcagcggtcagtcccagccattgctggggaagcgcctcttcaatccccccgaacaccttcacgttccagacagcccctccaaaaccgtttttctggccgcccgtaaaagtaagacgcacatagcgggcctccgccttgccgaagtcaaccatcggactgcctgccaagtggttgttccgcttatcagcaaaaacagaccaatgcttgccatcgacagaagtctctatcaaatactgataaaactgggttccatattcaaactgggtccagacggtctgtatttcccgggaactccccaaatctatctcaagccattcctgccccataccgcgaggacgccacaaagtcccgttattgtcatctacggcatattcggcgcgaaaattatcatcataacaagaagaagcccttaccccggcgcccaatgccagattctccgatttcaccaccgaaggagccagtgcgcctacccccttgtgggtaggaataaccttcctgatgcttccatccgccgcaaactccatcttatccatgcagagctggcggtgaaagccacggttggagtgcgggttgtcatgccggtggtacactatataatagtcatccccttccttcaagatactgtgatgtcccgggccgtgcaccgtcccgtcctcattcgtttccagaatgcagcccttatattcgtacggtcccagcggatggtccgaagtagcatactgcaccctgtaagtatggtcacggcaagagcccgaggaatacatgaaataatagattccattccgcttcaatacaaaaggagcctcaaaaaagtcaaccgcctccgtattcggtatgagccgcgtttccgtaaaccccttcaggtcgggagtcatttttccagctccgcaaccgaaacctttatagattccccacgttccccaatacaagtacacggaaccgtcatcatctacaaaagtctgtccatccagtgtaatcgcattggtcacgaagcggtcgggaacaagcaccgcctcgctttcacccaggatattcttccagggtcccctgggcgtctcgctcaccccgcaatgaatgatacacggctggcaataaaaataataatacctgccatccgtatgcctgatcacatcaggggcccatatccaatggctgtcgggccagttcatgggcatcagcgtccagtttacaaaatccttgctcgtccacacctgggccggtccgaatcccgcaccgctgccgtccgtagtggcatacatgtaatacgtgtcgccaaacttctttatcgtaggatcggcaaagtatccgggaatcacaggattacccgtccccggcgcgtcatgcttcttgcgggcaaaccccgaaaccgcccccagcaacaaaaaagcggccactaagtatattctgttcatctctatttatgtacaatattattgaccggtatctctatctcataaaaatattcctgtaacaaccggtacatgtccgggtcataagatttcagcttcgcacggcggttcacccagttatgcaccccgttagccggatcggcataacggttacagttaaagaaagactgcacacactccgcaaaatactcttccttgttgctgaccgcatacgtgtctttccacaatcctttccggatggcattctgccgcaaagcctccagccggtcattgaaaccgggttccaccccgacaatgcccaccgtgtgaatcaggtgtgcaaactcatgaatcaagatattctcgcccacatatttgtcttgcggcaatgccagcaggttctcttctccgcaactggacgaaagttcatcctcaggcgccccgccaaaaccgcgcgcccgccagttccaatacttgatactatcttcacaattacaaatatgcgcaaactcaggcaggtcacaagtctcctcatccttgccgatcaccatcacatgacagcccctcttcaccatgtgggcctttacatcgggacgtttggccagcatcaggctgatgatatcacacgccttcagcaaagcctcgtcactgacccgttccgaagaagtgacatacaatccctccgtctcaatgtatttcttgtagaaagaaggaatccccttgccttcgggaaccgcagttacccggccgcgcaacggacaaagttccagcttcatggcaaatcctccccccgaggcaaggtgcagtttcatccggctttcgcggtccacgatccttttctccatacggtagtcttctgcctgtttgtcggcattgatgccgtcaacaaacagcgtagccgtataacggaccccttccggcaggaaagagaaatccagctccacatcccgtctatcccaattggtcatgccacccacataccagttgacatcctttttgcggacagtcacgatatacttgccaagctcaccggaagcgataaaagtagaatccgtctccacaggcagggaagtaatgaaatccacacactcctgttcattcaggtaattggtaggcgcatcacacaacatcgtgaaaggagaatcgtgcacaatataggcagccagttgatgacaccgggttcccatgctggccggagtggaatacatggcacgccaatcggccttcgtagcgttgcgcatcgctcccggagtgtaatccaccggtcccgccatcatgcggatataaggaaaagtgacatcataaagcggcatattgttcttgatatccgtccatttcacctcttccataccgaacacgctttcaaaattaatgatatgcggataggtacggttgatacctgtcggtttgtaaatgccgtgcagatcaagggttaatttataccgagccgtcatctcagcgatgcgatacaccatttcgacggcagtctgatcatcacgatccaggaaatccactttaaaacctttgattcccatatccgcatattttttacaagctgcttccaactggctgtcgagtacattaaacaccgtccaaagcactatttccacccctttggatttgccgtatgctatcagctccggtaaatcaagttcgggaataacggtcagcatatccccacttttcggagcataccatccttcatccaacacaataaattccaatccgttccggctggcgaaatcgatataatatttatacgtatccatgttgataccggctttaaacggcactcctttcaaattccagtcattccaccaatcccatgccactttccctgtctttatccatgaggtatcaccgatacggttaggagaggccaaggcatagaccaggttgttgaccggcatatccgtatccttctccgtaatggccaacacacgccacggataggaacgggagccacggctacgggatataaaatctgtggtttcggttacatattcctgcttccgccaaggataaaagtctgttttatccggataaggagcaaagacacctttcaatccatactttccctgctgtgactgtacaaacatgcccggataagcttccaaatctgactccaacagggtcagttttacgctgccgcaatccacagtaaccggaagaaaagccagtttaggctgtgcttttgacagaggagtgatatcatagacattctgaaaggccatcgccataggttgcttgtcgtttgtggtataaggaagataagccgtataatcctgaggaaagttaaattccgccacttcatccttcacagtcacttctgatgtcacggtggtatagaagcgataggcgaccccgtcattgtaagcccggaaagtcacgccgaatccgccttgcagcttcaagtccagttcgttgcagactgcaacgaactccttgaagcggtagaacggcgattctaccttatcctctatctttttccttctttcccttgttacccgggaagatttacctaccaaggttccgtcggccagaaccaaacctatgttagaatgtgagagaattgtatcattttcatgcataatccggtaagaaagcccatcccccgtactaatctcgactttcagtcctccgtccggagaagagagagtatagttcttaactttagccgccaatggagcatttccaataaataaaagcaatgacaagattgccaaaccaagtgttctgttgtttttcataatctatcggttatatactttgtgcatttgcaaagtaaaataaaaaaagaataaggaaaggaagaaataatataatgtaatggcagaatcgtccaataattaccgtcctgcgacacgaatatccagccggttgtactatttttccatcccgctagactatttttccatcccgtccggaaccggactccccgtcatttctgtccggcacgggcattatacgctccctttcacatgaaatccctccggcatcccttcccttttctcccggcagaccccaaaaaaaggatagtcccttcacccggaactatcctttcaagctcaacacagaatcagtcccccgcgttattcaaccgtataattgatcacgaaacggaaatacttcgaggtatcattcatatccacccagccgacattcattttacccgttgttcctacggcaagcccgtcattgtaacctactccgcaagcttcatcactactgtaatattcaatgtaggcggggcataaccgtccgttccccaactgacagcctcaccacttgtattcatccagtagcccggcgcattggctgtatagttttctcccatatcggtccactctcccgtagacgggtctgccagacagaacttgatgtccgtattatccgccgccttagccaggaactcttctatggacatatcaaacacggtctcgatattttccttgtaatcttcaaccggcagggtcactgtcgcattatcggacgagaaggtaacagaaaccaccgacacggtaggatctgtgaccccgacttcaaaagtaaagcgcacatagtcatcatagtctggtccgtttaccgcaaaacccacattcagcgtaaggaccgtccccgccacaatgcctccttccgtcagttccacattcaatgttttcgccgttttatccagcgtcaccgtagccttgccgtccgcatcgtccgcgctgcacggctgaccgaccgaattgaaataccagcctgcgccgtctttggtataggctgtcttcaaccattggttgcgggtcgtgtttatgggataaaagacagtggccttggtatccagcccagcaacagccgcatccgcactcattcccatcaattcttcaaacttgtccgtatagtccgacaggttcaaaacataagcgtgcttgccgttcacttccaatgccacattggaagtaacctgggcattggtattcgtcttcagatacgggttttcgttttctccgtatatatgtttggatgttgcatcagtataatcatcgctacaacctgtaaaagcaagcagcgagcaacagcaaagtgccaataatatattttttttcatcgtttttctttttatagttaacaaagggttaatatcccggattctgaaccagatttatattaccatccatgatactcttgggtatcgggaaaatgtcacaatgtttgtccgtcggatcggtcttggcatccttgcagaaccatgatttgccattatacacattctgtccgctggtaagacggaaacggatcaaatcctgacggcgatggtgctcggccaggaactcccatcccaggtcgtccagcagaccgcccagctcgatgtcgctgcctccctcggtagtggtcacccaattatccgcctcatcctgctgtgcaatgttctcccggtgtccgtaagaatatacgctgccgcctttcaactgggttaccgtgcgtgtcgccttatcgggattccctttgaacgcacgttgccttacctgagtaaccaggctagcggcatcctgttccgtctcgccgttatatcctcccagacgcaacaggcactcagccttcatcatcaagacatcggcatagcggaagaaaggcacatcatcataactggttccccagtcaccatcctttatctcatactttaccaaccggtatccttccatcggatagcatcccggattgtccgtactgcggatttcatacgtatagttcaaaggctggccgtccacataaatggtgtttccactctggtcttgctggacaccgccgatccagcagtctgtataacgggtgtcattattcttgtcataagtatccaggaactggggcaaggcggctccgcctcctgtggcccaaccggtaaacccgaaagtggcacgcccggcctcgttcatccacaaattggcaaaataattgccgctggcatacagatactcaaacggaatcccgaagataatctcgggagaagaagagatgtcctccttaaagttatcagcataattcggcgccaggctgaatttgttcgattcaatgatcacattcagctcgtcaacgcatttccgatagtaagaatcgtcggaatggtcgtcaaaccaagcattgtgattcaaatacatcttagcaagaatcatgtggacagtatagttatttatctgtcccatctccacctcatcgccacacttgtcctttatgtcgtccagctcagagatgataaaatcccatacttcctgcggttcagcctgttcgggaagccagccgtcgggatgatcataagtggtatccaagggaatattacggaaaaggtcgaacaaaagatagtaatacaacgcacggtaagcacgtagctgggccacagactcctccgattcctgcacggcctcgtccgccaacagcttgttgcacgcatttattcccgaataggcgtttgaccacaacccactgaaatgaccgatttcggaatgaaacgtatgttcatgcagattgatatacaaatcaccccaacctacgcctatccgcaaagggatcacccacatgtccgtacagatatccaggtcagcgtacccgtaccatgcccaatagaaattgcgcaaggaggaatataccggcgcaaacatactggcggcatccttttccgtaaattcatatttctcggacgcgatctggttgtaaatggtttcactcaaatctgtgcagcttcccaaagaaagcatgccggcgcctaccattgagtataataaagacttatataatttcggtttcataatctgataaatttagaaagttaagttaagaccaaaagtaaatgaacgaatggatggatatttgtcgcgattgtctatacctgcataggtaggatacggatttgacaactccggatcaagtccggaataaccggttatgcagaaaagattgtcaccggacaaataggcacggacattcttgatgtatttgttatttttaaacgggaaattataaccgatggtcagattggtcaacttcaggaagttaccattttccaggtaatagcttaccatagtctgcggctgtgaagaagacaaggtgtattgtccgccatagggtgcttcctccaccgatttcaaacggttgtaagcatgagaattattttcgtaataagcacggggttcgttcaggatcttaaatcccaactggctggtgaactgcatgctcagatcccagtttttataagtgaaggtgttgccccatcccaaatacactttcggcaatccgttgcccaaatattggcggtattcatcattggtcaggtaagcagtagagaactcaacgacttccccgtccggcttttcaatcaggaacagtccgttttccgacacgccgacagacttcaagccataaaactcacctagaggacgtccttcctccatacggtgtgtgcttacactgatcggttctcccaagccaccggtatccatataactgtttgactcatacatgtcattagacaagcttaacaatttgctggcattatgagctaccgtcaccacggttttccactcaaagtccttggtctgcacaggaatcgcattgatggctacttcaataccctggttgcgtacagagcctccattggcaaaagtgtaactgtacaaattgggcggagtaggaacgctgtaattaaacaacaggtcggttgtcttcttcctgtatatatcaacagatcctcctaaacggtcattcaagacactaaagtccagacctatattatattccgtagacttttcccatttcaagtccgggttcggattggaagcgacttccagccccggtttccatgttcccttgtcgtaataataggaacttccatagttataccgcgtcaacgacatataaggatcattgggaatcacaccggtaataccgaatcccgcacgcaacttcaagttgttcagccaggtaataccctccataaatccttcattactgatggtccatcccaaagatgcagaagggaaagtaccccatttgttattgtcgccgaacttggacgacccttcctgacgtacactgaccagcaaattatatttattgtcaaacgcatagctcacacgtgcaaagaaaccgatcagcgtattctcgttcttatcactgcccatgccagccttaccgtctttcaacgcctggccgagacctaaattatgccattgatagaaatctgtcgggaaattatagttattggcatagaaacgttcataagtataatactgataactgtagcccaccaacgcattcatacgatgcttgccgacattcaagtcatacttgctggtcagttccaggttgtccgtacgtgtctcgtcctgggtatgataagcataaccggtccattcattcagttggttgctgaaataatccgttgtgttataccctttatcatgtgcattaaagcggctggtagccaccatcagattggtctgccatcctttgaccggttcaaaagtaacattacccgtcgcacgagtctcttcataggtataattacccagacgctcttccagcatgccgaccggattgtagtaataattcacgttaaaatcctcattataagaaccgtcctcgttgtaaatgggagcggtaggattacgcataatcgcctgacggtaaatatttgactgatcggtggccgttgcattggtggcactgttcttatgccatttcttcaccatattcaggttgactttcagcatatcgttaagcatccagtgtgagacatcaaaacgcatacggatatcttcgctgtaagtgttcattatcacaccgtcttccttgcggtaagtcacatccgccgagtaagtggtctgcttgcttcctcccgttatattgaaattatggttgtgagtaaagccggtccggctgacggcatccagccagtcggtatcatatcccttatcggtaaagtttgtcttgcctgcacgtatatcctcggcagtcataaattccagctttttgccgaactgagatgcagagacgtaacctgaataggatgcagtcgtatgcgactcacgtttgccgttctgggtagtgatcaggataaccccgtttgcaccccgcgtaccgtaaatggcagcagccgaagcatccttcaacacatcaatggaggcaatattttcaggagccaccgtgcttaagtctccttccactccatcaatcaggatcaacggcgtagtgctgccgttgacggaaatgacaccgcgcaggcgaatcgtggaagtcgcattcgggtcaccggaccccttggcaatgctcaatccggccaccttacctttaatcaggtccgccgcatccccgatcttacctaccgtaaaatcctctgctttgaccgaagccaccgcactggtcacatcacccttgcgctgggttccataaccaataacgaccacttcgtccatcacctcggtatcttcctgaagggtcacatcaatcttccggttattctttacctcaaactcctgggttttatatccaatgtaggaaattaccaatacagactgggagccttttacattcagcctgtatttcccgtcaaaatcggtaatggtaccgttggtcgttcctttttccatgatattagcaccaatgatgggttctccctttctgtctttcaccacaccgcttactgttacagtttgctgtgtaatttccattttcatagactctgctgttccctgaagtgcaaatacagggctcatccctgcacccgcaataaggaaaaaacaggttgcggcctttagcaatgctttgctgaacaaggcccgattgtcatgtgttttcatcatacagttttatttaaaaggtttatattcttagtttactttccattcaatcacccctcccgaagctcctttctgcaattgtgctgcaattttaagcccctttgttttgacaggaagaagaagaaaataattatacacatatattactgcatgttttattttaagcttggcatgtgaagatgttaatatgagtcacccagtatcgttttatcgtaaacggataaaactaccatggacaacaccccactcccgaacgcaattcttatcttattatctatccatggacgacctgaccagcggattcaacatcggcaccaattacacgctgaatccacaattcaatgaaatgacaggattcacagaaaaagatgtacgggatatgctggagtattactccacaacatgcccattcaatcattcggtagacgagttgatagaactgattgcttttctacttcggaatgctgaccatcagcggaatgcataaaggagaaaccaaactcaccatccccaaccaggtggtacgtgaacaactctttgcctacattctggatacttatcatgaaaacgacttgactttcgacaggtatgaaaagaggaagcttgcctcagggctggcttatgatggcaaatggaaatcttactttgaatacattgccggatgcctgcaccgttatgcctcgcagcaggacaagcagaaaggtgaatattttgttcatggctttactcttgccatgaccgcacaaaatcctttctatcgtcctgtgtccgagaaagacagtcaggaaggatacatcgacctgttcttgcatccgttattggatatttacaaagacatgagccactcctacatcatcgaactgaaatataccaaaggaaaagacagtaatgaacggatagaacaattaaggcgacaagccattgaacaaactgaacgctacgcttcgagcgagtctgtgcagaaagcgataggtcctaccatgctacataaaatcattgttgtatatcgaggtatggaaatggttgtttgtgaagaattgtaaccgataagaggcagtgtctgcccttacaatggaagcattcattcgtccgttctatccacgttttcatcgaaagtacaaaattgttgcttcttgccgcatttgtaattacaaagataagatgccattttttcgatgatttttcgtatcagtttcttctgcatcagcacattaccattccaaattatgcgcagtatcttgctgtaaatcaacaatatactgtgtaaatagattccaagtccccttgaaacggtttgccattctccgctgtcaaattcggcttgacgtatacagcttgttttaattcctgtgccatagctgtggtcgcttccttgcaagagagcatagctgtggcatattttgtctggctgcgttcgttgcttcgcctaggtgaagaggcgaattcactttagtgaacagccattttcactagggtggaatagttgcttcacttaggtggaatatcaaacggaacggagtgaagatacgataggaacaggttcttattacatacgcaacaaggttcaatagccgaaacaaacagtatcctgtcctgtcagatataaactatgatgcccacgagtagccggaaggcagtggggggctgaccctacctcctgtccgctggtattcccgaatgcgagcattcccaaaaacggatttgtttccccaccgacataccaattgagggggatttgagagacttttacaccggaagtgattagtaatgtgcatattactgtgacagagcgcttttgtgctttatgtatatccttatgctaaaacctaaatttgagtaagaataatctatcagaggctttgtttcttcttattacgaatgacagacgtatcacctttatcagttggaatgaatccctaccccattcctactcaggaaagctgccaatgtattcctgctgactttcaatttcctcgccatctccgccttactggttcccgcctccagcatagccttaattttttcttcttttcccgtaagtttatatttcgagttatgtcctcccatgggacgtcccaacttttgtccggaggcgattctgcgtgcaagtccctcacgggtacgttgggaaatcaagtcacgttctatttgtgcggagagggaaaaagcgaatgccaatatttgagattgtatattatttcccagttcatatttctctttcaccgtgagcaggatgacatttttcaacatacatgcattcagtatactcattacttccatcaatcttcttcccaaacgagagatctccgacacaatcaatgtatcccctttctttattcttttcaatagtacgccaagctttctgtctttggctgaccgtgttcctgaaaccgtttcttccacccacacatcaatttggaaatccctctgtttggcaaaacgatttatctcgaaccgctggttctctacagtctgtttatcagttgaaacccgaatatacgcatatatcatagctgcatcattaagttttttattgaataaggaacgccaatctaacttatattatcagagaaggaaagtttcaccggatcttattgaggttttctaagaagaattaagtatctccaactattcaagctcaaaaaacagagaaatctgcttaatccttgcctttacaagataaaacgattgtccaatagaatgaaaaaattgtctatgatgatagtataaatcactgataatcaatattgttatattaaaactggattgatcatctttaagacgattttcgcagtataatagatttttcttttatctacttaatggtttgttcacttactttgcatctgttgacatagttgatactgaaataaaaaacacagatatagtatgaaaaacaaattgcaaatagtatggagcagcattgctataataagcgtatgtgcatgtagtacgccttatacacaacctgatgcccctatcaaagaagttcccttcacccaagttcatttagatgataatttctggacaccgcgcatcgagactaaccgcaccgtttccatcccatccgctttcaaagaatgtgaaaagaacggccggttcgataactttgccattgcgggtggtttgatgaaaggcgaacatcgcggtgacttttctttcgacgataccgatccctataaaattatagaaggagcttcctactcgttagccgtaaaatatgatgagaaactggatcactacctggacagtgtaatccatatcatagctgccgcacaggaaccggatggttatcttactacctgtgtaaccaatcaatgtacccgtttatccggttggtggggcacgcaccgttgggaaaaaatcaacagtcacgaactctataatagcggccatttgtacgaagccgccgttgctcattatcgcgccaccggaaaacgtacgttactggatgtagctatcaaaaatgccgatctggtatgtcaggtcttcggacccggcgaagggcagatccatcgtcccagcggtcatcctatcgccgagatggctcttgtcaaactatataaggtgacaggcgatgagaaatatttgcagacggccaagtattttgtagaagaaaccggcagaggaacagacggacataaactgagcgaatacagtcaggatcacaagcccatcctgcaacaagacgagatagtaggtcatgccgtccgtgccggatatctctactccggagtggcagatgtagccgctttgactcatgatacagcctatttcaatgccttaacccgtatttgggaaaatatggccggcaaaaaactctttatcacaggcggaatcggttcccgcccacaaggtgaaggattcggtccgaactatgaactgaataatcacacagcctattgcgaaacctgcgcctctatagccaatgtgtattggaatcatcgtatgtttctcgctacgggagatgccaaatatgcggatgtgctggaacgcgcgttgtataacggggtcatttcgggcgtatcactcagcggtgacaagttcttctatgacaatccgttggaatccatggggcagcatgagcgccaacactggttcggatgtgcctgctgtccgggcaacataacccgtttcatggcttcagtaccttattatatgtatgccactcaaggcaa

SEQ ID NO: 14435 - DNA, 21849 bp, Unknown
  gut microbiota DNA sequence
aaaagtgtataccaacccatgcgctatatccagcagggaatacttaccaacaaagaagaccgaaaaaaattccgccatattccacgcttcgttcctgccggacaaagtacgcagatgattgtcggtgccacaaccgaatcagacaaagacatcctttatctttcttcttcactctaccaacaccccaccatgaggcgcgtctactactctggatatatatccgtaaatacatacgacaaacggcttccggcactgaaacagccgccattggtacgtgagaaccgtttgtatcaagccgactggctgttacgtttctatcaatttaaagtagaagaaatagtcgatgactcctatcctgatctagatttggaaatcgaccccaaattaggttgggcattacggcatccagaacaatttcctatagatataaaccaggcagattacgaaatgattctcagagtaccgggtatcggaatcaaatcggcaagacaaatcatcgcgtcacgccgcttctcaaaactgggattctatgaactgaaaaaaataggtgtagtgatgaaaaaagcgcaatacttcataacctgcaacgaactccccacccggactgttaatgaactaactccgacaggagtacgcagactgttagtacccaaacccaaaaagaaagtggacgaacgccaattaatactaaactttactgataacaaatgattctgtttatctatgaccatacatttgaaggcttgctgacttgcattttcgatgcttacttccgcaaaacctttcctgacttgctcttgatggaaggcgagccgctacccttgttttacaatgaagccatacacatagccactgatgaagagaaagccggacgcgtgtggcgcggattacagaaaaaaatctccaagcatgcccttttcagcttgacctgctgctggttatcagaattaccaaaggtggacgaaatgcttttccactatatccagaaggccataaactctcctcattctattgagaccaactttgccgatcctgatgtgctggagcttgcgaaaatctataaaagagtagatggagaacgagtacacctcatgcagttcgtccgtttccaaaaagcagcggacggaactttctttgcagccgtaaaacctcaattcaacgcactgccactggctgtggatcatttcaaagaccgttttgccgaccagcgttggctcatttatgatgtgaagcgacaatatgggtattactataatctaacagagatggaagaagtaacatttgaagatccccgccaagcacatctggtcacaggaatgctaaatgaaacattgatggacaacaatgagagattatttcaggaactttggaaaacatatttcaagtccatttgtatcaaagaacgttggaatccccaaaaacaccggcaagatatgcctgtcaggtattggaaatatctgacggagaaacaataaacagttcttccggatatcccacatctactaaaaacaaggcatgtcccggcacagaactaccggcactacaacgatctttattctctatcaccttcctgaacccatctaaagtcattttaccacgccccacttccaccagcgtacctaccacagcccttaccatattccgtaaaaaacggtcggctttaatagtaaatacccattctgttccactcacccgcgtccattcagcatacataatccggcaattattcgtcttcacatcagtatgcaatttactgaaactggtaaaatcagtataatcaaacaatacacgggcagcctcattcattttctcaaaatccaatgaattaaaaagcctccaggcataatgacggttaaacggatctttccggatagtcacataatacttataagtacgataagtcgcgtcaaaacgggcatgcgcatcatccttcacccgcttcacatcgtaaaccgctatatcggaaggaagcaagcgattcaatttctccgttatctgaacacaatccaactcctggtcataatcaaaatgcgcgaccatgagacgtgcatgcacgccggcatcagtacgtcctgctcccactacctctatttcttgacggagaaaagtagaaaaagcacgcattaatgtttcctgtacactgtcaccattgggctgaatctgccaaccgtgataatttgtcccatcataagccaaatatatgaaataccgcatcgtaaagcctctaaccaagtgaaaattcaataattcagcgggctgttatatgaaaacatccctgtttcaactcatatttgatatagcatttgtccgacttccgaagatcacggagtacctcggccaataccaacttcagcgtatccggactaacatcctgcataggacgtccatccggatcttccaccttacaaaaccgacggtaactgacatcgaaagttgtcccaaaagcatgagctgaattagcagaagcatttccattgcgacgacgaagacgtttcacatcatctgccgtacgaagtacagaagtaacaatgatttgattaggattcaatcctttgcaactcaatgaatccaaaaaattggctcctattgtatccaataacgcactagcttgcggaatcagaaaaggaatggagtgagtcagcgaatccatagcataacgctcacaaggttttatctggaccaatttaccacccaatccctctgcttccgaacgagaagccaacgggcgaattcctattttcttcgctacactgagatgagtatcattcaaatcaccgaaactacgtttatagctaattacaccttttatattatgaggctcattcatcttcatggacatatctttttccttgcaaccggaagaaactgtcaaggaaaacaaaagtgacaatagcgtgcaacatgcacctttcatacaattcataatctaactatcttttcaaattcctcgcaaagatagattaaaatcctttttctgaaaaagcttatgcaaataaattgcccggaaaataagaacaatgaaaacctttcattaaatttgcaccctataaacaagtacgtaaagtacctaaactagttaaatgatagaaaaacatatagttttagaggatattgatcctgttatattttatggcgtaaacaacgtcaatatgaaaatgatacaagctttgtatcccaaattaaaaattgtggcacgtggaaatgtcatcaaagtattgggagacgaagaggaaatgtgtgcttttgaagagaatatattggctttggaaaagcattgcgcccagtataattcactgaaagaagaagtgattttagatatagtaaaaggtcgttcaccccaaatagagaaaacaggggatactattgtattcagtgtaacaggaaaaccgatcgtcccccgtagtgagaaccaattgaggctggtacaagaatatgagaagaacgatatgctgttcgctatcggtcccgcaggttcaggaaagacctataccgctattgcccttgctgtccgttctctgaaaaacaaagaaatcaaaaaaattattttgagccgtccagctgtagaggcaggagaaaaactcggatttttacccggtgatatgaaagataagattgacccttatctacaaccactatatgacgcattacaagatatgattcccgccgccaagctaaaagaatatatggaactgaatgtgattcaaattgccccattagcatttatgcgcggacgcaccttgaatgacgctgtagtgatattggacgaggctcaaaataccaccacccagcaaattaaaatgttcctcactcgtatggggatgaacaccaaaatgattgtaacaggtgacatgacacagatagacttaccatcttcacaaacttcgggattgatacaagcactaaaaattctgaaaggcgtgaaaggaatcagtttcatcgaactcaacaagaaggacattgtacggcacaaactggttacccgcattgtggaagcatacgagaagtttgaagaaaaacagaaaacccttcattcatgccattctgaacgaagtgaaaaatctgaaaacataaaacgaatttattgattttaattataaataaagacatgagtaaagcattaacaagaacagactttaactttccgggacagaaaagtgtgtaccacggcaaagtgcgtgatgtatacaacatcaatgacgaaaagttagtaatggtagctaccgaccgtatctccgcattcgacgtagttctgcctgaaggtattccctacaaaggacaaatgctgaaccagattgcagccaaatttctggatgcaactactgacatctgccccaactggaaaatggcgaccccagatcctatggttaccgtaggagttatgtgtcaaggttttcctgtggaaatgattgtccgtggttacctgtgcggtagcgcatggcgtgcttacaaaaacggcgttcgcgaaatctgtggtgtacaacttcccgaaggaatgaaagaaaaccagaaatttcccgaaccaatcattactccaaccactaaagccgaaatgggcctgcatgacgaagacatctctaaggaagaaattctgaaacaaggtctggctactcccgaagaatacgaaatattggaaaaatatacattggctctgttcaaacgcggtactgaaatcgctgcagaacgcggactgatcctggtagataccaaatacgaattcggtaaacacaacggcactatttacctgatggatgagatccacactccggattcaagccgttacttctatttggaaggttatgaagaacgctttgcaaaaggcgaacctcaaaaacaactttctaaagaattcgtacgcgaatggttgatggaaaatggtttccaaggcaaagaaggacaacaagttcccgaaatgactccggaaatcgtaaattctatcagcgaacgctacatggaactgttcgagcacatcaccggcgaaaaatttgtgaaagcagacactgaaaacatcgccgcacgtatagaaaagaacgtaaccgaatacttgaaataaataaaaatgaaaaattaaagattaaaagacaagtacaggaatccaaaaatcctccaccctctccttttaatctttaattttcaattttaattaaacatgaactacccacaagaaaaaatcaagccctacaacgctgacgaaaagaaaagcgtccaagtagagaaaatgttcgacaacattgcccctgcttacgaccagttgaatcatgccctttcatggaatattgacaaaagctggcgccgcaaagccattaactggctgaaaccttttcacccgcaatacataatggatgtagccaccggaacgggcgattttgccattcaagcctgtcagacacttcacccccaagagctgataggtaccgatatatccgaaggcatgatgaatgtgggacgtgaaaaagtaaaagccgccggactggacagccgtatctcctttgctaaagaagactgtacagcacttacctttcccgacaaacgctttgacgctattaccgtagcattcggtgtacgcaatttcgaggaccttgacaaaggactccgcgaaatgcaccgcgtactgaaagacaacggaaaactagtcattttggaactctctgaacccgactggtttcccatgaaacagctatatgctgtctattctaaaatagtcatccccactttgggcaagctactctctaaagaccgtagtgcctacacttacctgccgcaatccatcaaagcctttccacaaggcgaaataatgacagacattatccgtaaagccggattcaatcaggtgagtttcaaacggttgacgctaggtatctgtacgctttatttagcaacgaaataatttaaagtatagagttttatgaaaaaatatggtttgataggttatccgttaggacactcgttctcaaagaactttttcaatgaaaagtttcattcggaaaacattgatgccgaatatgtaaactttgaaatcccatccatcaaagaactgccttctgtgttattggctaatcctgatttagtagggttcaatgtcactataccttataaagaacaagtcatctcttatttggacgaactggataaagatgcggcagccatcggagccgtcaatgtaatcaaaattgtccgccaaaaaggtaagaccaagctaataggctataattccgatgtgattggtttcactcaatctatcgaccccttgttggaaccccagcacaaaaaagctctgattctaggaacaggaggtgcctcgaaagcaattgcctacggactgaaaaaattaggtttggaatgcaaattcgtatcacgaaacctgcgtgaagaaatgctgacttacgatcagctcactcccgaaatcatggatgagtataaagtaattgttaactgcactcctgtaggtatgtatccccgtgccgatgaatatcccaatattccataccaatatctcacacccaaccatttgctttatgatttgttatataatcctgacactactctttttatgaaaaagggggcagacaaaggggcaattaccaaaaacggtttagaaatgctcttattgcaagcctttggtgcatgggatatatggaacaaataataaggtatgaaaagaaaaaaaatgattattggaacgagttgtatattcgttctgcttattatagccctacttggagccagtcaatatatgctggactattccttacgccctaaaaacaggggaaagaatttagaaagttcctggcaatatatgtttaagacttactcctatctaaaaccatggatagatagtctgaaacagaaccaagcactgaaagatacctttatctattctcccgaccacgtaaaactgcatgcttactatgtggcttccagccgcccgacagccaaaaccgcagttatagtacacgggtatacagacaatgccatccgcatgatgatgataggttatctatacaataaaaaattggatttcaacatcctcctacctgatttgcgcaatactggtctgagcggtggaaatgccatacaaatgggatggttagaccgcaaagatgtaacacaatggatggaggttgccaatcgaatttacggtgacagtaccagcatggtagtacatggaatctcgatgggtgcagccaccactatgatggtttcaggcgaaccgcaacccgactatgtgaaatgttttgtcgaggactgcggatataccagcgtatgggatcaattttccaaagaattgaaagaacaattcggcttgcctcaattcccgttaatgtacactgccgactggttatgccagctggaatatggatggggattcaaagaagcatccgcattgaaacaggtagcccgatgccatctgcccatgttctttatccatggtgataaagatgactacgtacccacatggatggtgtaccaattgtatgaggcaaaacctcagcccaaagcattatggatagttccggaagcagaccatgcacactcctatctgttcaataccgaagaatatacccaaaaagtaaaagcatttgtagacaaatacatccaatgagaaaattgacatttttacttacttttttcatgctccttggctccgtccaccttcaagccaaagaatatgccataaaagacataccgatggtacatttgcaaaaccgtacccgctacgtcagcaatcccgacggtatcctttcatcaaccgctgtcaccactatggacagcatcctctacgctttagagcaaaaaacaggtatacaaacattagtggtagcggtaacaggcatagagggaggtgattgttttgatttcgcccaccggctgggacaggaaacgggcgtaggacaaaaagaacgtgacaatgggctggtcatcttgctttccaccgacgagcggtgtgtgcagttcgctactggatatggtcttgaagggatattgccggatgccatctgcaaacggattcagaaccgctatatgctgccctatttcaaggacaataactggaacgcaggaatggtagcaggaatacgggccgtaaacggctatctggacggttccatggaaaatataaacaatgacgaaagcgaagatgatcctttggaattcatcatcatcttttttgtgattttcggaggatttattggcatcggattatatgcaaactggcgtaaaacacgctgcccccattgcaaaaaacacaaattgcaacgtctttcttccaaagttatagaccgaagtaacggaacaaagactgaagaagtagtatataaatgcagaaattgcggacatatcctcagacggaaagaacggtcgagagatgagaattacaaaggtccccgaggaggaggtccgttcataggcggaatgggaggaggattttttggtggccacggtggaagtggcggcggatttagcggaggaagtttcggaggtggaagctttggaggcggaggagccggaagccgtttttaagaacaagaatattcataattttaatagtatatacatatgaaaaagtcaacgattattgtaatagtagtcattgtattaattgccatttggggaataacctcttataatggtatggtaaaaatggatgaatctgtcagcacagcgtggagcaatgtagaaaaccaataccaacgccgttctgatttaatccccaacttggtaaatacagtaaagggatacgcctcacacgaaaaagaaacttttcaagctgtagtagacgcccgtagcaaagccactcaaatgcagatcagcgccgatgacctgactcccgaaaaaatgcaggcctatcaaaaggcacaaggcgaagtaggtagtgcgttgagccgcctgctcgctatcaccgaagcttatcccgacttgaaagccaatgagaacttcaaagagttgcaagcacaactggaaggtacagaaaaccgaatcagtgtagaacgcaaaagattcaatgacacagcacgcgcatataacacagctatccgcacttttccccgcaatttgcttgcaggtatgttcggatttgacaaacgcccatattttgaatctgaagaaggagctgataaagcacctaaagtagaattctaacttttacaagtccctgtttccaatcttaagaaacagctttcgggtacggattgtagaaaccatgcagtttttttatgccaaactgtaaaaatcatacaatccgtaccctatttttatccatctcactaatttttcaacaacaatcaagcatattatccctaaaatcattatctttacggaaagaaacttttaaaactacaagcaatatgttcaattcatttggtaatattttccggttaaccagtttcggtgaatcccatggaccgggagtaggcggcgtcattgacggcttccctgccggtattaaggttgatatggatttcgttcagcaggaactgaaccgccgccgtcccggacagtcattacttaccaccagccgcaaggagcctgatacagtggaattcctttcaggtatattcgaaggcaagtccaccggttgccccatcggatttgtggtatggaacaagaaccaacattcaaacgactacgagaatatcaagaatctgttccgcccttcacacgcagattatacttatatgcaaaaatacggaatccgtgattaccgtggcgggggacgttcatcagcacgagaaaccatttcgcgcgtagtagcaggagctttagccaaattagcattgaaacaactaggaatcagtgtcacagcttatacctcacaagtaggatctgtcaaacttgataaagattacaaaagctataacctcgaattgatagaaacaaacgatgtgcgttgtcccgatccggggaaagccaaggaaatggcagagcttatctggaaaatcaaaggagaaggcgatacaataggtggtgtagtgagttgcgtcatcaaaggatgccctatcggattaggccaacccgtattcgggaagttacatgccgcactaggaaatgccatgttaagtatcaatgccgtaaaaggtttctcttatggacaaggttttgactccatggaactaaaaggcagcgagcagaatgatgtattttataataataatggaagagtagaaacaaaaagtaattattccggaggaatacaaggaggcatcagcaacggacaagacatttacttccgtgtggcattcaaacctgttgccacaattctgatggagcaacatactgtaaatatcaacggcacagacacgaccatgaaagccaaaggacgtcatgacgcctgcgtgctgccgcgtgccgtccccattgtagaagccatggctgccatgaccattttggattattatctgatagacaggactacacaactataagaatcattcaattatggaaataaaacaatacattaaagaaaatgaagcgcgcttcatggaggaacttttcagcctcatccgcattcccagcatcagtgctttacccgaacataaagacgatatgctggcctgtgccttacgttggaaagaacttttgttggcagccggagcagatgaagccatagtaatgccctcacaaggcaatccattggtatttgcacaaaagcatgtaagcaatgatgctcctaccctattgatttatgcccactatgacgtaatgcctgccgagccgttgggcctttggaaaagccaaccttttgaacctgaaattcgcgacggacacatttgggcacgtggcgctgacgatgataaaggacaagctatgatccaagtaaaagcattcgaatacgtagtaaaaaacggactgctgaaacacaatgtgaaatttattttcgaaggtgaagaagaaataggttctcccagtctgaataccttcatcaaggaacataaggaattgctgaaagccgatgtaattctagtttcggataccagtatgctaggcgcggaccttccctctctgactacaggtttacgaggtctggcttattgggaaatagaagtgaccggtccgaaccgtgaccttcattccggacacttcggcggggcggtagctaatcctatcaataccctgtgcagtatgttagcccaagtcattggcgaagacggacacatcactatcccccatttttatgacgatgtagagaaagtaccggctgccgaacgtgagatgattgcacaaattcctttcgatgaaaaaaaatatatggaagccattggcgtaaaagcactgaaaggtgaaaaaggatattccactttagaacgtaatagctgccgtccctcttttgatatttgtggtatctggggcggatatacaggtgaaggttcaaaaaccgtacttccctcaaaagcatatgccaaggtatcgtgccgactggttccacatcaaaaccacgcagttatttcccaattgtttgtggactatatccagtctatcgctccggaatatgtacaagtaaaagtaaccccgatgcacgggggcgaaggatatgtatgccccatcaccttgcccgcctatcaggctgccgaaaaaggctttgctaaagcattcgggaaaaaaccacttgccgtacgccgtggaggaagtattcctattatcagtgattttgaacaaatcttaggtataaagaccgttctcatgggattcgggttggaaagtgatgccatccattcgcctaatgaaaacttctctctggatatattccgtaaaggaattgaagctgtggtagaattccatctcaattattaatcaataataaaaatgaatgcggcaacaatctttaaaactctgacaactgttactctttcaataacattactaatgacaggaggttgtaacaatatggaaacaaaaaaagaagaaacaggaaaaaacacggctatagaaaatatctttgcccgaaagagcgtccgtgcctatacatcccaaccgatagaaaaagagaaagtggacttattagtaaaagctgctatggctgcaccgacagcagtaaacaagcagccttgggctttcgtggtagtggatgaccgtacagtattagataaactagccgccgaactgccttatgccaagatgacggcacaggctccactagccatcgtggtttgtggtgatttaagcaaagctctgaacggagaaaaagaccggtactggatgctagattgctccgccgcatccgaaaatttgttactggcagcagagtcaatggggttgggagcggtatggactgcggtctatccggagaacgaccgcattgcaaaggtaaggtcagtcttatctttaccagaccatatcattcctttcaatttgatcccagtgggttatccacaacatcgggaagaatctaaagataaattcaagaccgaaaatatccattataataaatggtaaacaaaggtctagaaatataaattaagtcggctggtttaatataaatcagccgacaatctctttccattcattcatagttaattttcctcaatctctagcagcctcatcaagtttctttttggtcttttctatcttgtttttagctttatccaaagtttccccaacctcatcagctttatcctcaatctgatccttggcatcatccatcacgtcttcaaccgattctttggctttttctatacgctcctcaaatttatcctttcctttcttttcaccacaagatgtaacagcaaacatcgtcatgcacactaacactgcaaataattgtcttttcatactttttctatttgattataaacttgattttaaactatgttcaaatataagcatataccctatttcttacaaattcaatctgttctttgctatatataaagtctaaatccgacaggaaaaagaacttatcccatcaaaaaagccaccatagcaaggtggctttcaatatattaataaaacattctatattacctgtcaaaaactactttgtagcaggagctgttttagcaggagccgtctttatattaataagaatactattttcaactccttctttggttacatatactattctgtatgcctttaccccttcttcttttagagaaagagaagcacttttaagagtcgattcgggatattttttagctatggcatctttaacagattgaggaacctctttcaggtctatgtttttaaatccgtcttccacagtaactgtatcattctttactttcatggtatcatcagccatgacaaaagttcctacaccaaaaaggaatacaagtgataaaaatatctttttcataatggttaaatttaaatgtttacctaccgacagatatcataaaagacaagaaaaatatacatcatattcagtcattttcctccattagaatatcttcgttaagtaagaatactaaattaagaaaactatattgagaactaaattattaagaaaagaagtacataccaaatatataaactaaagtttgtggaaataaacattctttaatccacaccagcttatgctttcacagccctatctattccaactttcctagccattaagtaaaaaagcttctgtagagatagttgtacaaacgtttggcataatgccgcaaaatacgtacttttgcgactcatttataaaatactatttgaatgaaagcactaaaagaacgcattttacgggacggaaaatgtttcgaaggaggaatactgaaagtagacaatttcatcaatcaccaaatggatcctatcctcatgaaatccattgctgtagaatttgtacgccgttttgcctctaccaatatcaataaagttatgaccatcgaagccagtggtatagctcccgccatcatggtaggctacttactggaacttcctgttgtcttcgccaagaaaaagaaacccgtcacaatggaaaatatgctcaccaccagtgtatattcatttactaaagaccgttcttatgatgtatgcatcagcaaagatttcctgtccaaaggagaccgtgttctttttattgacgactttctcgccaacggcaatgcagccaaggggatcatcgatttggtagaaaaagccggggccgaactatccggaatgggattcatcatcgaaaaagcattccaacatggcggagattatttgcgtaatgcaggtatccgcgtagagtcattggccatcattgaaagtctggacaattgtgaaatcaaaataagataatcccatgcaggaatctcaaaccgcccaatccaataccggactgatttacggattgaacgaccgccctcctgtacgagaggccatttttgccgccatacagcatttgcttgctatttttgtagccatcattactccgcctcttatcatcgctggagcattaaaactggatttggaaacgaccagtttcctagtatccatgtctctctttgcctcaggtatttctacctttatccaatgtaaacggataggaggtatcggcaccagccttttatgtatccaaggaactagtttttcatttattggtcctatcatctcggcaggtatgctgggcggacttccactgattttcggcacttgcatcgtggcatcatctgtagagatggtcatcagccgcatcttaaaatatacccgtaaaataatcacccctctggtatcaggtattgtagtcactttgattggaatgagcctgataaaagtaggtatcacagcttgtggcggaggtgtctccgcccaaagcaacggcactttcggaagttttgagaatctaggtctagctctactggtactcattctcattatcctttttaatagaagttccaaccgctacctacgcatgagttccatcgttatcggcttgattataggatatttagttgcctggggcctcggtagaattgatttctcggtagtacaaagttttggtggtttcaatattcccctcccattcaaatacggactggatttcgacttctccgcattcatagctttgggattagtatttttgataacagccatagaagcctatggagacattactgccaattctctgatatcaggagaacctgtagaaggaaaagtattcatcaaacgtgcttcaggaggaattttggcagacggattcaattcgatgctggcaggtattctcaattcttttccaaactccgttttcgcgcaaaataacggcatgatacaactgacaggagtagccagccgatatgtaggctattacattgcaggtttccttattttattaggattatttcccagtctaggattaattttctccctaatgcccgaacctgtattgggaggcgctactttactgatgttcggaacagtggcttcagcaggcattcgtattatcgcagcacaaaagattaaccggaaagcaacattagtcatcgcacttagtttcgctttaggtttaagtgtagaaatggttcctgaaatactatgtcaatttccagaatcaataaagaatattttctcatccggcattacaacaggtggagttactgccatcatttcaaatgcactgatacggatgaaagagtaaaaacaagtaattttctcataaattggaactaaagcattaactttctttgcaaatcagcaaaggaagggagaataatatatatctttgctccaaaatatgattatgactacagaggatttacagaacctatatcaaacctacctcggagaagtacccgaagagattgtagaattaccctcatccggttccaacaggcgttatttccggctgaccggaactaaaaaactgattggcgtatacggcacctccaaagaagaaaatgaagcctttctttatatggcagcacacttccgcaagaaaggtcttcctgttccagaagtatacatctgttctgaagacaagaattgttatctgcaagaagatttaggagatatccttttattcaacgctattgaaaaagggcgggcgaccagcgtcttctccgaagaggagaaagaaatgctgcgcaagaccatccgcttactgccttctatccaatttgccggagcagacggctttgatttttcacactgttatccccaagccgaattcaaccaacgttctatcctttgggacttgaactattttaaatactgctttttgaaagctaccgggctggagttccaagaagacaagctggaagatgactttcaaaaaatgagtgatgtactgctacgcagttcttccgccacttttatgtatcgggatttccaaagcagaaacgtgatgataaaggatggagcaccctggttcattgatttccagggaggacgtaaaggaccgtttttctatgatgtagcctctttcttatggcaggctaaagctaaatttcccgaaactctgcgcaatgaactgttggaagaatatatagacgccctatgtaaatataaacccgtagaccgtgattatttcttcaaccaactgcgtcatttcgtgctcttccgcaccttgcaagtattgggagcttacggtttccgtggctatttcgaaaagaagccacattttatccaaagtgtaccatacgccattgagaacctgaggcaattacttcataatgaatatcccgagtatccctatttatgctccgtactaagggaacttaccgaactgaagcagttcaaggatgatttgaagaaacggcaactcacagtgaaagtcatgagtttcgcctataagaaaggtattcccgatgatcctacaggcaacggtggagggtatgtcttcgattgccgcgccgtaaataatcccggaaaatacgaacgttataaacctttcaccgggctggatgagccggtcattcgctttctggaagaagacggtgaaatattcccatttctggatgctgcttattctttagtagacgcttcggtaaaacgatatatggaacgcggattcagtaacttatctatatgttttggctgcacaggaggacaacatcgttctgtttattcggcacaacacatggcagaacacctcaataaaaaattcggtataaaagtagagttaatacaccgagaacagaatatagaacaaacatttgaaagaacattatgaaagcaatgatttttgcagccggactaggcagccgacttaaacctttaacagacacccggcctaaagcattaataacggtgggtggaaaaaccatgttagagcacatcatcttaaaactgaaagcagcaggatttgatgaaatagtaatcaatgtacaccacttttccaatcagattctcgcttttctggaagctaaccagaacttcggaatcgatatacaaatctcggacgagacagactgtctgcttgatacgggcggcggtttggaaagagcatactacttattacatcatcctgaggatatgtttaccaaagaaggcgaaactccgtatgaactgatattcgaaaatctgatgaaaggaatggatgaggaagaaataatcgaaagaggcttaggaattatgcggaaagaatgctacttgctccacaatgtagatatcctttccaattgcgattttgaaagtcttatgtattatcatcagaatagttctaacatcaatgccacccttttagtcagcccacgcaagacctcccgttatctgttgtttaatgacgacaatctgttacgtggctgggtcaataaagacaccatggaaaccaaaccggcaggactccggtataaagaaggggaatatcgggaatacgcctatagcgggatacaagtgactactcctaaaattttaaatctccttcccagaggaaaatattccattatcgatttctatctctccatatgtcacagagtcgacatccagtgctatgtagaagatgatttgcaattgcttgatatcggtaaaccggaaaatctggaaaaagcggaagagtttctcagtaaattataaccagtccaagaaatatatccaataaaacagcttcttattctttcggataaaatgggcagataaaaaaagtcgtaactttatgaagtgccccccaaaagttttgtgtctaacttttgggggacacttcattatgaccaaaggttcaatttatttttttgagcttcctccaaagataccgtttttacctgtttggtactgtttttcagacgaagttcctcatattctttgttcagcctttccacaaactcaaaagaagattccggattcagcaaacgggcggctaccaaggcattctgtgaagcatctttcatgtgaatgaccggacctccataaacaggtgctattttcaaggcagtatgcagcttggaagtagtggctcctccaatcataatgggaatgtccagccccgcacgctttaactctacagccacatgcgccatttcttccaatgatggagtaatcagcccgcttaatcctattatatccaccttttcctctatagccttcctgactatcatttcggcaggaaccatcacgccaaggtctataatttcatagttattacaagccatgaccactgatacgatattcttcccaatatcatgcacatccccttttacggtagccatcaatacctttccagcgctgcgggcaccttcttgtttatcagcctcaataagaggttgcaaaatagctactgcctttttcatggtacgagcagtcttcacaacttgcggtaagaacattttccctgctccaaacagctctcctaccctattcataccttccatcaacggaccttcaataatatccaccgccttaggatatagtttcaccgcttccgccaaatcttcttccaagtgatcaccaacaccttttatcaaggcatactgaagacgtttctctaccatcggttcctcacgccacacatcctgctttacggcttctgttccggtcgccgtatttttcaacgcctcagcagtttctatcaaacgttcggcagcatcgggcctgcggtttaagactacatcctctatccgttccagcacatcagcaggaatatctgtataaagcaccgaagtagcaggatttacaatacccatatccataccttgacgaatagcatgataaaggaatacagcatgcattgcctcacggatataattatttccacggaaagagaacgacagattgctcacaccaccactgatatgtgctccgggtaaattcttctttatccatccggtggcattgataaagtctaccgcataattattatgctcttcaataccagtagccacagccagtacattgggatcgaaaatgatatcatgaggattaaagcctacctgctccgtcaatattttataagcacgggcacatacttcaattttacgttcaaaagtatctgcctgtcctttctcatcaaaagccatcaccacagtggcagctcccaatttctttatcagacgggcatgttctataaatttctcctccccttccttcaaagaaatagaattgacaatagattttccttgcagacatttcagtccggcctcaatgacttcccacttggaagagtcaatcatgatgggtacacgggctatatcaggctcggacatgaccagattcaagaaagtagtcatctcctcccgggcatccagcaaaccgtcatccatattcacatcaatcaccaaagcaccgtcttccacctgcttgcgggcgatacttagcgcttcctcatctttcttttcattgattaaacggaggaatttacgggatccggccacattgcaacgttcacctacattaataaaattcatttcgggagtctgctccaacagttccaacccggaaagccacagcctctcaggagtggtggcagggatatgaggaggcacccaggcagaaccggaaatgatcaattcctgatattttgcaatatattcctccgttgtaccacaacaaccaccgataatgtttactaatccttcatcgatatattccttcacttctgaagccatttcctccggagtctggtcatactgtcccaaactgttgggaagtccggcattgggataagcacttatataataaggtgcgcgtgcggccagcccttccaaaaaaggtttcaattgtttcgctccgaatgaacagttcagaccgatagaaaaaataggcgcatgctgtacggatgccagaaaagcatccaatgtttgccccgaaagagtacgtcctgcaatatccgaaacagtaacagaaagcataagaggaacctcacgccctaccttcttcattgccgtttccgcagcataaatggccgctttggcattcagggaatcgaaaatggtttctatcagaagcgcatccactcctccttccagcaaagcttccatttgttcctgataggcagcggccagttcatcgtatgtcaaagcacgcaaggccggattattgacatccggactcatggaacaagttttgttggtaggacctaccgaacctgctacaaatctaggtttatgaggggtcttcgcggtatattcggcagccatttcgcgagcaagtccggcagcggccagattaatctcacggcacaaatcctgcatatgataatctgccatcgaaacccgttgggcattgaacgtatttgtttcaataatatcagcccctgcttccagatatttatggtggatatcctttatcacatcagggcgggtaagacaaagcaagtcattattgcccttcatctgtccgggcatctcagcaaaacgctctccccggaaatcctgttcagacaaattatacctttgtatcatagttcccattgcaccatcaagaatgagaactctctcgtcaattagttgttttaatgtagccataagtctatttttggggtacggataacacggatttcacttaccttttaaacatacggtccatttcgcgacggtcgtccttctctttcaatgactcgcgcttatcatattgtttcttacctttagccaatgcgataaccagcttcgccagtcctttctcattaataaacagacggacagggacaatcgtaaaaccggggttctttccggcttcttccaatttccgcagttctttcttattcaacaacaatttacgttcgcgacgggcagaatggttattgtatgagccgtaaaagtattcggctatgtgcatattcttcacccacaactcgccttgcacaaaataacaataggtatctaccagactggctttgcccaaacggatggactttatctcggttcccgtgagcacgatacctgccgtgtacgtatcgataaattcataatcgaacgatgcacgcttattctttatattaataggagtcggtttcattaatttaaaataacagataactcattaaacacagcggcaatcaatgccggacaaacaattataataactgaagcaatcaaggtgtatcgtgtcagtttcgtctcattcaccttcatcagggtacgcgccccctcgaacaccacgaatatagtataaaattgcaatatccaatggagaatggaaatagagaacaacccactgacaatatcgagcacaaaagtcactaccatagaataacctacaaactgctgatttagttcatactggtcttcacgtcctaacagtttcttgcccaactggtctatggcgtatgccgccaaaaaatatcctccgaacaaggatacaaatatagcacaacatcgtgtcattgctatctggaaagcagcgacccctgccgtattcccaatgaatgtacctataaaaacggacaatccgcataaacctatcatgggataaacaaatgctcccagcactttacgcctatcctcttccttgccaatttcctcccatgcttttgccggagatgaaatcagcgatattactcgcttaaataaa

SEQ ID NO: 14436 - DNA, 96144 bp, Unknown
  gut microbiota DNA sequence
gtttgtgaaggatctattccaaaataaaaaaagcacaggaaaagaaaaattccgctgagaatacatatgcgtttatttacttgtattccttctacatgattgaccaaattacagaattcattgatagccaatgcgctgataatggcaaataggataccgaaagaaacagccccacccactatgcagcctatcagtactgcaacgaaaataattccggttatggcacgttgtaagaaattgcttttcacggtcgttagtcttaagtgattcaaaaatcaaaatagaagatctgttgtttaatcattctgagtgataatgaagaacccgtatctggattactacagactctttatatcattcagaatgacatgattatgattgacagatctttctacaatgttatgcttcttttttttctttttccttttcctcagaatctgaagatttcttctcttcaaaatcttcggttacttctactggttttactgtagcttctaaagccataatttcttctgaacgtgaggtccagggacgtttgccaaaaatgcgttccacgtcttcggcgaaaattacttctttttcaaccaacagacgggccagctcgttgtgaccatctttatgttcggacaatattgcctttgcccgatcatattgttcgttgatcattcttttcacttcttcgtcaatcagttcggctgtacgttcgctgtaaggcttgctgaaagagtattcatcgttgctgtaataacataagttgggtaacttttcactcattccggcgtaagcaatcattccatatgattgttttgtcacacgttccaaatcgttcatggcaccggttgaaatatgtccggtgaacagctcttcggctgcacgtccccctaaagtggcacacatttcatccagcatttgttctttggttgtgatctgccgttcttcgggcaaataccatgcggctcccaatgcgcgtccacggggaacaatggttaccttaatcaaaggattggcatgttccaaaaaccaagacagcgtagcgtgaccggcttcgtgtaaagcaatagtacgcttttcttcggcagtcatgattttggttttcttttccaaaccaccgataatacggtctacagcatctagaaaatcttgtttcccaaccgcattcttaccatggcgggcggcgatcagtgctgcttcattacatacattggcaatatctgccccactgaatcccggagtttgacgggcgagcaaatccagatcgacactttcatccagctttaagggcttcaaatgtactccaaatacttctttacgttcgtttaagtcgggtaagtcaacatgaatctggcggtcaaaacgaccagcacgcaataatgctttatccaatatatccgcacggttggtagcggccaaaatgatcacaccgctatttgaaccaaaaccatccatttctgtcaataattggtttaatgtattttcgcgttcatcatttccacccatgcttggatttttgccacgggcacgtcctactgcgtcaatttcatcaatgaatataatacaaggagctttctctttcgcctggcggaacaagtcacgtacacgggatgcacctactccaacgaacatttccacaaagtcggaacccgaaagcgaaaagaaaggtacatctgcttcaccggcaacagcttttgccagcaaagtcttaccggttcccggagggcctaccagtaaagcgcctttaggtatcttacctcccaactccgtgtatttctgaggttgtttcagaaactctacaatttcttccacttcttgtttagcttccgcttgtccggctacatctttaaaagtaatccggttagtcttgtctcctttttcgtatacctgagctttgcttttgcctacgttgaacggattggcgcctccggcccctgctccgccgctcatgcgacgcatggcaaacatccagataccgatcaatagtaaaaacggagcgatattccaaaataatgcgccgaagtagtcgcgtttcttttcataactgatagatccggtaaagtgaccttcttcctgtgccttttccatgaatttatccaatgactccatggaacctatttctacgttcaatgctgggttacgccctacttttttatagtcatttttaaatacatctttaacaaattccggtttaatgtacatttctaccgtattgtcatcgtatgcaattattttattggcatatcccttgtttatcatatctttaaactcggtatatgttatttgtttgtcaattcctccttcttgattggaaaaatagaggatggcaaaactcatggcaatgataacatacagccaactcaaattgaagcgtggcatgtttatctttggtctattattggtattttcactcattttgattctgtattggattagtctagatcaggaatttgggtcagtttggcatctgcccataaatgttccagattataaaaatttcttgtttccggcaaaaagacatgtaccagtacatcgctgtagtccattgcaacccattctgcgtttctcagtccgtctattcccgtaggcttgtcatctatttctttatgtacatattccttgactgagtcaacgatagctataacttgacttggggaattaccttgacagattacgaaatagctgcaaatggtatcatcaatggcggtgaggtccgctattacaatgtttttacctttcttttcttgaatgccttctgttattttttttactaaagtctctgcttcgttcattataatgttattaacaactgattattctaatatatgtatttacaacaatgcacaaagatacttggttttctcattctagcgaaaaaatgtgcattaaatatattcggtttttgttttttttagttagagaatctttttattgttatgttaagcctagagtgaagatacacggtcaagaaggataaggaaggctggaaaagaaagcaaatggagaaaaaagaatcttgattagaaaaaaaagcttcaaaaatttgtggattaaataaaaaaacgtatctttgcagcgtcaaaatcaaaacgggtgttttgataggaaaattgggatatggtgtaatggtaacacaacagattctggtcctgtttttccaggttcgaatcctggtatcccaacacataaaccacttattaaagacaaagttcttctaaaattgcaattttagaagaacttttttcattttgggctagctatcttaaaaatagaccaatcaaaattggtgtcaactctctatttttccgtaagactcatgaaaaaagcggggcagtccgaaaacaatgcaacgccaatccgggagtaattcggggttttgctttctctcaattgttctatttgtcttttttagtaggccatgaaaacacgcaggatgaaaaaggtgcaaaaaatcagtagtacgttagtaaaaaaagagtctaacgcatttgcattaaactctttttataactgtttttattcgtctttcattgattggtcaatcacctctattttttttaagatcaattctaggtctgccttgagtttttccactttacgattcatttccgtaaccaaactgctaccttttttggaagaactggtcaagaagcccaaattgttctcgtatgtttgaatttcattcttcatgttttcgtaagcacgaaccagtttttcgcgttcacgataaaggttgccttccttactgatgcttgatttaaagttacttaattttttctgtgatgcggaaagattcaacttgtcaaacaacttatcaatgacaccatgatattgcttgtataatttatctttctctttaaacggtacatgaccgatgctattccattctttcattaattctcgaatggtgtttccggcatcttcttccggtgtttcctgtgcgtcaattgtatttaacttttcaatgatcgcctttttctgaaccatgttttcctgttcaactgagcgttgtgaagaagtcgccttgttcttttgctcgaagaaataatcacatgcggcaatgaatcgtttccatacggcatccgaatactttttaggtacaggaccaattgttttccattccttttgtaatttgcttagaatatcagcagttgctttccagtctgtactttcttttagtgcttctgctttttcacataatgctttcttcttttccagattgcctgccatactttccttgatggacttgaagaactcggctttgcgtttgaaaaattcatcacaagcggcacggaaacgttcgaatatcttcacgttcattttttgaggtgcgtaaccaattgttttccatttggcttgcaaagcaatgatttcctgagttttgttttcccagtcttggaaggtagtgaacgtatcgtattccattgcttccacaatttcacagattacggtcttttcatccaagttacgttgctctttttcttttaaggcttcgaaatgttgctggtgacgacggtttacggctgtagaggcggttttgaaccgggtccagatatcttcgcgcaattcttttgcaacaggacccgtattccggaattcctgatgtaacttttgtaattgatggaaagcggaaatcacatcttcttcatcagccaatttctctgcggcttcacaaagatgagtctttatttcaaggttttttttaaaatcatactcacggaattcgttgttcaactttatcaagtcatagaacttttctgcatagtgctgataatttttccatagttcattgactttggcagccggcacctgttttatatcgttccattcctgttgcagtttcttgaattcattgtatgctttgttggcatcttcgggagattcggcaagttctttcaagcggtcgataatggcgagctttttcaccaggttatcttctttttctttatcttgttctgcttgtatggcgcttcttttctctttgatagagctcatgatatctttgaaacggttttcagcatcgtccggttggggaataaatgcctcaggagcacctccgccatcaataaatgccttacgggcggcttcttgctcagccttgtgcagcttgtagaagttctgtttcaataaatccaactcttgtttgtctgcattgcaggcgtcttcgttgatttcttttaaacgttcgatgacctcttctttcgtttgtttaggtacatacgtagcgttattttcttctgcagtagcggaagatgataccaaagtttcagatgtctgttccactggaacttcggttaaagggcggatagtttcattcgagtccatcgtatagatttttaaagtaagcgtttttgttataacaacaatttacaaattaaaagaaataaattagaacttcatactgtttttcccgatttttttaggaaaatccttaaaagtggagaaaataggagaatcaagggggataaatgcactgcagattacatagattcatacagattctcttttattgtgattctttgccggtttctgtgtgaatctgttttttctctgaatttcaatctatgtaatctgtagtgaaacgtgtcaggatagtaatacggtgatgcccatataaagcatcatacctataatgtcattggtgatggatatgaacggacctgtagcgatggccggatctatttttagtttttccagtgtcataggaaccagggtcccaaagatggaagcgaacatgactactgcaaacaggctgaatgaaaccgaataagtcacggtggcacttgccccgaaacggatgaaattatagatatataccagcatagaaataatagtagcattgattacggccactacagattcctttactatttgtttccaggtgttttgggcatccagcgagctgtttgccagtccttgtacgataagtgccgaggactgtgttcctacgttaccgcctgttccgccgataagggggatatagagggccatttcgggatgtgcggcaaaagtactgtcaaagttgcccagaatcatggagttgcctattccgcctatcatgccgatgagcagccagggcagacgggctgtagtctggcggaatacattatcgtctgtttccacgtcttgtgacaaacctgatgccagctggtagtcgcgttcagcctgttcacgtacttcgtccatcacatcgtctaccgtaatccgtcctaccaggcgtccgatactgtccactaccggaacggcgaccaggtcatatttttcaatggtttgtaccacttcgtctataggggtatctacatggacggatatcggttctttcctcatcacgtgcttcactttggatacggaagggctggtgatcattttcttcaacgggaacacaccgcgcagccgctggtcatcgtctactacatatacataatagatttcgtccatatcttccgcctggatgcgcatttccttcagacattcgggcatactccagttttcgtttacgattaccatttcggtacccatcaatccaccggcagtgtcttcgtcatatttcaacaaatcgacaatgtctccggcttgttctatgtcttcaatgtgtgagaggacttcttcttgtttgtcctcgtccatttcacggataatgtccacggcatcatccgaatccatgtagtcaacgaaccgtttggcgattgtttcagagggaaggatttccaggaattccttacgggcgtcttcgtccatttcgataaggacgtcggcggcagtctcattgtccagtaacaggtatatgaaccgtgcttcttccgcatccagttcattgcacagctctgctatgtcggcaggatgtagaccggcaagcaagtccttaagttgctctgagtctttttgctcgatcagctgctctactttttctaattcctctttattcatcctactcttccgttaatataataaataggtgttattctttcttgtttgttcctttccgggcgatatcgttactgtaaactatatccgttttatttttcagtgccgcttccactctgttagtcagttcgataaattctgatacagacaactgttccgggcgtttgttgaaaatcaggtctgcgctcaatggattctctttgtctaaaatggaagaaatagaatttctcaaagttttacgccgttggttgaatgttgtttttacaatgagcttgaacaatttttcattgcatcccagttccgtcgtttcattgcgtgtcatacggatgaccgcacttttcaccttgggaggcggattgaatacatgttcgtgtacggtgaacaggtattctactttgtaccaggcttgtatcaggatactgagaatgccgtatgtcttgcttccgggaccggcggcaatgcgttcggccacttctttttggatcattccggtacaacagggtatcaggtctttgtaatccagcattttaaagaatatctggctggatatattataagggtagttgccggtcagaacaaaaggtttcccgtcaaataatttttcgaggttcagtttcaaaaagtcgtcttcaatgatattatcttccaaggcaggaaagttctcacggagataggttacagattcatagtccagttccaccacttttaccgcacggtttttctgcataataaactgggttagtacccccatccccggtcctacttccaaaattggcaagtcagggcacacatctactgtatcggctatatcttttgcaatactgagatctttcaagaagtgttgtcctagaaatttttttggctttactaatcccattccgttatttttctatcgtttataaataggtttatttcgctaagatagtatctttgcatcgtgcaaaggtaaacattctaaattaatatacacagattttggaacgaactcgattaaaaaagattataaataaaggtttgcagattgcatttccgttatttttgggggctgcaatactgatatggatgtatcacggattcaatttttcccgggtatgggaggtcttggatggaggaatgaattattggtggatgttagtgtcattagtgtttggcgtgtttagtcatatttttcgtggctggcggtggaagcttacgctggctccgttgggcgagtatcccaaaacatccgattgtgtgtatgccatctttgtgtcttatgccgccaacttggttgttccccgtgtaggtgagatttcccgttgcggggtgttggctaaatatgatggtacatctttttccaaatcgctgggtacggtggttgcggaacggttgattgatacgctgtgtgtgtcgttgattacaggggtaactcttataatgcaggcaagagtgttcgatactttttttaaagaaaccggcacggataccacggttttggcacaggtctttacttcggggcatttctatattactatcatctgtgtgttggctgtattggtactggccttttttctgatcaggaatgtgacggtctttgccaaagtgaaaggcattctccataatgtgtgggtgggtgtgctgtctttgcgtcatgtaaagcggatgcctctgttcattctttataccgttggcatttggacttgctatttcctgcaattctatgtttccttcttttgtttcgatttttctgatgatttaggtgtgatggcaggattggtgatgtttgccgtaggtagcattgcggtagtggttccgactcctaatggggcgggtccgtggcattttgctgtcataacgatgatgatgctctatggagtaggaaaagaagatgcgggaatttttgccttattagtgcatggaatacaaacttttttattaattttgttgggtatatatggattagcggctttgccgttcacaaataaaactaagaagttatgagtacaattctctctctcgctccgcagaatgtgtggaagcatttctattcattgactcaggttccccgtccttcgggctacttgaagaaggttcaagagttcttgctgaactttggaaaaagtgtaggcgtagagtcattccaggatgaagccggtaatatcatttatcgcaagcctgccactccggggatggaaaaccgcaagaaggtgattcttcaggcacacatggacatggttcctcagaagaataacgatacagtgcatgattttgaaaatgatcctatcgaaacttacattgacggagattgggtgaaagctaaaggcacgactttgggagctgatgatggtatgggtgttgccgctatcatggctatcatggaagataaaacgctgaaacatggtccgttggaggcactgattactgccgacgaggaaacaggtatgtttggtgcgttcggcttaaagccgggaacggtagacggtgatattctgttgaatctggattcggaagaagaaggagaattgtatatcggttgtgcaggcggagaagacctgacagctgtgttggaatataaagaagtggaaacagatccggctgacatcgctttgaaagttaccttgaaagggctgcgcggtggtcattccggattggaaatcaatgaaggacgtgccaatgctaacaagctgatggctcgtttcatgaatcaggtgataacttacgatgaggcttgcctggtttcctggcaaggtggcaatatgcgtaacgcgattcctcgtgaatgtgaagtcgttattacagtgccggctgatgaagaagcggacgtactggactatgtgaaggagtgcgaagaattgtggaatgaagagtatcatgtacacgaaactccgatcagcttcaaggcagaacgtgtggaattgccgaagatgatggttcccgatgaaatcaaagataatctggtggatgccatttatgcttgtcaaaatggggtaatgcgtatgattcctactatccccgatactgtagaaacctcttctaatctggctattgtttctataggcggtggtaaggcggagattaagatattggcccgtagctcgcgtgactcgatgaaggattatctgaatactgcattggaaagctgtttctctatggcaggcatggaagtgacccgttcaggtggttattcaggctgggagcccaatgtggattctcctattctgaaagcgatgaaggagtcttatcaggcacaattcggtaaagaacctgctgtgaaagtgattcatgccggtttggaatgcggtatcatcggtgcggtagttcccggcttggatatgatttctttcggccctaccttgcgttctcctcactcaccggatgaacgctgctttattccttctgtaggtaagttctatgatttcgtagtagctacgttggaaaatacgccggtaaaagaatagtctttaagatcttataaagatttcgggcgcggatgatagggatttcgtccgcgcctttctattaattaatattccactttgtcacttttctctgcccattgttggaatgcctttattgcctcttccgccaaaagaatttcggagggcagcttgcgtgccgaaggtttcaggcttaactcatcatagataaaagagtcatcaaaacctatattcttggcatccgtcttgttgtttgcataatacattttatccagtcgtgcccagtaaatggctcccaggcacatgggacacggctcacacgaagtataaatttcacacccactcaggttgaatgttcccagtttggttgccgccgcacggatggcgctgacttccgcatgggcggtagggtcgcattgagaagtgacgcgattgactccggtcgcaatgatttcaccatctttggcaattacagctccaaagggtccgccaccgtttgccacgttctctatagaaagctcaatggctttccgcattaattcttctttcttcatagtggttctatttctttttgtacagagcaaatatacaatatttccggctatatactgcgggagtgggcttattttattcggaagttgccgcttcatgtgtacacttgtcggtttctgctaccattgaggtgattatcagtgcctccggggacattgccctgttttttgtttcagaagcttcagcctctccgcaaaagcccgtcaatagggcgaagcggctaaaggattgcctttggaaatttcttcagcccgattatggaagcttcagtttttggctgttcgggatgtgtctctgtgtaagttcattttttttagtgcttttatgcctgttggaaatgatgttactattaggaagagtttgctttgtgccgtaatggctttattgcttcaccttagtgaagcagccgtttcacacaggtgacaacggattttcaccagagtgggatggcgtgtttacctaggtgatggacggaaaatacaaacttatcctgatgaaagagaatatgtttccggttgtgtcagtttgcttatttaggggtgcgatacggtgacaagtgcctggatataggacttttgaagcattggggaaccagtctgtgcggagtatgcatactcccaaagggtgcggctgaaggatttttcttcgggctgaagcattttctggtgtaattcttcagccggaatgcccactggcaaagggtttgcggagaggctgaagcttttgaaggaattttcctttccttttttcttgtatcacaaatttgctgaatactcctggttttccgtaatgcgtcggcctgggctaatactttgcaccctttcgggtatattatacgaaagaaactaataaattatacccattagggtgtaattatcgctggttttgctatatttgtaccctaaagggtgtaattatgagtgattcattgtcattgtttgtaaaagaaatgcgtaagcggttcggacttacgcaagtagatttggcagctaaggcgggagtgggacttcgctttgtgcgcgagttggagcaaggaaagcagactttacggatagacaaggtaaaccaggtgcttgccctcttcgggcatgaagtaggggctgtgcctgcaggaaaggagcatagcgtatgagaaggggtaaaatatacctgaatgatatctatgcggggacgctgacggaagacgaaaatggtttcacctttgtctatgatgccgggttcttgcgttccgacaaggcggaagccgtcagtctgacactgccactgacggacaaaccctatcacgacaccgtcttgttcccgttctttgacggcctgatacccgaaggatggttgctgaacattgccgaaaacagttggaagataaaccggcgcgaccgtatgtcgctgttgctggcctgttgcaaggattgtatcggggcagtaagtgtagtagaggatgaacctgataaaccggaaacatgatggaaaggtgtttgtattgttataaggaactgaaggaaggacaggtggactatcatccggcttgtgcccggaaacttttcggtactcgtcaggcgcctcaattgccttacgtgcggagtgaaataggtgaactggccaaacaggtagtgagggcacagactacgctgacgggcgtgcaggccaaattgtcgctcgatgtgaatcccggcggaaagaacgagccggaccgttttaccatcgtgggcttgtggggaaagttcattttgaagccccagactgatttttaccgggcattacctgagctggaggatttgaccatgcacatggcggaagcagccaaaatagcggtggttccccacgggttggtgcgttttgccgatggcgaattgggatacatcacccggcgcatagaccgtcgcccggatggtggaaagattgccatggaggacatgtgccagttgacggaacgtctcaccgaatacaaatataagggctcgtatgagcagatagccaagactatcaagaagtattctgcagtgccgcagcttgatttggtgaatttctgggaagtggtggtgttctcgtggattgtgggaaactcggatatgcacttgaagaacttttcattgtatgacacggggatgggctatagtctgacgcctgcatacgatttgctgtccacggttattgtcatgcccgaggatacggaggaactggcattgactcttaatgggaaaaaaaggaaaatatggagaagcgatttcgagaagtcgataatcgcatcgggggtcagtggcaaggtaatagagaacatcgcccggaaattccgacgttccatcattaaatggatggaactgatagatgtttccttcctgcccgaagacatgaagaaaccctataaaagactggtgttgcaacgtctgctttggctgcgctgaaagatctttccttttctgttttagttattttaattaaaacgtatgcagtctttaaacatctatttcgtttctttgttacagaagacttagtatgaactaaaagattgtagatatgaaaattcgttatttatctttgatagtgttactggtaatgagcgtatttgctcctatacaggcacaaacctatgacaatttgtggaaagaactggaggtgttggaacgaaaggatctgccccaatcggtcatttccaaagcaatgaaaatctacgataaagcaaaagtggaacagaatgtaccgcaaatgatgaaagcctatctcactgccatgcagtaccgttcccttttaactcccgatagcttgaaggtagatatgaatggtttggaacaatgggcttcccaaaccggcagtgtggaagacaaagctatattgtattccattctgggtgaaatggccatgtctgccgacgtaaaaaagggattgggctatttgcaggcctctctcaaggataaagaccggttattgcttgtcccggtcgagaaattgagatctatggtgagagtgggagaggctagtaaacggtattttcgtgataatctgtacaacttgttggcacgtcgtgccatacaaatcatgcagcagtacaggtggcaggcggctgctaaagcaaatcagacaaacagtctgcctgcggatatgacggatatggataagtttgttacttatcagtttgttcctgtctctgattgtgacttgacagcagctgtcatgcaggcttatcagtccttgctgaaagcatatgatacggaaacggagcgcgagggttggttgctgaccgctgtggatgcattgaattacctgtaccgcaatttttccggaaacttctcgaatgacgtatgccaacaggaactccggaagtggattcatacttatccggctgtgaaaacagtccctgaagcttatctggctttggcacaattcctacagtatcaaaataatcaggtagagcgcttgcggatagttcgtgaaggaatagccggatacccccgttacgaaggtatcaaccaactgaagaatatagaaaaggaaattctgaatgcaagcctttcactggaaatagctacggcttatcctggtgaacagcagtcggtgaaagtaaattataaaaaccttaccggcatcactttgcagttatataaggtgaatttacccgttacctctgccgtattgcagaacagaaccacccattttgaaagtaaatatgcccgtttgcaacgcgaggagcatttttctttgaaacctactacagattatttgaatatcgataccaccctgaccatacaggctcctcaagcgggaatttatttcttaaaggcagtgcccgatgggaagaagggcgtttcggacggaacattaatgaatgtcaccgctttaaagaccatttatcgtcctctgccggatggtacgttggaactggtggtggtagatgcagtgagcggacagcctgtttctgaggcggaagtaaccatttatacggagaagggaggaggctattctcctcaacagacctatcaggcggataaacagggtactttgaaactggatttcctgaatagtaacaaatactggtataatgcacatacggcgactgataatgcgatgcccatcttgaatctttggaaaaacgattattactataaagagagcaagaaaaaagaagttttgcaattatttaccgaccgatccatttaccgtcccggtcaaaccgtatatgtatccggcttggcttatgaaatggaaaaggattctacgcgtgtgcttgcggataaaaaatatacggtatccctatatgatgcgaataataatgaaacaggaaaagtagaagtatggacgaatggttttggttcgttcagcggacaatttgttttgccctctccttgcctgaccggttattttagcttgcgtgcggccgatacttctgtcagttttaaggtagaagaatataaacgtcccacctttgatgtcacgtttgaacccgtgaaagtggagtatcaagtgggtgactctatagaagtggcgggtatggcaaagacttttgccggtgcgcctgtgcagaatgccagggtacactataatatatcccgttcctatgcttggttctggcggtttatgggcagaggttcagcccgttgggagggagaggcaatgaccgatgcggatggtaagttcaccgttccggtgcattttgaaatagactcggacaggagagaatctccgttgtggtattatacgtacaacatacaggcggatgtgacggatggtgcaggtgagacacagcaagctaatttgtcattgcctttaggaagcacttcaatggtgctgaatatggataatctgcccgataatttggttaaagaaaagaagttggaaataaaactgacagccatgaatctttcgggtgagccggtagatactctggttacttatcaggtagtcgagatggagaagcagaaagacggtcaggaaaaagaaggcagaaaggtattgaccggtacggtggaagctaacaagagttttattcctgaggctatttatgccctgccttccggtaattatcgtttgaagctttcggctaaggatacacaaggcagagagtgtacggcatctaagaatttccttttgttctcattgaacgacaagcgtccgcctttcgtgataacggattggttctatcaggatggtctggaatttgatgcagcatctccagctactatatatataggtagcagcgaaaagaatgtctatctgctttatgatgtgtttgcaggcaataagcgcttggaaagcaaacgtatacagctttcggactcggtaatcagttttcgcttcccttataagaaggaatatggtgacggcattctggtaagtatggcatttgtgaaagacggcagactttacagtcataatgcacggattatgaaaccggcccctgagaagaagttgcagctgaaatggactacgttccgtgacaaactccgtccgggacagcaagaggaatggaaactgacggtactttatccggatggacgtccggctgaggctgaaatgctggctaccatgtatgatgcttctctggataaaatctatagtgcacataagctggactttggagtggactttcattgtgtggttcctttgacttattggaatacatcctatatgcggaatgcttatttgtatgttgatttcccgttgaagaggttccgtgcggttcctttggaatatagtgaattgatcattccatctacaggaagaatggaggctgtggtggtaggttacggaggcggcagtcctcgtgccactcttacaggagctttgaagattagaggcaggagtgccgcaaatgctgtgatgaaccaggaggctgttactgatatggtgctccaggaagaaatggtagagacgtctgcacaggaaaaggcagaaatgggtagttctgaagaactggcagaaacaggtgatatacagatacgtgaaaactttgcggaaacggcattcttttatccacagctccgcaccaatgaaacaggtgaagtcagtatttcctttgtattgcccgagagccttacccgatggaagtttatgggcttggcacatacccagaatgtggattatggaaaaatagaagctaccgctactgccagcaaggagtttatgcttcaacctaatatgccccgttttgtccgcgtgggagataaagcgaatattgccgcttcactgatgaatctgtcggacaagggggtgaaagggactgtccgcatggaattgtttaatccggaaacagaaaaggtattctattcacaaaaacagaagttcgatatgaagggaggagaaaccgggcatgtgaactttgcttttgaagtgagtgacaaatatgcggtaatggcatgccggatggtagcggatggagataccttcagtgatggagaacagcgttacatccccgttctgacagacaaacagtgggtgacggaaaccgtttctctgaacgtgaatggggaaggtgcgcatactttctctttggaaaacctgtttaacaagcatagcaaaacggcttctgaacaacggttgaccgtagaatttactgcccatccggcttggtatgccgtgcaggctttgcctgtagtggctcatcctcagaatgaagatgctctttcctgggctaccgcttattatgcccattcattggctgcatatatagtcaaagaaaatccccgtatcaagcaagtctttgatagctggaaggctcaaggtggcacgaaggagacttttatgagcaatctgcaaaagaatcaggaactgaaaaatatcctgctggctgaaactccctggctgacagaagctaccaatgaagccgaacaaaaacagcgtatcgccactttgtttgacctgaatacaatgaatagccaactggctgtttctgtagagaaactgggagaattgcaaaatgccgatggcgcatggagttggtataaaggtatgcaaggcagccgctatgtaaccactcaggtaatggaaatgcttgtccggctgaatgcattgactcctcaggatgctgacagccggatgcagcctatgattcaaaaagggttcgagtatttaggcaagcaggctgccgaagagtataagtctatgaaagaagctgaaaagaaaggggctgtcggtatccgtccgtcagaacaggttctcaggtatttgtatatctgcgctttggatggcaaggctccggttgatgaaaaggtgaaccggtatttcatagacaagttgtccggtgagggaaaagaactgacgatttatggaaaggcgttgggagctatcatcttgcagcaagccggtaaggtggcagaggccaagttgtttatgcagtcattgatggagtattttgttgtgacggatgaaatggggcgttactttgatactcctaaagcccgatattcatggttcagttataaaattccgactgaagtggctgctatggaagctatacagcgtataacaaaagatacgaaagctattgatgaaatgaaacgctggctgttgaagcagaaacagacacagacttgggaaacgccgatagctacggctgatgcggtgtatgtattgatggctacaggaacttcggatttattggcaaatacaggaggagtagagattactttaggtaaagaagtgatccggacttcggcagatgatgccatcggttatatcaagaagacgatgtccggtgatgtgatgaatatcaagaaaataagggtggataaagaaggagccggaatgggttggggagccgtttatgcccaatatctggaaagtatggatcaaattagcgggcagggaaacggattgtctgtcagccgtcaattatataaaggggatgaggctttgaatgaatcagctccgttaaaggttggcgataagattaccgttcgcctgactgtaaaggctgaccgtgatatggattttgttcagatcaaggatgaccgtgcagcttgtatggaaccgttacaggcagtttcgggattttgttggagcaacgggctgggatattatcaggctaccaaagatgcttcgacccagttctttatcgatcagatgagaaaaggaacttatgtgatagagtatcaggtgtatgtgaaccggacaggagaatatcaggttggaattgcaactgttcagtctgcttatgctccggaattcggagggcatacgggaggatatcgggtgatggtggaatagagaaacaggatgtctggaattagttgtgtgatttcataaaaagtaagttagcttgctaacttactttttttcttatgcttctgccgtccacccattctaatcttatttcaaaaccatcttcagccgtgccataaaaatagcggcctgaaacggatggatattcaattataaatgtataaccatctgaataatatagatataaccaaccgttttgaatttcccagtcaaacttatataccctataaagttcatcatcatagtaacagcgttcttccgtacctacaccatgatccgggaaagcacctgaggtgaatgtaatataactgtaaagccgttctccgtatgggtcctcaaatcccatttcgccccaccaagtcttaccgtataatcctgaaatatcaaatcctctttcttcatcgctttcacatgaagaaaaacttatcattgtaatcaatgcaatggcaatgaaccagtaatgttttactattttcataatttatctgatttttaatgcgggacaaagataaaggttattcataagataaaataaattataggctgaaaaaatgggtaaaggatgttttttgtctatctttgctatctaaaaagcataaaataattgtatgaaacatattatactgatagtaagtttgttaatgggagtgactttgggagtacaggcacaacccaaagcattatttgataagacaacgcatgaatttggaactattttatggaaaaatccggtgacggctacctttaaaatcactaataaaggagataaacctttagtgatatctaatgtgacaacttcttgtggctgcacggttgctgattggaccaaagaaccgattgccccgggaaagaccgggagtgtcagttctacttttgacgccaaagccatcggacgttttcagaagagcgtaggcatttattgcaatgcctccaataaacctatctatctggctattcggggagaagtgactgccgatcctaaaaactatactttcactcatccttttcagattggagctatccgtttgaataaggaggaaatagaatttgaagatgctaataaaggggataaaccaactatggaactgttggttgccaatacgtcagataggttatacacccctgtgttgatgcatttgcctccttacctcagtgctgttgccattccggaaaaactgggaagaggacgtacaggtaaaatcaagataactcttgatacggaaaagttacctaaactgggtttgacaacggcgtctgtttatctttcccgtttcctgggagataaggtgggagaagaaaatgaaattccggtttctgccgtattgttgccggatttctcacatatcagtcagcaggaacgcttgaatccgcctgccattcatctttctgccgaagagttgcagatgggagaactggaaagtgatgaaaagaaagcacatacgattattattaaaaatgtaggaaaatctaatctggaaattcgtgatttgcaggtgttcaattctgctttgggggtccagttgaagaaacgtgtcttgaaaccgggtgcgtctaccaagttgaagattactgctttcggtcaaaatttgaagaaagtaaagggtactccgcgtgtcctgatgataaccaatgatcctaacaatccgaagataattattaaagtaaaagtaacctcaaaaaaatagctatggaacatcctgaaaatagtgaagaatataagggattgacagtgaacaaaggtattgagcaaccatctattgtgaatccttatttgaaactacgtaaaaaacctcgtcgtcgtgagttttccgtaggtgaatatgcagaaggcatcgtaaaaggtgatgtgaccgtattgagtcaggcggttactttagtggagagtgtaaaaccggaacatcaggctattgcccaggaagtgatagagaagtgtctgccttattccggaaattctatgcgaatcggtatcagtggtgtgcccggtgccggcaagagtacatctattgatgtatttggattgcatgtgcttgagaagggaggaaaattagctgttttagctattgatcccagtagtgagcgttctaaaggcagtattttgggagataagacccgcatggagaaactatctgtccatccgaagtcttttatacggcctagtccgtcagcaggttcgttgggaggagtagctcgtaagactcgtgaaacgatcatactttgtgaggcggcgggctttgataagatttttgttgaaacggttggagtagggcagagcgaaacagcagtgcattctatggtggatttctttttgctgatccaactggccggtactggtgatgaattgcaggggattaagagaggtatcatggaaatggcggatggaatcgttatcaataaagctgacggcagcaatattgagaaagcaaaactggctgccagtcatttccgtaatgctttacatttgtttcctgctcctgattcgggctggagtcctaaagtaatgacgtattccggcttttatggtattggaattaaagaaatctgggatatgatctatgaatacttcgcttttgtgaaagcgaatgggtattttgaatatcgcagaaatgaacaggctaagtattggatgtatgagtctatcaacgagcatttgcgtgatagtttctataataatgaaaagataatttctatgttggctgcaaaagaggaagaggtgctgaatggcaaactgacttcgtttgttgctgccaaaaagttattggatgcttatttctcaaccttgaaataaggttttcctactactacaggtaacataaaaaacgcagatttaatgaataattataatctgcgttttttgtgtacctgtggtggataaaaattagatagaaagttcatgaagtacgttcaccaattctctgtctataggcttgtcgttctttatagctttagcgaaaggtacataaacaatcttatcatcatcaataccaatcattacattacgttgtccttccaatagtgcttggatgctagccactcccatacggctggcaataattcggtcatgcgctgtggggcgtccgccacgttgcaaatgtcctaatatcgttacacgcacatcgtattgcggatattcgttcttcacacgttcggcatagtgcattgcacccccggtcagttcgctttcggctactaatacgatactactgctcttggatttgcggaaaccatgttcgatgaattcttccaattggtcaacttctgtgctgaattccggaataatagctgcttctgcacctgcggcaatagcaccgttcaatgccaagaagcctgcatcacgtcccattacttcaacaaaaaataaacgttcgtgagaagttgccgtatcacggattttatctactgcatctaaaattgtgttcaaagccgtatcatagccgatggtggtgtcggttccatacaggtcgttgtcaatcgttccgggcagaccgatacaaggaacatcaaattcttgtgcgaaaatacgtgcaccagtcaaagaaccatcaccacctataatgactaaagcgtcgatttcatgcttcttcatgttttcgtaagcttgtgctcgtccttcgggtgttgtgaattctttgcaacgggcggtcttcagaatggtacctcccatttgtatgatgttactaacattttggcttttgaattcctgaatttcatctgttaccaatcctttgtatcctctataaatgccatatactttcaagccgttatagatggcagaacgtgtgactgcacgaatggcagcgttcattcccggagcatctcctccagaggttaaaataccaatgcttttaatcgttcccataaatacccattttaatatttttatgtcgcaaagttaacaaattatcagttggacaacgataattttctattttttattggtctatttttcgtttaagattgcttttttacattcttccatcaaccatttgggggtggaagttgctccacaaatgccgatggaacggacgttctcgagcaagttccggtctatttcttccggctggtcaatgaggtatgaattcggattaatctttttgcattcttgatataagatctttccgtttgaactttttcgtccgcagacaaaaaagatcagatcatgcgctgctgcaaatttgcggatgttaggcatccggttggccacttgccggcagattgtgtcgtaatattcaaaagtggcatcgggtgaaatgtgttccttgatatattctatgatttgccagaattcttccagagatttggttgtctgggagtacaagcgtatgtctttagtgaagtctaaatgagcagcttcagcaggtgtttctatgacaattgcttttccatgagtttggcctaccagccccagtacttcggcatggccgtttttgccataaatcacgatttgtgtgtcttgacttgccggaacattatcatactcctgtttgatgcgcttttgaagacgtaatactactggacaggtggcgtcaatgatctcgatgttgttggtacgggctatagcgtatgtttcaggaggttctccatgtgcacgtaacagtactttggcatcgtgtaattgggcaaactcttcgtggttgattgtgataagccccattttttttagtcgttcacattcctgtccgttgtgcacaatgtctcccaggcaataaagagtgtttccttttgccagttcttcttctgctttacggatggccgtagtgactccaaagcagaacccagatccttcgtctatctctatgttaaccatttatagctgcttgaaatttttcggtcagccactctttctgttcggcaatgctcatgtggctgttgtctaacaagatagcgtcatccgcttgtcgtaacggaccgacttcacgggtttggtctatacggtcacgttcttccacattttccaggattttttcataagaggcctcttgccctttactcctcaattcatcataacggcgctgtgcacgtatggcagccgaggcggttacaaatattttcagttcggcatcggggaaaacaacggttccaatgtcccttccgtccatgacaattcctttggcctttcccatttcctgttgttgttttaccaaagcctcacgtacaaagcccaaggcggcgatagggcttacatgagaagaaacctccatgctgcggatggcatcctctacatttgtatcgttcagaaaagtcatgggacgttgtgtttccggattcaaccggaatgaaatatgtatatcgggcattgctgtttttaacgcttcggtgtcgatacctttttccgaaaagaaccctttctgtagactatataatgtaacagcacgatacatggcaccgctatcaatatagatatatcctatttcacgtgccaagtctttggccatagtgctttttccacatgatgaataaccgtcaatggcaatagttattttcttcatatataattaatgtataggtgactattaaaaacgcttcaaagatagataaaagttgggtgtatgtctatgaaatcggatgaaaataaaatgaattagcatatttttcatgtgaaaatactttttatttaaaagatttgtgttacatttgccctcagtgagaaacacttaatttttaaaacacaatttatggaagttaaaaaatcgcctaaagcagatctcgaaggtaaaaagagtacctggctgcttatcggttatgtgtttatccttgctctcatgtttgtagctttcgaatggactgatcgcgacaagcaagtgactacggatacaggtataactgatgtcgtatttgaagaagaaattatccctattacggaacaggaacaaaaacaagctcctcctcctcccgaagctcctaaagtagaagaagtgcttcagatcgttgaaaacgatgctaaagtagaagaaacgactattcaggcttcagaagaaaccggtcaggcagtagaagttaaatacgttccggttgaagttgaagaagaagaacccgaagaacaacaaattttccaagtagtagaagaaatgcctgaattccctgggggtatggctgaatgtttgaaattcttaggtaagaatattaaatatcccactatttctcaggaaaatggtgtacaaggtaaggttatcgttcagtttgtcgttaataaggacggttctatcgttgacccggtggttgtacgtagtgtagacccctacttggataaggaagctctccgcgtaatcaagaccatgccgaaatggaaacctggaaaacaacgtggtaaggctgtacgtgtgaaatatacagtgcctgtaactttcaaattacagtaataaaaatacttcaatatcttaattgagaggctgctttgaggcagcctctttttctaataatcccttaattaaaacaatcttatggctttttctgcagaacaattattagataaggtaaatacctaccttgctacaatgccctatatgcgtgaaccgaaagggttatatgctcctatagaatatgtcctttcattaggtggcaaacgtatacgtcctgtcttgatgttgctgtcttatcagctttataaagaaaatgtggatgatattttatcacaggcggcaggtatagaaacttatcataattatacattgttgcatgatgatttgatggatcgtgcggatatgcgcagaaataagcctacagtgcataaggtttgggatgaaaatacggctattctttcaggagacgccatgttggtattggcttatcggctgatgaataattgtccggatagctatttaaagcaagtaatggatattttcagtcagacagctttggaaatttgtgaggggcagcagtgggatatggaatttgagacacgtagtgatgttaccgtatctgaatatattgagatgattcgtttgaagacatcggtacttttgtctgccgctttaaaaattggtgcggtgttaggggatgcttcggaagaggatgcacaaaaattatacgatttcggtattaaaatgggattagcatttcaattacaggatgattttctggatgtatatgggaatccgaaagtatttggaaagaatattggaggggatatcttgtgtaataaaaaaacgtttatgctgattaatgccttaactttggccgacggacatcaacggaaagaattggaaaaatggatttcatctactgatttctatccggaggaaaagataaaggctgtgacagaactttatgataagattggcatcggcaggatttgtgaagagaaaattaatgcttattatgctgaaggactttctttattggaaagtatagctatgccttccgggaaaaaagaagagttgaaatcttttgtttgtcatttaatgaataggaaagtgtgatatgattgatacacattctcatttgtttgccgaagaatttacggaagatttgccggcggtgatagaacgtgccaaggctgctggagtttctaaagttctcatgcctaatattgatgatactactatagaggcgatgctgagtgtttgcacggcatatcagggatattgttttccaatgatcggatttcatcctacttctgttgatgcagattcattgttccgtattcatgaaatgaaaaaaatattctccgatgggcatccttttattgctataggggaggtggggatggatttgtattgggataaaacctatttgaaagaacagcagaaagcattggatatacaggttcagtgggcattagaatatcatttgcctttggtgctgcattgtcgtgaagcttttcctgagttgtttgaagtgatggagccttacaaaacgactgagttaagtggggtcttccatagttttacgggaactttagaagaggctgagaaggtgttggagtattcgcgttttgtctttggaataaatggagttgttacattcaagaagagtagtttgcccgaaattttgacgcatctgcctttggatagaattgtccttgaaacagactctccttatttggctccagtgccttttaggggaagacggaacgagtcttcttatataaagaatgtagctatgaaacttgctgaaatctatgctgtggattttgaatacatagacagaatcacgaccaataatgctttaaaagtgttcaaaatggctgaataagtttttaaagtttattaattttgatgagtaattccaataatgacagggttaattctacgtaagacgaaaaaaaagaatacatttgtagctgaaatcgcttgcaattcccgattttctttgtaatttgcacccgatttaaaaaaagatagtattgtgtagcccgaaataaggagagatgctcgagtggttgaagaggcacgcctggaaagcgtgtaaacgccaaaagtgtttcgcgggttcgaatcccgctctctccgctgttgttatggaaaacgtaaaagcaggaaaacaattaaaacaaataaataacaattaattaattaatcttaaaaaattagacacacaatgaaaaagttatttgcaattcttgcagtgatgggagtccttactttaggatcagttcagcctattatggctcaagacgcagctccggctcaaacagaacagactactgaagcagcagtggttgaagaaggtggtggtcttcacaaagagttaaaaactaagttcatcgaaggtgatgctggttttatgtctctggtagcaatagcactagttttaggtttggctttctgcattgaacgtattatttatttgagcttggcagaagttaatacaaagaagttgatgactagcatcgaggctgctttggaaaaaggtgatgtagaagctgcaaaaaccgtatgtcgtaatactcgcggtcctgttgcttctatttgttatcagggtttaatgagaattgacgatggtgttgatgttgttgaacgttctgttgtttcttacggtggtgttcaggctggttatcttgaaaaaggatgttcttggattacattgtttattgccatggctccgtctttgggattcttgggtactgtaatcggtatggttatggcgttcgataaaatccagcaggcaggtgatatttctccgacagttgtagcaggtggtatgaaagtggctttgattactactatctttggtttggttgtagcattgattctgcaggtattctataactacatcctttctaaaattgaagctttgacaagcgctatggaagattcttctattactttgcttgacatgatcatgaagtacaacttgaaatacaaaaaataattaggacaatggctaaattatcatataaaatgtcctactatgctttatatgtctgctttgccgttattttggtagtattgggcatgttcttcttggtaggatataataatccggtgggagatatgaatgctcccgaacacactgaaacattgatatacttaatgtatgcattgtttggtgtaactgttggcttgacggttattgcagcaattgcacagtttggcgcagctttaaaagataatccgatgggagctataaaatctttacttggtctcgttttgttggttgctgtagtattaatatcttatgctatgggatctgatgcaacgattacagctaatgaagctccttatacggatactttctggttgaagataacagatatgtttatctattcaatttatttcttactgggtattgctgctttagcaactttggtaaatatgacaggtatctttaagaaataatattatctcattgatatttaacaattaaaaaacaaagtaagtaaaatggcaagaaagaaaagagccgtacctggaattaactccagttcaacagctgatattgcctttatgttgcttattttcttcctgattacaacatcaatggatactgaccgtggtttggcgagacgtcttccgcctcctcccgaaaacaaggatcagaaacaagatgatattattgtaaaggaacgtaatgtactccaggttcgtttgaacaaagatgaccaactgatgtgtggtcaggactacattgacattaagcaattaaaagaaaaggcaaaagaatttatagtcaatccgtatgatgatgaaaaattgcctgaaaagcatagaaagaatattcctttgctgggtgattgtatgattacggaaaagcatgtaatctctgttcagaatgacgttggtactagctataaagcatatattgacgtacagaatgaattggttgctgcttataatgagttacgagacgagctaggaaaggctaaattcggcaagacttacgctcaatgtgatgaagatgagcaaaaagcaattcgtgaatattatccgcagaagatttctgaagctgaacctaaaaagtatggaggtaagtaatgggaaaatttaataaaacaggtaaacgtggaatgcctgagttgaatacctcttcattgcctgaccttatctttaccatgttgttcttctttatgattgtgacaaccatgcgtgaggttacattgaaggttcaatttcaggttcctcaaggaacagagttggaaaaattggaaaagaagtctttggtttcctttatctatataggtaagccgttgccggagttccaaaagaaaatgggtgctgaaagccgtattcagttgaacgataagtttgctgaagtatctgaagttcaggactacattactcaagagcgtttgaatatgaaagaagaagatcagccgtttatgaccgtttctttgaaagttgataaggacacaagaatgggtatcgtaaccgatgttaaacaggcacttcgtcaggcttacgctttgaaaattaactattcagctactcaacgtcagtaatagttatataagcatagataaaaaaggaagctgttaaaaacagcttccttttttatgtcttctattctatttatttgttatgaacggatttaatctgctacctatggtatagtaatagtatgtacaatggaccttttgaggataaactcctgcgcgagtcagcattatagtaattgaagaaagatgaagaatgaatgttcagatttcttgtccgtaaacttctttataaagagtctttttaactttctcaaaatcactttccatatctatatccccataggtcattaagagcattggtagaccgttatctcccttacggtagggaggttgcatatagggctttttatgcaaagtgaattccaaacgtttatagaagtgaatacggcgtgtgctcatttcatcattaggctcctctacttccaatacaattggaccttttaattgtttttttatcatttccagtacacgttttccataaccgccgtttctgagactgggatcaatagcaaaatgttcgatatagtaaaaatctcccattgtccaataactgatcataccaatgctgttaccgttttctaaaataatgttgttacagaaccggagattattatcagaatattctctctgttgtacagtatcacgacgttcttcttgagggaatgccgtatgcattaatttttctacaaaggtatagtttacctcatcttgtgtttttacttgtttaatttcaatcattttatctgtctttgtttagtcttaagtataaacctattttgcggtataaaagtttattagtctttctaatgcacgttggcataccgggcagaatgcaggtgcttcgtttatcttcattctgcattcggtagtagggcgataaagtcctttttgcgtatagcctgctccttcatagactcctactttggtgtataagtcggcattttctgtagctaccggagtaggtatggcagtacctttcggaatcatatctttccatttactgtcgaaatcaattaatgtggtgatattcggttcccaaggttccacttcatatggatattgcgggcttggagcttcggtatatgcatattcatctgctaatcctccaaaactatggccgaattcatgaactacaactggttgaaaatccggatggtgagctgtggtcagtgtatatgagttatagatgccacctcctccataggtgtctgtattggctagaataatgatatgctcgtaaggaattccagccaaccaattatgaatactttttacccgactggtagtgagataccggtcagaatagaaagtgttgaaatgtgaacttacagccgtagatttccatttgccttgtcccggtatgctgactccgctgtcttccgaagggcttgctacagcaacaatattaaatttctccttcagtttcttgaaaggttcatgactgaacagggcgtcacatgccgtctgggcatctttataaaatatatccatctctttttctgtatatccttctgccatgattgctacatcgatacaatctgcggtatttccgctttgcagaagatagcgatggggggtaatatggtttgttccccgttgatggattaaaatatcattggggactatttcatgtgtgagtgaggcatttactttatgatatacatcttttaaagatatggtcactattgcttcctttttgggataaggcaaaagaaaagaattctcgaatcctttttttatcctatttgcttcttcttcgcttacccattcttggaaaaggcttgagaatgatgttcgataaatagtttttcctgttgccttatctttcatcgtgatttcaccgttgccagccaagggaagctctgctagatgatgcttgcgtccagcccatttcggaagacttgacagttcgtccaaatatatttcttgtttagtggcattaccagtaaaaatataatctactcgaagcgttttgtcttcgaaatagtcattaaaattttgtgcgtttacagctacgctgaataaactccataaaataaaaataaatgtctttttcatcgtttgcgcattttctacaaagatagaatattctattaaattattggtatttatacaataaaagttatgaatcgcacgaatattgtcgagaaaagtcatatctttgcagaaaattaaactaaaaagaatgggacatcatcaattagacagtttggatgagcagatcttaaggttgatagccagcaatgctcgtattccgtttctggaagtagcccgtgcttgcaatgtatccggtgctgccattcatcagcgtattcagaagctaaccaatttggggattcttaaaggatctgaatatgtcattgatccagaaaagatcggatatgaaacatgtgcatatattggtctttatctgaaagatccggaacaatttgattcagtgacagaggctttaaaaggtattcctgaagtcgtagaatgtcatttcactacgggacaatatgatatgtttatcaagatttatgcaaagaacaatcatcatttgcttagcataatccatgataagttacaaccattgggcttggctcgttcagaaactattatatcatttaatgaggctattaagagacaaatgcctattctcgatttagctgatgaagattaattgttactttatgcggctataattaataaaactatacgggtagagatgtttttcatctgtcgggtgatcttctctacctgtttctttccattcctctttctttatttcgggaaaataagcatcagcttccttggatgtgtcatcaataaatgtgatatataattgtctggctatatgcattgcctctttatacaagctggcaccgcctataataaatatttcttcttcctctttgcagtgggataaagcgatctctaatgaggggaaacattcagccccggcgaaggctgctccttcccggcggcttaatacaatattccgacgattgggaagtgctccttttggaagtgattcaaaggttttgcgccccatgataatagtatgtccggttgttaaggctttaaaacgtttcaaatcgttgggaagccagtataataatttattttcaaatccaatgccgtggttgcgtgctattgctactataattgaaatattcatagtgatgagtgattagtggtgaatgtttagtgatattagtggtaagtgatgaataaccttgcgtagcttattcaccataactactaaacagatactttacctgcaatgtgtggccatggatcataattcaccaattcaaaatcttcatatttaaaactgaatatatcctttatgtccggattgattttcatttgaggtaggggacgaggttcacggctcaattgaagttttacttgttccaagtggttggtatagatatgtgtgtcacctagtgtatgaacaaaatcgccggtttgtaatccggtaacttgtgctaccatttgtagcaacaatgcgtaggaggcgatattaaaaggtactcctaggaatgtatctgcgctgcgttggtaaagttgtaggcttaaacgtccgttggcaacgtagaattgaaaaaaagcatggcaaggaggaagattcatattgtttaaatcggctacattccatgcgctgacaatgatgcgtcgtgaatccggattatgtttgatggtttctattgcttcggaaatctggtcaataaagcctccattgtaatctggccaggaacgccattggtaaccgtagatatgtcccaaatcgccgtttgcatcggcccattcattccagatgcgtactccgttgtcttgcaggtattttatattggtgtcaccttgcaaaaaccataaaagttcgtggatgatagattttaaatgtagttttttagttgtgaccaaggggaagccttcttccaaattgaagcgcatttgatgaccaaatatactaatggttcctgttccggtacggtcctctttgtgaacgccttcggttaagatacggtttaacagatctaaatattgtttcatgctcggaaaatcattttatggattgcaaaagtacataaaatctttctttttccgagcatgagaatgagtctatttcgttttttaccattttaaactgcatacacgttgtacaccgatgatgataagaaccactgtggcgatgatcagtgattggaaattagtatcactcatcaaataataagtttgggaagcgactatgtcactgattgtctggcatagaatttcaaagccattgaaaatatagaataatgcacagcagataatggcgcaagttacactgagtatatccgataaccacttggcttgttgggggaggcggcggataacctggcgtgaaaatccattgtcctcaatttcatgtttgtaggcaagcatgaaattcttaattaatttatcatcgttttccatcataaccattctgttttaagaaagttgtcaattttgtttttccgcgtgataaatgggacttgattgttcctgcaggcattcctgtaatcactgcgattttttctatcggaagatcttccataaaaaataaggtgatgcaggttcgctccacctcttttaattggctcaatccccgatatatgtccatgtgttcacctacttgcctttgttctgtttggtaaacagcatctatttcccaagtttccagtccggacgtttcttttttgctgcgaatatagtcataaaatatattataagcaatacggtaaagccatgtggaaaaactggacaaatttttaaatgaagccaagttggtgtatgcttttataaaagtttcctgtgccaagtcatcgctgagttctgtatctcctaatgtttggtgcaggaaaaaacgcctgatgggcgattggtactttttgaccaaagtatcaaacgcccgggtgtttttaaagaccaccacttgtgctaccaacgctatgtcgttgatttggctcatttttattcttcgttgtggggagtatctatattgttctttatgttttgtgtttctttggcctcttcgttacgttccagttcaatattttcaattttcattgatttggctccgttttcatcctggtttattcgggtaggagggaaaggatcatcttttttctttttgtgtggagtggtagtataagctatcaatacttgtcccaaccccatacagaaaataaggaatccgattgctgccaatccttcttcttctgtcaacacccaaaggaatactcccagaccaatgcctaagaatatattcttgatcccctttgtcattacagcatttccttgttcttcggggtcattgaacagttcggtcggaatggttcgtcctgctgccagagcctctgcagccagtttgtatttggcttgtttgttcttgtacctgaaccaaagtacaatagctacaataaagaaagggagtccacaacagatgatgagtgcgacaattgctaccgaagtaggaggaccgctattccagtcaccgaaatccgaactaatgttatgcatggcagcattctgatcctcatctacatcttgcaggtcgcttataacgactgtatccatccgggtgctgtcaagggcggaaggtactaatttgattgttttggcatgggttgcgaagcaagtccctatgagtaaggccaaaataaaaagtaactgtttcatgtttttatatctttattattgttttctgctagttagacggaacgaattaggaaataggttgcaaatagacagaaaattttcagataatcccaaaatatcatcgtatttttgtagtataaaaaggaagaaatatgaaattaccatcagaatttgaagcaagaaccctggaatggatgggggaagaaacttatcgtgcgttggaagctgctttacagacagagcctcctgtcagtatccgtgtcaatcgtacgaagtggagtggggaagttacaggagaaccggtactttgggcatccgcaggggtctatttatcgcaacgaccgacttttacattcgatccgttgtttcatgctggttgctattatgtgcaagaagcgtcttccatgtttgtggaacaggtattacgcacttatattaccgggcctgtggtgatgctcgatttatgtgctgctcccggtggcaagtctactcatgtgcgttcagttcttcccgtaggtagtttgttggtggctaatgaggtgatgcgtaaccgttctcaggtattggctgaaaatttgataaagtggggaaatgtagaagttgtggtgacgaacaacgatccggccgatttcacttctttgacagaggtgtttgatgttgtcttggcggatgtgccttgttccggtgaggggatgttccgtaaagatcctgtggctgtagaggaatggagtacggacaatgtgcaggtttgttggcaacgtcagcgtaggattttagcggatatatggccggctttgaaacccggtggcctgctgatttatagtacctgcacttataatagggaagaagatgagaaaaatgtggcttggattgctgatgaattgggggcggagatactgaaagtgccagtggtatcggaatgggggataatcggaaatttggcgggacagaattttcctgtttatcgttttttgcctcatagagtaaaaggagaaggatttttcttggctgtattgaggaagagtgccgccatttctcatgctgttccttgcatttgctgtcgggatgacaaggagaaaataacgaaaaagaagaggaaaggagaaaaagggaatttgtctcaggctgctccttttcccaaagaagtaaaaagttggttaaagcaggcagaggatttccggtttgaggtaagaggtacgaaggtgatagcattccccaatgttcatctttcggaatatgacctgttccgacaggaattaaaagttgttcatgcgggcgttactataggcgagttgaaaggaaaagacgtgataccggatcattcgttggcaatgagcacacagctgaatcatgatggtttctcttgttttgaattgacctatgaacaagctattgcttatttgcgtaaagaagcgatcacattggatgcttctgttccgcgtggctatatacttttaacttataaaaatattccattgggatttgccaagaacattggtaatcgggctaataacctctatccgcaggagtggcgtatccgaagcggttatttgcccgaagaactttcttttgtatgctaaaaggagccataaatttgttcgggaagattgtgcatattgcttttcatagactgacgcaatgcttctccgggtacagacttgcttgaattctataatatacaaattttgttggccttgtacaaaggaaagtgtggttgtcagaacgacttcctgtaggtacacccgtttttccattctgaacagccatacgcggtttttccttttataatcgttcctttgccacatagcgggcaggtttttcccgccaattcgttatcggatgggatagcgggagcggacgtggctgaagaagtgttttttcgtggggtgccggtcttttttttaggctgtttggccgtagagggtgttgcagcttttgtcgctgtttcctctattgcggtgacacggcggtttgtattatcacttaaaacgctgtgtactatttcactcaccatctgctttaattcatttagaaaagtcgttgcatcatagcttttcttttctatttcacgtagtttcttttcccatatacccgttaattcggcagatttcaacagttcttcgcggattagtcccaccagttctattccggtaggggttgcaatcaaatttttgcgttctttacggatataatggcgtttgaacagggtttcaataatggctgcgcgtgtagacggacgtcctattccattttcttttaatgcatcgcgtagctcgtcattatctaccagcttaccggcagtttccatagcgcgcagtaaagttgcttctgtatatggccgtgggggctgtgtccacttctcgtctagtttgggcagatgtggcccgctttctcctttcacaaaagcgggtaaggagtgttcttcgtcactttcacgggcttctgcgtcaggatcggtcataccttcaggcagattggtttgtggtttggcaaagataacgcgccatccgggatctataatctgttttcctgtggctttgaactctatactgtcagcttcgcctattacggtagtagtggcaaacttacagtcgggatagaatacggcaataaagcggcgcgctaccagatcaaatacccgtttctccatttctgtcagatttacaggaggttgtcccgtaggaataatggcatggtgatccgttacttttgaattgtcaaatacttttttggacttgatgagcttttgtcctgccaacggagcggtaaatgctgtgtatggagttagtcccgccaatatattgggacatttgggatagatatcatcgcttaagaaagtagtatctacacgagggtaagtagtcactttcttttcatacaatgactggataagttttagagtttcatcggctgaataagcaaattttttattacattccacctgcagggaagtcaggtcgaaaagacgggggggggcttctgttccttgtttttttgctacttctgtcacagtaaaaggaacatttttgacacgctccatgagtgcctgtccggtagcaagatcaatgatgggaggaattcccctgttctcttcagcctttttggctttcttgggattctctttggcgtcgctttcttcctgagctaattcctcatcgcttttgcggatgatggcagagaatgtggtttcccggtataaagtagccagcacccaatattgttgcggagtgaagttttctatttcttgctgacgctttactatcagtgccagagtcggagtctgcacccgtcctatagatagtatttgtctgttttgtccgtatttcaaggtatagagccgggtggcgttcatacccaatacccaatcgccgatagcacggcttaatccggcttcgtataaaggttggaattctttttggtcttttagtttgttgaatccttcgcgtatggcttcttcagtcaaggatgaaatccatagacgtttcaccgggcagtgtgctcctgctttctgcatgacccatcgttgaataagttctccttcttggccggcatcaccgcaatttataatttcatcggcattttgcatcagtccttctataatgcgaaattgtttttcaatgcccggatcgctgatcagcttaatgccgaaacgaggtgggatcatgggaaggctggacaggctccatgctttccatgagggagtgtattcatgaggctccttcaaagtacagaggtgtccgaatgtccaggtaacctgatatccgtttccttctatatatccgtcttttttgttttttgctcccagtacatccgctatgtcacgggctacggaaggtttttcggcaatacaaactatcatattttttttcgtttctgttcaaataggattgcaaaggtaataaaaacctcggaagagattttgttttgtctttattagttcttcttttataagaatttaaaagtagatatcgggggcttcaaggtcatttcagtgcaagtgggctattaggtatggcttttctgttatttgctgtttgacgaatgtcttttgaacttttctttatgatttcagtttcttttcagaatcctataagaaatttgcatcaaaaagatactataaaacaatgtgattatgaaaaagaattggatgttatttttatttttcgcagcttctgctgcactaacttttagtggttgtagtgatgatgacaatagcgatgttcctgaaaacacacatttggtttcaaaagaagtacaggctgcatttaatgcaaaatatccgcaagctaaagacgtggaatgggagctgaaaggtgattatgctgtagtagattttaattgggatggtggggagcattctgcatggttcaatccgttatcggctgcctggtatatgacagaaacagatgttcgttatgaaaatcttcccgaacctatacttactgcccataaagcaagcaaatatgctgattggcgggtggatgatgtggataagttgactcgtgagggaatggaaactctttatgtcattgaggtagaaaaaggagagtctgagctggatttgttttatttgtctacaggcatattggtaaaaactgttgtagataccggatacgaagaagattatgatgattatttgccgcagcctgatgcaaatggcattatagctattgtcaagcagaaatatcctaatgcgacaattgtggaaatagaacgtgagaaaggtttgcaggaagttactattttagatgaaaacaaagagaaagaggtttatttcaatgagcggaacgaatggatgggaacaagctgggatgtacaggtggcaaatttaccggaagcggtaaaaaaatcggttatggaaaaatattcagactatgtgatagatgatgctgattatgtagtgacacctgataatgaatggtatatacttgatttggaaaacaaacagacaggtaaagagtttaaagcaaaggtagataaggacggtacttggttataattttattatcccatagacttatgctaggtaatcaggtggttgtttactagggccagacagcttttttgttctcaaatattatgacttttgtggcaggcagttggagtgtggaatttgtatttctgttatacatatttttgtgattttgatgagagggtaaaagataaatatggaaaaatagatttgtatgatatatgatattcagttacatttgcatttagaataaaaaatagcatgatggaaacaggattaacttatacttcgactgttgtcgtttcaaaagaaaatgtagctgccactatgggtagtggcgatttgaatgtgtttgctactcccgctatggtagcgttgatggaaaatgctgccatgaatgcggtggcaggcggtttgcccgaaggttctactacagtaggagccatgatgaacactactcatatcaagccctcggctgtgggagatacggtttcggctactgccgtattaaaagaggtagaaggcagaaaacttacttttgaagtgcgggcacaagatagcaagggtgtgattggggaaggtacacatgtacgttatattgtggacaaggagaagtttatgagtaaattgtcttaataattatttgaaattataccacaactgagatcttctgtccttttgtgattctgaatattgtttatttcgataacgggaggatcagaaagaggaatgaagaatgtgctttaataaaaaaatctttaaggagagcaaaactaatgacaatctggaaaacagtgttattagagttctgtcctcctttttcttattcttgcagtgctaggatatattcgtataatttcttataaaacgggtgttttgtcagcgtagaggcatctcctaatataataagtttcatacgtgcacgtgtaatagcgacattcattcttcgcaaatcattcaaaaaaccgatttgtccgtcttcattggcacgtaccagactgattaagatcacatcccgttcctgtccttggaaaccgtctaccgtattgatggtgatgaggtgtcggtaaggcttgaaaaatgcatcccgttttatcagttggcggagatattgtacttgtgctttataaggagaaatcagtcctacatcaatccgttcttccaaaaaacgttcttttcctattttattaatgtaatgggtcagttgggaaatggaaagtgccgcctcggctttattgatacggccgaaactttcacctacaaattcttcattgcagttcattccttccgtattcacccattctataggagtgtcgtaatccagaatcccacggtattttacttcgggagcggatttcaattccccttgatagaaccattccgaagagaaatgcatgatctcatcattcattctgtattgaaccttcagcagggaaacagtttccggtttgttctgcacaatttcctgcatcaaagtctgatccaatccgcctcgtgcagcttccacacattttatggtaggagggagctggcaatggtctcctgccaggactatccggtctgctttgcggatggcgatccagcaagcgggttccaatgcttgtgcggcttcatctataaataaagttccgaatctacgccctgtcagaacccggttggcagagcttaccaatgtgcaagctatgacacgggcttcactgaacaaggcttcgttgatgcggatctccagctcggtggcccggtctttcaatgaattaattttcagacgtatattttcccgttccgctcccttgcgcgaacggttgtagagttcgcgtatggcctttcggatgctccaaagctgcggataatccggatgactttcgaagcgtcgttcgtaggtaaaggataacatcttatcattgacacgggtaggattaccaatacggagaacgggaacgccccggtctaccagtttctcactaatccagtctacagccatattgctttgagcgcataccatcacttggttttcccggtgtagcgtttcataaatggcttctactagcgtggtggtctttccagttccgggagggccgtggacaatggccacatcttttgcatgcattactttgttcacagcctcttcttgtgaattattcagccacgggaaacgagtgaaaccaaaactgaacgtttgtgcttttaatgtgccgtggaaaatatcccgtagttctgccagacgattgtcttttgctttaataacttggcttaaggcttcaaacatcagtcggtaactggtttcatcaaaataaagttgaacccccaactgacgctcggttgcctgtatgttgagtaaagcgtctgccgatggcaaaacgatgaccatgcggtcctcatccacataattcacagtggctgtgaaattgaaataatggatgtttcccggggcgtcttgagtgaaaaaacaaacaggacgtccgaattcgaatacatgttctatttctttgtcctcctgtctttccatctctataaccagttggtttaaagagttgtaatagcttcttcctgtgctgacaggataccagcacatgccacgtttcactttgcggtcgatgcccatcgcttcggtttgttgcttgaaagtttctttttcgtaattatattccatgtgaagcaacaactctttgcgttgtaatttgttaataatagtagagagggatttatgctggttcatatttattcttttttctataagaattgcaaagataataattatccctctaaaagcactttatgttttattttgttaaacgtattatagattacgcaagaattcaattcttttttctatcttgccaaaaataaaaagaatctaaaactgtaataattataaattgtgatggatatggtatatgacttggacatgttaaaagccttttatgcttcttttgaaaagaagatagggcgggtaagagcagtgttgcagcgtccgttgacgttggcagaaaagattctgtacacgcatctgtatgatgatgcactgttgaagaaatacaaacgtggtgaggattatgtgaatttccgacccgaccgtgtggctatgcaggatgcgacggcacagatggcgctgctgcaatttatcaatgccggtaaggagactgtggctgtcccttctaccgtgcattgtgaccacttgatccaagcatataaaggtgccggtccggatattgcgacagcaacagaaagtaaccgcgaggtatatgactttctgagggatgtgtcttcgcgctttggcattggattctggaagccgggtgcgggtatcattcatcaggtagtgctggagaattatgctttccccggaggtatgatggtgggtactgattcccatactccgaatgccggaggtttgggaatggtggcaatcggagtcggcggtgctgatgcggtggatgtcatgaccggtatggagtgggagctgaaaatgccgaaattgatcggagtacatttgaaaggtgcgttgaacggatgggcttctccgaaagatgtcattttaaaactggctggaattctgactgtgaaaggggggacgaatgccattatcgaatattttggagaaggtacggcttcactctcggctaccggcaaagcgactatttgtaatatgggcgcagaggtgggggctacgacttctcttttcccgtatgacgaacggatgaaggtgtatctggaggcgaccggacgtaaggaggtagctgcaatggccgatgcagtgtctgccgatttgcaggctgatgcagaagtggttgctgatccgtcagcttattatgaccgggtgattgaaattgatttgtccgaacttgaaccttatattaatggtccgttcacaccagatgccgctactcctatttcagagtttgccgagaaagtgctggcccatggttatccgcgtaaaatggaagtgggcttgattggttcatgtaccaattcatcttaccaggatttaagccgtgcggcatctattgcccgacaggtagatgaaaaacagttgagtgtggcggctccgttgattgttaatccgggatcggaacagattcgcgctacagccgaacgtgacggcatgatagatgcttttctgaaaataggagctactataatggccaatgcttgcggcccttgtatcggacaatggaagcggcacacagatgatccgctccgcaagaactcgattgtgacctctttcaaccgtaattttgccaaacgtgcagacggtaatccgaatacacatgcgtttgtagcttctcccgaagtggtgctggccctgaccattgcaggtgatttgtgtttcaatccgttgaaggatgctttgatcaatcaggagggtgagaaggtgaaactgagagttccggaaggggatgaattgccgtcgaccggttttactcagggaaatcctggttatttggctcctgccggtgcacaggtggaaattaaggtgaatcccgaatcacaacgtttgcagttattggctccgttcccggcatgggatggaaaggattttacggatatgcctttactgattaaggctcaaggtaaatgtaccacagatcatatttcaatggcaggtccgtggttgcgtttccgtggtcatctggaaaatatttcggataatatgctgatgggggcggtgaacgctttcaatggtgaaacgaacaaggtgtggaaccgtttgacaaatacgtatgagggtgtgtcgggtacagccaagcaatataaggctgaaggtatcagctccattgttgttgcagaagaaaattatggtgaaggttccagtcgtgaacatgccgctatggagcctcgtttcctgaatgtaaaggttattttagcgaagagtttcgcccgcatccacgaaacgaatctgaagaagcagggaatgcttgcggtgacctttatagacaaggcggactacgacaagattcaagaacatgatttgattaccgtcagcggattggcggactttgcccccggcaggaatctgactgtgactttacaccatgaagatggcactcaggatagttttgaagtgcaacatacctataacgaacagcagataggttggttccgtgccggctctgctctaaatgcaagataaaaaatgaagaagacagtaccttatattacaggcgacggagtgggagtggaaatcactccagccatgcaagccatagtgaatgcagccgtgaagaaggcgtatggcaatgaacatgaaatagaatggatggaagttttggcaggagagcgtgcttttaatgaaacaggctcctggttaccggatgagacaatgaaagcgtttcaagaatatggcgtagggattaaggggccgttgaccactccggtgggaggtggtatccgctctttgaatgtggctttgcgccaaacgttggatttgtatgtatgcttgcgtcccgtacgctggttccgtggagtggtatctccggtgaaggagccgcaaaaagtggacatgcatattttccgtgaaaatacggaggatatttatgcaggtatagaatgggaagccggaacaccggaagctgagaagttctatcgttttttgcatgatgaaatgggagtggctaaagtgcgctttcctgaaagttcttcgtttggtgtaaaacctgtgtccagagaaggaacggaacgtttggtgcgtgcggcgtgcaaatatgctttggagcatggcttgccgtcggttacgctggtgcataaaggaaatattatgaagtttactgaaggcggcttcaaggaatgggggtatgaactggcggaacgtgagttcggagatgccattgcgtcaggcaaattagtgataaaagactgcattgccgatgcattcttgcagaataccttattgattcccgaagagtattcggtggtggctaccttaaatttgaacggagattacatttcagaccagttggcagccatggtaggaggtattggaatcgctcccggagcgaacatcaattataacaccggtcatgccatttttgaagcaactcacggtacggctcctaatattgccggaaaggatgtggtgaatccttgttcattaattctctcggctgttatgatgttggagcattttggttggaataaggcggcggagctgatagtaaatgccttggagtccagctttggcgaggggcgggctactcatgaccttgcccgttttatgcccggaggtgtttcgctcggtacatcagcatttacaaaagaaatcatagaaagaataaactcctaaaaactcacggatatgaagaaagaatatatcatttacaaactctccgaggaaatgaagaatgcgacccggattgagaacgaattgttcaagaagtttgatgtaaagcgcggattgcgtaacgaagatggcaccggtgttttggtagggttgaccaagataggcaatgtagtagggtatgaacgtattcccggcggaggattgaagccgattcccggcaaacttttctatcgtgggtatgatttggaagatttggcacatagtatcattaaggagaaacgttttggttttgaggaggtggcttatctgttattgtccggtcatttgcctgacaaggaagagttggcttctttctgtgagttgattaatgacaatactccgttggaacagaagaccaaaatgaatatcattgagttggagggaaataacattatgaacattctggcccgtagcgtgcttgaaatgtaccgttttgacccgcaggcggatgatacttcgcgtgataacctgatgcgtcagagtattgacttgatatccaagttcccgaccattattgcatacgcttataacatgttgcgccatgccacgtatggtcgttcgttgcatatccgtcatccgcgtgaaaaactgtctatcgcagaaaacttcctgtatatgttgaaaaaggattatacggagcttgatgcgcgcacgcttgatttgctgttggtacttcaggctgaacacggaggtggtaataactctacttttaccgtccgtgtagtttcatccagccgcacggatacttattcggccatcgccgcaggtatcggttcgttgaaaggtccgcttcatggaggggcaaatatccaagtggcggatatgttccatcatttgcaggaaaacatcaaggattggacgaatgtggacgaaattgatacttactttacccgtatgttgaataaggaagcgtatgataagaccggtctgatttatggtatcggtcatgcggtctatacgatatccgatcctcgtgccatcttgttgaaagaattggctcgtgatttggcaaaagaaaaaggaaaggaggaagaatttgcttttctggagctattggaggaacgtgccattgctatgttcggaaagattaagaataacggcaagacggtgtccagcaatatcgatttctattcaggtttcgtatatgaaatgattggtctgccacaggaaatatttacacctttgtttgcaatggctcgtatcgtggggtggtgcgcacaccgcaatgaggagctgaattttgaaggaaaacgtattattcgtccggcctacaagaatgtattggaagaactggaatatgtgccgttgaaacagagataatgatttagaggcacccggtttgcgataagctttggtatgattgccttagctgggcggccatgcggtctgtattgttgtaaagaaaagtaagatatcttcgtggacaaagtaagatatgttcccgggcaaagtaacactacttacctgccctacgaagatatcttacttttttcagtgaggtatggccgttcataatactctgtatagaataccttgaaaaatccttcaaatccttcattcttcccgcaaacgccctgtccgtcggcattccggctgaaggattggactcgggaatccttcagccggggattggaatccttcagccggaccgatgttcctccgattcttagggatttgattttcctgaaggatattttccggctgaaacatttcacgatgcatatccttcagccggaatgccgacgggcagggcgtttgcggaatggctgaaagatctgaaagaaaagtaaggcggttcggcatgtagatgccgttatggaaaaaacaacaggtcaaattttaaaaagctcttgttctttcaatgaaaacgtcttgttcttttttttaaaggccttgttcttttcagaaaagaacaggacgtttgaaaggttagtaacgtgtggggtgacacgttactaatgtgtgggctgtaagattagtaatgttacaggtgaaagattatatatcttacaagtgatacatatatgaagttccagtatataaaagataaagggaaggcaggtactactggtttttgcaatgtagatacatctcagccggattggtttataaggcaaacctttggggtggaaatcaatggaaaacctgtacaaaatagtacagcgctctctaaataaagccttctctgcgataaaaatcgtatccttttcttgcaaaaaatctcttaattgttgctttcctctgatttttcccttaaatttgttagtgacttactaaatttaatacagggaggaacgagtatgggacaacagacttttgaatttttgttattagcaatgtccgcacttgcggtgattgtatttgtagccctctattatgtacgtgccggttatggtatgttccacaccccgaaatggggactttcagtgaacaataaattaggttgggtgctgatggaagcacctgtattccttgtaatgctttatctgtggtggaacagcagcgtgcgttttgatgccgctcctttcctcttttttcttctttttgaattacattatttccagcgttcttttctattccctttcctgatgaagggaaagagccggatgccccttgccattatgttgatgggagtggtctttaatgtcctgaacggactgatgcagggcgaatggttgttttatctggctccggaaggactctatacagatgcctggctcagtactccttctttttggcttgggatcattttgttctttatagggatgggcattaatctgcattccgacagtgtgatccgccatttacgtaaaccgggcgatacacgccattatttgccacagaagggaatgtaccgatatgtcacttcgggcaactattttggcgagttggtggaatggatagggtttgccgtactcacttgttcgcctgctgcatgggtgtttgtactgtggacgtttgctaatctggctccacgtgccaattccatccgtaaccgttaccgggaagagtttggtaaggatgcggtaggaaaaaagaaaagaatgattccttttatttattgaatttgaatagtatatcgtttctgtttcaggaaatgatgaaagcgaaacataacatatgaatgatgaactctaaattatttactcccgcttctatcgggccgctgactttgcgtaaccgtacgattcgttcggctgcttttgagagcatgtgtccgggtaatgcgccgtcccggcaattgaaggattatcactgttcggtggcagcaggtggagtgggaatgactactattgcttatgcagctgttacacaaagtggcctttctttcgacaggcaattgtggatgcgccctgaaattataccgggattaagggaaataaccgatgcggttcataaagaaggagctgctgcaagcattcagttgggacattgtggaaatatgtcgcacaaaagtatttgtggggtaacacccgtaggagcttcttccggttttaatctttattcgcctacttttgtgcgtggcttgcgcaaggaggaactgccgcagatggcaaaggcatacggtcagtcggttaattgggcacgtgaggccggatttgacgcggtggaggtacatgcagggcatggctatcttatcagtcagtttctttcaccttacaccaatcatcgtaaggacgagttcggcggctcgttggagaaccgtatgcgctttatggatatggtaatggaggaagtgatgcgtgccgcaggtaatgacatggccgttctggtaaaaaccaatatgcgtgacggttttaaaggcggcatggaaatagatgaagctgtgcaggtagcgaaacggttggtacaagacggggctcatgcgttggtgctgagcggaggctttgtaagcaaagcgcctatgtatgtcatgcggggagcgatgcctataaaaagtatgacacattatatgaactgctggtggctgaaatatggggtacgtatggtaggtaaatggatgattccgacagtaccttttaaagaggcttatttcttggaagatgcattaagattcagaacagaaataaaggaaattccgttagtatatgtgggagggctggtatctcgtgaaaagatagatgaggtattggatgatggttttgaatttgtacagatgggaagggcgttgctgaatgaacctggttttgtgaatcggttgcggactgaagaaaaggctcgttgcaattgcggtcatagtaattattgtattgcgagaatgtacactattgatatggcatgtcacaaacatctggaagagaaattacccctttgcttggaacgtgaaatagaaaaattagagaaccaatgagtaaattagccataataaccggtgccgatggaggaatgggtactgaaataacccgtgcggtagcacaggccggctatcatgtaataatgttgtgttacactctttttaaaggagaggagcgtaagaaccagttgattttggaaactggcaataaagagatagaagtcagacaagttgatctttcttccatggcttctgtgactaatatcgcggacgacttgttggggcgcggaaagcatatcgatttactgatgaacaatgcgggaacaatgagttccggtggtttgattacaacggaggatggtttggaatatacggtagctgtgaattatgtggccccttttttactgactttgaaattattgcctctgatgggtcaaggaacccggattgtgaacatggtttcttgcacgtattccatagggaagattactcctgaatttttgattcgtggaaaaagaggcagtttttggcgtatccctgtttacagtaatacaaaattggctttgtggctttttacccgtgaactttctgaaaggctgaaaacagaaggaattactgtcaatgctgccgatcctggtattgtttctaccaatatcatccgtatggatatgtggtttgacccgttgactgacatactgttccgtccttgtatccgtactccgaagcaaggagccgcgacagctgtcagtttgcttttggatgatcgatggaaagaagttacagggcaaatgttcgcttcttgcaagcctaaaaaagtaaaggataagtttatgaatcatccacaggcaagacagctttgggcggatacgaaagcatatttggagaaactgaaattggaggagccaattgtctgagaattcctttaaatacataaaaagccgtatcattacttaaaagtagagtggatacggcttttatggtcggtgaagagtgtctggtttcggattgcagtgtagttgaggttattctttcttggctgcttgttcagccagcatctgttcacggcttttactttgagtcacaatataaactcccgtgaataccagtgccacagctattcctttggcaatgccgaaggttcccattcctaacaagatagagacactggttcctacgataggctgcacatagttgtacatactgatgacagtagggcgcaatgttttctgtccgatcatcatcagaatataggcaaggaatgttccacctacaatgacgtatgcaacacaagcccatgtagaagtggaaatttcttgaaaatgtatggcggaaacctcatgataggagaacggaataaagcagatggcggcgtatgtaaacatccacttcatcaaagtgaagatgttgtatctgctgatcagtcctttaaaaatagccagatagaatgagaaactgatttgtgccaacaggcaaagcaaatctccgggaatacttccgccttttccatctgttgagccttggctgcttaatatgagtgtcaaggctccgatggaacctagaaaaatgccaatcacttttttccctgtaaccggttctttcagataaatggcagcgacaatcatagtagcgataggggctgtggttgttacaatggaagcatcgatgggggaagtcagtgatagtccgaaagtgaaacatccctgattcaggacgatacccaataatcctgcaaagaacaacatcatcaagtcgtgcggctttacttgttctttaggagcgaaaatagaagctatccaaaaacagatagcacctcctgtcattcgaaatgtagcgagggaaagacctgaaataccgttttctaacgccgttttaccaattggggacatcaatccccacattatggcagcgcctagcaatgccaaatgtcctttgtacttttgaatagccattctttttaccttaaataacagtgcaaatgtaggaggttttttttatattttctatctttgcttataagtaaatctatcaaaaatgaaaaaacaagctgattatataaaacgtattgagataaagcggctttggggccgtaaagatatctcatgggaactgcgtccggatgtcaatattctgagcggagtgaatggtatcggcaagagcactatcctgaacagatctgtgaacagtctgacggctttggaaggcggagcgttgagtaacggttcgactcccggggtacattttgtcttttctccggaagatgcgaccctgatacactttgatgtaatccgtagttttgaccgtccgttgattcattcggaacttctcgaaaagatggcggataagaatgttaagacagaattggattggcaactttatcagttgcaacggcgttatttggattatcaggtaaatattggtaaccgcattattgagtgccttacttccggtggccctgacggtcagcttcgtgctgccgaaatgtcttaccccaagacgaaattccaggatttgatggatgacttgtttggtgaaaccggtaaaaaaatcattcgtaaaagtaatgagattttgtttgaacaggatggagatatactttatccttatcaactgtcttccggtgagaagcagattttggttattttgctgacggttctggtacaagacaaccgtcggggagtcctgtttatggatgaacctgaagtatccttgcatgtggaatggcagcaacgccttatttcattgatacggcaattgaatcctaatgtacagattgtgttgacaactcattcgcctgctgtgattatggatggctggctggatgcagtgaccgaggtgagtgatattacaaaataaacaatttctaacgacgatactatgggaaaaagattgtccgagaatctgtcctccttatatattggtgcggccaacaaattgaaacctaaatgttcgcgacgcaagattattgcatacgttgagagctatgatgatatttcattctggcgtaccttgttaggtgaatacgaaaatgaaactcgttatttcgaagtgatgcttccttcgaaaaccactttggctaaaggtaagaagtctgtgctgatgaatgaactgggacctcagttgggacaaaatatgatagcttgtgtagatagtgattatgactatctgttacagggggctacccatacttcacgttatattataaataacaaatatgtttttcatacctatgcatatgctatagaaaactatcagtgttatgctgaagcattgcatgaggtttgtgtcatggcaacgttgaatgaccatccgttggtggattttgtcgcttttatgcgtatgtattcccaaatagcttatccgttgttcatttggtcggtgtggttttatagaaaacataatctttccgaattttctttgcttgacttctgttcgtatgtgaaattggatagagtcagtgtctatcatcctgaacggagtttagagagtatgagccgcagggtgaggcgtaaattattggaactggaacgccgccatccgaaagccttggaggaaatagaggcgatgaagcgggaatttgccaaattgggagtgaatgaggacaatacctatatgtttattcaaggacatcacattatggatagtgtagtgatgagattgttagtacctgtctgcaatgtgttacgccgtgaacgtgaaacggagattaaagaactggcagagcataatatgcagtttcataatgaactgaccagctatcagcgccggcagttgggagtagacattgtactccgcaaacataccagctataagttatcacctctttataaaaaattggaagcagatatagaacgtttcttgaaacatatctgaatcggttatttcttatgggaggcaagtgctttggctatgaaatgatctagtgagaatttacccggtcctgctatatacaataatatgaatactaccagataaataaaggctaattctttaacggcgaaaggatcagaaccatgaacaacaaagaatgcgatacacatggtgaagatcatcggaagcattgccaagcgataaaggaatccgaaaatgaaagccatcgaacaaaccatttcaccaaaaatagccagtaccagtgaaagttggctgcctattcctaaaggatcgggaaaactgccggacatgacatcgtagttggcccatttctgtacaccgtgcgacatgagtaaaataccaaacaggattcgtaaagctaatatcagaagtgacatagcagtgccatcgggcttggatggaaataagaatttataaatgactgacataatacgtttttatttttttgtttatactatatttatataaacgtaacaaaagggtgaaatgttcaaatcattcactgtttgtttctttggagatggttgattcgctcatattaattttttattgtagaaaaactcttgaaacgaatgtcaggacttcgtgcaaaaggaataaaaaaagaacaattataataaatattagttctatatggtataatgtttgtcgtaccttaggtaacgataaaagctaacatacgaatatatgaaaacaattaaatgtattggagtgctgacatccggaggggatgcttctggcatgaatgccgctatccgtgcggtaacccggagtgcaatttgtaacggatttaaagtgaagggtatttatagaggatatgaagggctgattaatggagaagtgaaggaactgaccacccaggatgtgagcagtgttattcaacgtggaggaacgatgttgaagacagcccgttctgctgaattccaaacagtagaaggacgcaagaaagcatacgatactatgcagcgagaaggaattgatgctttggtgattataggtggaaatggttctattacaggagcccggatttttgcggaagaatatgatgtgccttgtatcgggttacctggtacaatagataatgatctttatggtactgactttaccataggttacgatacggctttaaatacgattgtggaatgtgtggataaaatccgtgatacggcaacctctcacgaccgtatattctttgtggaagtgatgggacgtgatgccggttttctggctcaaaacagtgccattgcttctggtgctgaggcagcgattattcctgaagatcgtacggatgtggatcaattggagaaatttatcgggcgcggttttcgtaagacaaagaatagcagtattgttattgtttccgagagtccgaaagacggaggtgccatgcattatgcagagcgtgtcaagaaagaatatcctcaatatgatgtgcgtgttaccattttagggcatttgcaacgtggaggttcgcctagtgcttatgaccgtattcttgccagccgtctgggggcgggagctattgatgccatattggaagggcagcgcaacgtgatgattggcattcataacgatgaggtggtatatgtacctttttctgaggcaattaaaaaagacaagccccttgataaatcgcttatcaaggtgcttgatgaattatctatttaatgaaaataatcatgaaaggagaagcggaagtaattcttctgctttttctatgatatgtgccggatgtaaggcttccaattctgtgcgcggccggaatccccatgccacacctatagctgttactccggcatgatgcgctgtttgcatatctacattagaatcacctacataaagtatatcttcctgtttgactcctgcttttgtcatgatttcgtttatgatggatggatcgggttttgcggggataccttcgcgttgtcccagtacttccacaaagtttatttctggaaaatagtgtgctattaactttcgggtagctgcttggtatttattggaggcgaccgctatcatgatcccttgctgttgcagtgtttttaataattcggagataccgggataagggcggcttaaatcggcattgtgctcatcataataagggatgaattgtgaacgtatctttaatacattctcttccgtacgctccccttcaggcagagcacgctcaaataatttattgattccgtttcctacaaaaaaacggtatgcttccatttcatgtgtaggatagccataatactgtaaggcttggttggtggcggcagctaggtcggcaatagtgttcagtaatgtgccgtccaggtcgaatattacaagtttcttcatatttgtacttcttttatcggtgcaaagttactatttttgtatgcaaactaataataatgcttatgaactttctagaattagtgaaggcgcgctactctgcacgcaaatatgccaatcgtcctattgaggctgaaaagttggattatatcatggaatgtgtacgttttgcaccgtctgcagttaattttcaaccatggcgtttccgtattgttacagatgaggccgtactgaaaacgttgtattcatgttataaacgggaatggcttgctacggctccttgtatcattgtggcttgtgtgaatcataatgagtcttggcatcggcgtgccgataataaggatcacgctgatattgacattgctattgcagtagaacatctttgtctggctgctgccgaacaaggactgggtacttgttgggtttgtaattttgacactccgcgatgcagtgaggttttgggattgcctgaaaatttggaaccggccgtcttgattccggtcggttatgcggaggatgaacccacagaaaagaagcggaaaccattaaatgaaatccttctttaaaaaatcacaaaaacacctttcggagtgccatcgggcaggcagatttaatttccttttacagtggacgaagatactattaatctcttggcctgatgactgttccggattttaagctcattctttttagtctcttcttattttctgataattttgcatattttgtattccatttatgatagaagtaaagccgaaatggctaaatttgagcactttttaggctttgaataacctatgagtgtagtaagtactattaataacactaaaaattatggagaacataggagttggattgatgttgatggtggtcggtatggcgactgtctttgtcattctcctcatcgttatctatctaagcaagtaccttattactgttgtcaacaaagtggctcccgaagaagctcctaaaaaagcacctgctgtagcacctacggcagatactggtgctatggatgctattaaggcggcagttgagattttgacggcaggtaaaggtcaggtgataaagattgagaagttataatccaaaaaaagaaaaacacatttatcaaaaatggaaagagaagtaaaatttagtctggtctttcgcgatatgtggcagagtgcaggtaagtacgtgcctcgtgtagaccagttggttaaggttgccccggctattattgaaatgggctgtttcgcccgtgtggaaacaaatggtggtggttttgaacaggtaaatttattgtttggtgaaaatccgaatagagctgtgcgcgagtggacgaaacccttccacgaagcaggcatccagactcatatgctggaccgtgcgctgaacggtctccgcatgagtcccgtcccggcagatgtccgtaaattattctataaggttaaacatgcgcaaggaacagatattacccgtactttctgcggattgaatgatgtccgcaatattatcccttctatcggctatgctcacgaagccggaatgatttcacaatgttcgctctgtatcactttttctccgatacatactgtggaatattatgtgaatatggccaagcagcttatagaagccggagccgatgaaatctgtattaaagatatggccggcatcggacgtcccgtttcattgggaaagattgttgccggaatcaagaagattaaaaatattcctatacagtatcactctcatgcggggcccggattcaatatggcttctattttggaagtatgccaggctggttgcgactatattgatgtaggtatggaaccattgtcatggggaaccggccatgctgatttgattagtgtgcaagccatgttgaaagatgccggatttaaagtgcccgaaattaatatggaagcgtatatgaaagtgcgttccatgattcaggagtttatggatgatttccttggtttatatatcagtcccaaaaaccgtctgatgaattctttactgattgctccgggattgccgggcggcatgatgggaagtttgatggccgatcttgaaacgaatctggaatctatcaacaagtacaaggcaaaacgtaacctgccgtttatgactcaggatgaattgttgatcaagttgttcaatgaagttgcttacgtatggccgcgtgtgggttatcctcctttggttactccgttcagccagtatgtgaagaaccttgccatgatgaatgtaatggctatggagaaaggtaaggaacgttggggaatgattgccgatgatatttgggatatgattttgggtaaagcaggacgtttaccgggtaaactggcccctgaaattattgaaaaggcagaacgtgaaggccgcaagttctttgatggcaatcctcaggacaattatcccgaccagttggaaaaatatcgtaagatgatgcttgaaaaacaatgggataaaggacaggatgacgaagaactgtttgagtatgccatgcatccggcccagtatgaagcttataagagtggaaaggcgaaagaagacttcttggcagatgtgaagaaacgtcgtgaggagaaggcgaatgccactactcctgtcgaagctgaaaacaaaacaaaagtactgacagtggatgtgaacggacaaccttatcgtgttacagtggcatatggtgctgtagatcctgctacgctgacagctgcttcgggtgcagttcctgcacaaactgctcctgctccggtaggtgaagggaaagatgtgctttctccgttggaaggtaaattcttcttggtaaagaatgctcaggaaaccccgaagaaggtgggtgaaaaggttaataaaggtgatgtgatttgttacgtcgaagcaatgaagacctataatgcgatccgtgcggaatatgacggtactataactgctatttgcgctaattcgggtgacacggtttcagaggatgacgtattaatgaaaatagtataatggaagatatatttgaaagactttatgatatgactgctttcagcaatattattgctgagccgcaattcttgataatgtatgccattgcgttcatcttactttacttgggtatcaagaaaaagtacgaaccactgctgctgattccgatagctttcggagtgttgctggctaactttcccggtggtgagatgggggttgtccaggccgatgagaatggcatggtaatggtgaatggagcactgaagaacatctgggaaatgccgttgcacgaaattgcgcacgacttgggcctgatgaactttatctactacatgttgattaagaccggttttcttccgcctattatttttatgggggtaggtgctttgacagactttggtccgatgttgcgtaatctgcggctttctattttcggagcagctgcacagttgggtattttcactgtattgctggtagctatcttgatggggttcactccgaaagaagcggcttcattggggattattggtggagcagacggtcctaccgctatctttaccactattaaactggctccccatttgctagggccgattgccattgccgcttattcgtatatggctctggtacccgttatcattccgttggttgtgaaaatctggtgtacgaagaaagaattgagtatcaatatgaaggaacaggaaaagaaatatccttcttcggtagaaatcaagaatcttcgtgtgctgaagattgtatttccgattgtagtgactacggtggtcgctctgtttgtgccaagtgcagtgcctttgattggtatgttgatgtttggtaacttgattaaggaaataggtagtgatacttcacgtttgtttgatgcagcttcaaatagtatcatgaatgcggcaactatcttcttggggttgtcagtcggtgcgacaatgactacggaggcatttttgaactggactactatcggcattgtggtaggtggtttcttggcgtttgccttgtctatttccggtggtatcttgtttgtgaagttgatgaatcttttcaccaaaaagaaaatcaatccactgattggtgctacaggtttgagtgctgtgcccatggccagccgtgtggctaatgaaattgctttgaagtatgactccaaaaatcatgtgcttcaatattgtatggcaagtaacatttcaggagttatcggttctgccgtggctgccggtgtgctgatttcattcctacaataaaatacattgtatttaaattattcggacacgaattatacggaaattacaggtgttttagacaatactgtaaaatctgtatagttcgtgttttttattcattctctctgtatcgttctcctagctaaaacaaatagaataggccctctcctcacgaagaaagcctatcatccgattaatgtttaatataagagagagttttatagtcctaacagttcattgaacttctctgctgttttgggatctgacggacgtgtcatattagcagagatgatgttaccatcccgatccagcaggataaaacggggaatgccgttaatgaggtaagcatccataaaggtcctgtctgttcccatgtgtaactggatccctttcaactgctcctttgttaccatgttctcccatgcctttttgttcttgtcgcatgacaggctgacaaaatgaatatcctttcctgcatatttctcttccagttcctttaacgcgggaagttctccacggcaaggaccacaccaggtagcccacacgtcaatatagatatattttcctttcaagtcagtcattgaaaccgtctttccatttatatccggataggagaagctagctgctgagggattgcctgatcttaatttttcccacttggtacaaagtgcgttgaatttttctatggactttgtatccttcacgtgtttgcggaataggacaatcagtccgtctgcttcatccagtccgttattgtctacaaagttataaacaaattggtcaatcagaaattctgcaaccttttcatcctgtatggttgcatctatgtagtttacacattgttctgttgaacttgatgcaatcgtttttcctttattactaaaggcgctgatagcatcgggaaggaaagccttatattctttcagcgctaataaaccggcattgatcggagtaatagcttccagtttctcataatatgctttggaaggaatatagttgtcatcctttccaaaatgaggatgatacaaagcgtatttggagaaataataatacgtatagaattgcagacgtattttttcctgtgcagtgaaatcggccggaagttttgcggcttccaatacttggcaattgactgcatacaggctgtctcctttgtgtataagggcggcttcctgcattttcatgtcgggcatgccgagtgatcggagctctttgcttcccagataggtgttgatagcggcgcctgctccttcaaaggttgtgtttctccacatgttatcactgtcgaatgacaaagtaaggtcttgattagggtccaaataaagggtacggcgtccgcgtgtgtattgcatggttacatattgcggagtgaatcccgtgatttctatgttgccgtttcctgcggcgtcaatcgctacttctttttgttcgccactttggctgaaagtcaatataactttgaccttctcattgggattggtgaccttaaaagtgagctttgcagcttccgcagcagtgaaggtactcagcgcaaggccaagtaccaggatggattttagagttctcatcttatttttttcttttaggtttcattttcaatgcatcgggacgcatgttatagactttctttccgtatgcgggttctgtgctgaggctggcagggatgggggctttgccgttcagtttacgaagcaccatttccaaggcggctgcatattcctgatggatgaaagcatcatctctgtctgtttggttataagcaatgtattgcagatagcctacacatttgttgaaccagaattcgggaagttcctctgccttgtatcccaaacgggcgataaatttcaatctgccgatcaactcttgttggttgattgtggtatctgcaatcatcgcatcaatctgggtagctgccgcttcatacttttgttcccggatatcattattgatacggatcattttcaggttgaaatcttttccttcatagttgcataaggcttcaatttccgccaattcgccgtatgaagtttcttttgccagtttggcatcaacattttttttaccgaaacgctgacagaaatctgcataattgtctgatacttgctttaggtacgggttcatgccgttgatggtgtttacatatacttcccatacatccggatcagtcagtttggcgcctccttttattaattcgtcaaaagcggtctgtacgttcttgcgtgcatagactgaatagtgataattgatgtaatcaattaaaaaagcacgctccctgtttcctttggtatattggtcttgcaggtaaaaagaacgtttggtaggaacggttgcgtcttttcctgtctgaataaactgttcgggagtctgacgactgctgctgtgatggacgatttcttcggtagcaggatctatgaatgcataggtgggataactgcgtacaccgtatttcttggctaatgtaactccttcaccttcttcagcatcaattttgaggttgatgaaagtttggttatagtagtaacccactgtaggcaatgagaatacggtttgtgccatattcaggcaaggtccgcaccattgggtatagaaatcaatgaatatcagtttattttctgctttggccttggctacggcttctgcccaagtagtgccgtgcaggaaattgattcctgcattttgggcatttaagtgaatcgcatagatacatgcgaaaatgagtaagatatattttttcatgtctttgaatttaatatgttaataaccggggttttgtttacattccagattagaactgatttctgacgacggaatggcatcaatacggcggtctatgatgcgttggtaataattgtctccttgtgcttccgatttctcatattctttttccaaagcttctcttaacgtcttgttcaaggcaagcagacgggtgaaatcgggtttctccgtgtatcctgcaaaacggatcatggcaaaccattcatgccagttctcgaaagacaattccagcatccattcgttgaatatggccgtttccagttcttcgttattggctggaagaataatttcggctcctgctctttcgcgtagtttacggatcggtgcataggcttcggatatagaggctcccgaacgatacaaggcttcggctttaatcagataaagttcggaaacacggctgaagatgacaggcatgtcattggcatcgttcagcagctttttcactgacttcagattataagccacggcagaactgcggctgtccatcaaactgtctactttagagaagatggcatcggcgcgaggatcatcccccaccagttccacatactcattggtgggcccccaatagccttgtttcttcgtggggctgttaccataacattgctggcgggtggaagtgttggttgcatctttttggtcgaatacacgagcgaacagaatctctttggttgttgaaaacttatcaaaaacgtcaccgtagtttgcttccggcaatggagcatttgtatcaatcgcatcattgactgctgctaccgcttctgtgtattttcctgcatacagcaatactcttgcctttaatgccttggctgcttctttagaagcttgtgaaagctttttccaatcaggagctttttcaatcgctatttccagttgatccagaatatattgataagaatcggctacggagctacgcgccttcaaagcattggatacggatggagcttcattgcgcatgaccaccccgtattcactgttcatatcccaaaattcgcagtaacgaaccaagacgttgaagtaggccagagcacgtaaataggctatttcacctaacacttcggctctacggtttcctgagaactctccgtcactcatacggttacaggctgtttccaggaagttggcatttttgattacagcgtaatctgcgtcccattccgttgcatcactgaatgatagggtaggcaacattcgctcggagtagtaaacggcattaccggcgcttacaatttcttgacgccacatggttccggctttgaatgaaccacttactgtaggaaatatgacattgaacccattcccgggcaaggagtaatagattccgtttaaagctaactctacagcagcgggtgttgtgatggcgccgtctaaatctgcttcgaattcgggcttttggtccaagacatctaccaactggcacgaggaaacgcccattgtaagtaaagctaagaatatatattttttcattcgattatacatttaaatgattataagttaatttttaaacctgccgagaaagagcggaaacctggataagctgaggtttcatagttaccgccataattactgttactgtttacggtagcagggtctgttcccggataagaggtgatcgtgaacaaattggtagccgagataaatagttgtcctttaattactttgtttaaaggtaaattataagtcagacgcacttcctgcaaacggaagaaggaggcatcaaacaattcatgatcggtgagtctaggtacaccgtcacctatatacaaggccgggtatttggcatctttgttggtgtcagaccatctgtcattcaatccatagtcaatcaaaccggttaattgtccgggtagattctgcaatgtcttgttatagatcttcaagccaccaatctgatatccgaagttggcgaacaaactaaattgtttataagataaattagcagtcaaaccgccgaacaaatccggatcaggattaccgataataacacggtcattgtagttgatgattccatccccgttcaggtctttgatttccaaatgtcccggttttaaggagttcccatcgtaataactttgtccctttgatttagcataggcgttcaattcatctattctggcctggtcttgtatgataccggcatattcataaccatggaaagctcccattggataacctacagccaatacttggtcggcatagctgccttgaaccactacatccatagctgattgtgctttaccttcttcaaccagtctggtgactttattcttgttatgtgacatattcaaggtcaaatccaaactccagtctttagtagataatacacggcccaccaggtttatttcaataccgcggttggtcagtgctccgatgttacggttcatctgcatggagccgccggttgcgctgggtgggaaatcaaatgaccagatcaagtctttggtatctttgatatagccggagatagaaccggtcagtcggtagtcgaacaatgcgaaatcaagacctaaatcatattgggtcgatttttcccaacggatgtcgcggttacccacttgtttgtgtataatggctgatagattattatagctggttgcttcgtataaatcacgattagagaagctggttaagttttgggtaccggtagtacctacgctggcacgcaatttcaaatcattaatgaatgtcaggtttttcatgaagttttcctgagagatacgccacgcaatggctcccgaagggaagaaaccataacggttgttcgaaccaaacatggatgaaccatcataacgtcctgtaaaagtaaacaggtagcgctccattaatttataattgatacgggcaaatgaagagaacaaaccacttgcattatatccgttgccccaagatgagatgcttgcagcacttcccagattggtgtagatgtcattatccggataagtttggccgttcatggtggtgctacggctgatgccgcgttcaaaggagacaccggctacggcatccagtacatggttcttgttgaactcatagttataattcaatgtattgtcgaatacggtttttgaatatttataatgatattcagatccgctagcttcatttctagtacttagaaaacttggactaaatgaattgttttcagtaaattgtaaattacctgataagctggaacggaagcggaatcctttccagatatcaacttctccatatacggttcccatgatacggtaaatattattatggttcttcttataggtgttagctaccggattggcactgccacttgataaatcaaattcaccattgtcattgtatataggaaggtcaggacggaaaccttgcgcactaaatagtgaagtgtttgcattatcttggtctgtatagctcatattggcattaataccaaaacggaggataggcagcacattcatttctgtagacacacgtgcgttataccggctcaggtcacctcctttgaccataccttgctgatcgaatactgataatgaaataaggtatttggatactttactgcctccgcttacagtcaagtcggcattatggcggatggcagtttgtttcacttcgtcaaaccagttggtattagcactacctaatgcagtggaattaggctcaagaatttctaatgcatattggttggacggatcatataccaaggtttctttagcgaagcggcgtactgtttcgcgccattcgtcaccatataaaatacggaaattcttgatctggacatcagtggttacattataattgaagttgacggtgggtttggaaccttctactccttttttggtggtaacgataactacaccatttgcagcacgagaaccatagatagcagccgcagaagcatctttcagtacgtccatagactgaatgtcattgggcgaaattgcatccagcatactgggatcttctacaggaactccatcgatcacatacaagggttcattggaaccggtcaatgaggtagcaccacgcacacgcacgcggactgtttcgcccggtacaccggtattttgtgatacctgtacaccagcggccaagttttgaagcatggaagttacattaggagtatttaattgacttaattgttttaaccctactgaagccacagaaccggtcaaatcttttacagaagaagtaccataacctactacgaccacttcatccagattggttacttcgctttccatttttatattgaagacatgtctgttaccaattttctccttaaccgtctgcataccgataaagctgatcatcagttcgtcgtttttagtattttcgggataagacaacatgaactgcccatccatattggctacagtaccgaaagttgtaccttggatgacaatagaagctccaatgaccggttcacccgtatcatctttgataactccggtaatcgttctgcgtttggcatttctgtcaatcggtaatattaacacataattgttttctaccaactcataacgcatacctgcctggctacaaatcactgaaagtgcttgctccagaggttctttgtttaatgttagtttcaaaggtacattgtttaaagttgcatcttcgtacatgatattaatgccggtttgctttttgaccatgttaagggcctctttcacactgatgttttcacttttgatagtgactgtcttgtcagctgatacatttgcaaacacagcgttgaatgtgcagaatatgcacattagcattactaaaaacctcatttttggaggtttagctactaaacgcttccaaagctcgtttcttttcataaaactcaaataacttatttaataatttagaatgttcctgttatacagggcttgattattgtttttttactaatatggtttctccctttttctcaaacttgacatcggatacacgatgaatgatgtctagtgcaaagtccaaaggcttgttacggaaaataactccggtgaatttcatggtttctaattccttggatgctatttgaatatctacattatagcatcgggacagacgggctatcagcaaaggaaatggcattgcgtcaaactccatagcaccctcagtccatgaaatatagaattcagtatctactttggaaacttttgattgtgcagaagagtaatgttcgcctggtagtagataatattcacctgatggagcatttacctttaattttccttcaattaaggttactgataattcttcatcgggataagccgagatattgaaagttgttcctaatacataaatagcatggtcgtgtgtttttattatgaaagggcgggcttcatcgtgtgttacctcaaacatggcctctccttccaaagtgacttctcgggtatctccgaattgaaccggaaaatcaatatgagagtccgcattcatttttacttttgtgccatcagctaatactattgcgtactccgaaccttttggcactataattttattctgtaataattcagtatccagtttgggtttgtggggggaatcactttcttgaggaaatatgatttctccattgttgatatgacttccattgatttcccgttggttttcatagaggggaactacagaatggtttgcttgtacccaggtggctttaggagtttctgtgtttttgggaagaggggattgttgtggctgttcgttttgggcaatggcaggtactggcttctggccattgaaatataaaatggaggtaattcctattagtattgctattgcagcggccgaggaataaatagcgatacggcgatgaatagtatgggaccggttacaacggtgttgaatagacttccatgaggcttctttatcaaactgatgtaataagttaagttggttgtttacatggtggagtgaaagtaacttcacaaagatttctctatgcgatgcgtcttcttcaatccatagctttaattcttccaattcctgctcgttaagctgatgggacaggtatttttgaattagtgtttccgttttactcttttgcataattgttgtacagtttaacagaagtatcacaaatacgcaaaatgggtgacaaaaatctgaataaatttataaattaaataagattagaatttctatcatattgaaacgacgcaacatttttagtgcgcgtgatagatgggtttttactgtatttacggaaatatggagctcttcagctacttctttgtactttttatcttccagaacaattttgactagaacattgtactcttgttctggcaatttttttaattcagtcagtagctggtttcttttttgcaatagttcttcctcatcataaaagtcatcgataggagaataagattcttcttccatttcgtctaaagaaaagtaacgttctcgctgcacttttgtcagtgaagagaaacggacggcattgaacaaccatgcgtgcagattggaggaaatggtggtatgtgagtttttgtcccaaaaactgacaaatagattctgtacaatatcttctgaagtttccgtagagcctgtgaattgtacagagtagaggcataaagggagataataagtatcatacagtagacgaaaggccttttctttgttttcagcaaagagagctagtatcctttcgtctacttcattatatctattgtattttcttgcattattgttcatggatgccttttgcggcacaaaattaggaatttaaccgacacgatatacgactttcaccgattaaaaatgcaaaaagtacaatgtattatgaatattttctttatttttcaattctgaaccagtcagcgtctgtccatcctccgtcattggttacaatagcggggcgcgtacagaagatacctaccttggctcctatccatttaccttcttttacttggaaagtttctcctaatggctggaatttcttgccgtccgtactgtaactgaggttacatttcactaataagtcgtgaccgccttcactggctttaatcttgtctccttttgcagaaaatttagcgcgaagatagattgtgccgccttttaagggaacggaagcatttactttttcagtagccccccgatcggctttcaggcactccacttgtgacaggacaagtccgttgtctgtgttttcaacaactaatccggcataatccattcccattacaaccagtcccgtacgttcacctttatatttttctgtcggcttgaaagtaagcttggtggtggcagtaaaattgggagccggggttttttgtagcatcagattagaaacattccataaacttttataatcttcgggaactgggtaggagtatagacgtacaaatccttctcctccgttgaaataagcccatttttcattgatgttagcctgccattgccattgaggagacaatgtataaccatcaaactcgtcactttcttgcggggtacaaataggatagttcttacctacattaggctttttataagtcagaacaggttcaccacaaccatcgccgtctttatcaacacctataacgggccagtcatcaacccatttcataggttgcaggtggactaagcgtccgtaagctcctacgtcttggaagtgcatgaaccagtcttctcctgtaggggtgtctacccaaccgccttgatgaggtccgttgacgggagagttgccttgcgctaatactgttttccattcgtatggaccgtatacgttttttgagcgaagtacgacttgccatcctgtaggaacgccgcctgccggatggaagatgtaatagtatccattacgtttatagaatttgggcccttcacaagtttgatgtgcttcatgaccatcgaaaatgatacgggattgtgtgatagctttacttgcatcagcacttagctcacaaattgtaattacacttttcagtccggcccggcttcctgcataagcgtgaaccagatatacacgaccgtcatcatcccataatggggtcgtgtcgatgatgccctttccagctttcaccaaaactggctcgctccagggacctttcggatctttggctttcaccatgaatactccttggtccgggtcaccccagaatatatagaattcaccgttatggtgacggatactgggtgcccatacacggttgccatgttcaggacggacatcggtaacagggggcagtgcgtagggtacagccgcacctatgatagtccagttgacaaggtctttggagtgtaatatttgtaaaccgggcagacagttgaaactggatgaggtcaaataataatcgtttcctacacggcaaatgtccggatcggagtaatccgcatacaggactggatttttgtaggttccattgccttgatcggccacccaggcttgggatacataattctgtgcgggagcagataaaaaacagcttcctagcagacagagagtgattagtcgtttcatggttttagattttttatttaatcgtaattttgcaaggatgttccaattcttttctccattggggaagataattgaaccagtctttcatatctttaaatccgaaactttctttttttgaggtgaaagtaacgtaatagtggaaatgctgttgccccggtgcttgtaaggtatataagtagtttgatccgtcttgtacttctttaccgatatatttaggaatgaaagttcccatacctgttgtttccttcacatagcctatggtgtctgtgacaggccagtcggttccccagcttccagtcagtcctttatggtcgctcatgtgacctccttctttcagaatctgtacacctgctgcaaagacttcctgtttaagcggacggtcaaacaggacatctaccttcatgtctcgatgaccgccatagatggtatatcgattgatcatgttcaaatcgtttccttgatattcccaaccgatgacttctgcttcgacgatggcacgtacaggtccggaggctagtacacgttccgtgcggtttactactggttttatgtgggtcgcttcagtaccattccaaccttttaatgcacctacaccaccactattgtaaacacgtagcgcatcatctccgtagccgttggcacgttgcgctttggtagggtagaaacaagtctcttttatttccagtcttttatttactttgctatatggatctaccgtctgtttttcattgaaatagatacgataggcaactaattcactctctatagccggtccgtgatggtaaacaaaactatatacattctcggttcctgccgctgaaaatcccgtaatattggcgaatttgttgttatgtccgtaagctttcatttgggcataagtacgtgccggatagtttttttcacttttttctgaagagagaattacacggaaacttttattgcttttggctggcatatcgataaggaaagccagttcgtcagcacgtgcgtcaccgttcagatcgtctagttgggacggaatttctttattaccttcccatacagtggcggatttgatgttgaaacctgctttcaggttatttaaatctatcactaccggttcatcggtcttattttgagtccattcattactgacttctacggtcagtgtcttttcgcctttttgtgcaaaagagttggtaaagcatcctgctaataatgtgaggacaataattgagcgctttttcataatgatgtatagtttattattttaagcacggatcatacggattacacagtgttagtatgaaaaccgtgtttatccgtgcaatccgtgctttactatttttataaattaagtggagaaatgcactaatgggtgtaagaattagaagttgagttcttctccttgtgccccgatttcagcatgattctttccgtctatcattacattggaaacattttgcatcttcaagttctttccactttttaataactctattttgatatttttcatattaacttcgtcggcttcgcttaatactacaccttctttagcattagatacgatgatattctccatattgatattcttgattctcatctcaggcaaaccattgaagaacacagccctgcctgctccgttacaggttacatctttgataaagatattacggaatatcggagtttcttctgttacaggagggatggtagtttctgctttcttttcatcctgattagggtcttcaccacgaccttttccaccatagtataaattgaatattaatgcttcgttcggaatattaatcatgttgatattgctgatgtagatattctctaccaatccgccacgcccacgattacttttaaagcgtaagccaacatctgtacccatgaaagtacaattgtctacatatatgttgtttacgcctcctgacatctcactacctacaacaaaacctccatgtccatgtaatacggtgttgttcataacgatgacattttgacaaggttcaccgcgtttgcgcccttgttcgtcctttcctgactttatacagataccatcatctcctgcatcaaatgagttgttgataatcaatgctttattacatgattccaaatcaagagcatctccgttttgtgagtaccaaggattagaaactgtaactttattaattgtaatattttcacatgatagcggatgtaagcaccaactaggtgaatttttgaatgtcgctccttccagcaataccttattacatttgatgaaacttagcaatacaggacgtaaccaatcgcgcatgtagtcccagtcagaatcggtaagttctccacgaggtacattgaagttgtcttttgataggatagcacctttcaatgcaccttcactgggataccagattcttccgtcggcatctactacaccaccagaggcgatcaattttttccattgaccttcagtcagtttatctttcttggtcggacgccatgtgtctccattaccatcaaatactccgtgacctgtaatcgctatattttcagcattacgtgctgaaataggagactggcaacgacgggtttccaaaccttcaaaagacgtgtttataatgggatatagtgaatggtctgcactgaataatactaatgcattcttttctgtatatagattcacattgctcaatagttcgatgggaccggtcaaccacaagccttcagggataatgactttaccaccgcctttggcattaacctgttggattgcatcattaatagcctttgtgtttaaagtaataccgtctggtttggcaccgaaatctatgatgtttaccgaatagtctgggaaagtaggttgttcaactttatccatcttgaaagggagacttgtatagatggcgggatctatgatatcttctacaatagtcgtagacggacaattattacatccggtcaaaagggggattaaacatgtggcaggaagtaatagaatcttctttattaaagtagtcattggtattatatatgtttaagattaataattatctagttgattgttgctttaagaagtcttatcactctcccgtaaaagaccctcacgggctatttacgggagtagcaataatgtttcatgttaacctaattctaaccttaaataaatattatgaaaaaacctcttaattcgatggcaaatataactgaaagaattgtcctttatgtgcactatttgatagaataagtggattttttgttaaattctcatttagctgaaaccttaaatggtaaaaattagttttataattgcattatttcttcatttgtgtgcaaaaaaagctatgattaatttatttgtttgtatctttgcaaactaatttaacaataaagaaggtatgagttacaatttgttgaaaggaaaaagaggtattatttttggtgcattgaacgaacagtctatcgcatggaaagttgctgaaaaggctgtagaagaaggtgcgtccattacattgtccaatactccggtagctgtccgcatgggagaagtttctgctttagctgagaaactgaattgtgaggtaattccagcagatgcaaccagcgttgaagatttggagaatgttttcaaacgttcgatggaaatattaggtggaaaaatagatttcgttcttcattctatcggtatgtctcctaacgttcgtaagaaacgtacttatgatgacctcgattatgatatgttgagcaagactttggatatatctgccgtttcgttccacaaaatgattcaagctgctaaaaagctggatgctattgcagagtatggttcaattctggcattgagttatgttgctgcgcaacgtacattctatggatataatgatatggcggatgcaaaagcattgcttgaatctatcgcgcgcagttttggttacatttatggtcgtgaacatcatgtgcgtgtgaataccatatctcagtcgccgactatgactactgccggctcaggtgtgaaaggtatggataaactgtttgattttgctaaccgtatgtcaccattaggcaatgcttcggcagacgaatgtgcagattactgtattgtaatgttctctgacctgactcgcaaagtgactatgcagaatttatatcacgatggaggcttctccagtgtaggtatgagtttgcgtgccatggcaacttatgaaaaaggtttggacgaatataaagacgaaaacggaaatatcatttacggataagaaatagatgatacgcaaaattatattcatattagtgggatgtcttgttgctctttcctcctgtcaatgggatgggaagagtggcaatactgctgatgtggatgtaagagttgcccgttatgatcgtttgcagtatgagtatgttacgatgaatagtttctcggcactgcaaaaaatgaatacggactatcctcaggttaccaagctgttgatagaagatgtattggcgataggtgaggtggatgacatgaagattaacgaccggatgttggaatattattcggattctaccttattgactttgatgcacgatgccgaagagaaatttaaggatcttagttgggttgaggaaaaactgactaaaggtttcaaacgtttgaagaaagaggttcctgcattgtttgtacctcatttttatgctcaaatagctgcgctgaatcagtcggttgtagttggggatagtattttgggctttagtattgataagtatatgggggcggattatcctttatataaacgcttctattatgactatcaatgtcgcagtatggagcctgatcgtattgttccggattgttttaccttttatttgctgagtcagtatcctttgccatggcagcctggtcgtactttattagatatgattatgcatcgtggaaagataaattggatagtggctcatattttagggtatgaatcttttgagaaagagatgggatatagtgaggatgaggctgagtggtgcaggaagaacaaaataagtctgtggaagacaatggttgaaaatggtcatttatatgctaccgatcctcttgttgtacgtacttatatacgcaaggatccctttatttctattatgggtgagaaaactcctgcaagcattggagtatggatggggattttgctgattgatgaatatatgaaaaagcatcctgatatgacaataaaggatttgttggctaaaacagattatcatcagatgttagctgaaacagatttcaaaccttgatattttgactgattagtagtatgatggaagttgctttgtatctattgcctgtcacattgggcgaaactcctgtggaaaatgtgttacctgtgtataataaagaggtcattctcggcatcaaacattttattgtagaagatgtacgctcggcacgtcgctttttgaaaaaggtagatcgtgggattgacatagatgcattgactttttatccattgaacaaacatacttctcctgaagatatttccggttatctgaaacctttgttagccggacagtccatgggagttatttctgaagccggttgtccggctgttgccgatcctggagcggatgtggttgctattgctcagcgtaagaatcttaaagtggtgcctttggtaggaccttcctctattattatgtctgttatggggtcgggttttaatggacaaagttttgcttttcatggttatttgcctattgagtctggtgagcgtgcaaaacgtattaaggtattggagcagcgtgtttatgcagaagatcagacgcagctttttattgaaactccttatcgtaataataagatggtggaagatattcttaagaattgccgtccgcaaaccaaactttgtattgctgccaatattacgtgtgaaggagaatatatcaagactaagacaataaaggagtggcaggggaaattgccggacttatcgaagattccctgcatattcttgatttataagtagtgcgataacagatattcatttaaattcctcccacatttgtgccactatgttcagatgatctacttcttcttttagaaaagaactatattgggcagaattcatttctatttcttcgggagtaacaaatttccctccagtaaaatgtatctgttcttcgtcatttaaaggaagaatatatagcatgatgattttttttactccattggtttcttttaccaaatgtttcagactgaagcgtggctccggttgtccggtaatatggttgctatatttattttctacttctttggcatatttatccgtatctgtcttgcaggcataaatgtagtcttccataggtatgtccaacttgccgggttcttcaccttgataactgcggggggcaacataaatctttccattgcaaataggggcgatacgtaagaaaggcatttttttataagttaaactgattgttttcacaaaagcatgattgacaataatgcaaatgacatatatcaaaggagggatgatgtgggtcatagcgtaaagggtattataagaaagtggactgaaaaataaataaattatacaggaagcaaacaagtgaatgccggataaaacagctataacctgtgtggcccaacagttcagaatagatatcttataatgaaagtaggagaatagttttgcataaaaattggggaccatgaggtagagtagtgaaaaacagagtatcagtatttctaacgtaatgggaactgttcggtccggaataagcatatctccgcttataccttttatgatggatgcaatgattaatgccaaagttccatgtagtaatactaggtttggctgataaacaggaggtttgacaagtctgtataggatataaataatgctagccaaactacagacatacaaaacagctgcatcttgaaagaaaatgcagaaaatcatacatacgatggttggaattaaccctgtagacatgattaaattcttgtattccagtaacgatttcattctctctatctctatttatatctttataacaaaaaagatataaagttggtttactcgttaccctttaaattttatatgtttttctgcatgataggaggaacgtaccaaaggtgcgctttccacttctcggaatcctttctttaatccaattgttctatactgtttgaattgatcgggggtaatatattccgctaccggataatggcggtgggtgggttgtagatattggccaatagtaagtatcttgcaaccttgtgccaataaatcgtccatgacttcttctacttcttccggccgttctcccaaacctaccataataccggatttagctgtaataccattattggctatttgtttgatgacctttaaactggttgcatagttggctgcacttcgtaccaagggactgatgcggcgtacggtttccatattgtgtgaaatgatgtctggtttggcgtcaatgactagctgaatcagttcgcttcttccttgaaaatcaggaattaaaacttcggacgtggtttccggattcaatcgtttgatttctgaaatcgttttagcccaatgggcagcacccaaatcatttagatcatcacggtctacagaagtaataacggcatgggataatttcatgagttgaatggactctgctacatgggtcggttcttcagggtctaacggaagaggtcgtccggtctgtgtgttgcaaaatttgcaggaacgggtacaaatttcgccacctatcataaaagtggcagtaccttttccccagcattctcccatattgggacatcgtccgctactacaaatggtatgtagtttatgagaatctacaatatgtttggtctcggtatatcgagcgtttgcccctatgcttattttaagccagtctggttttttaacatgattcatgatgatattagatttataattcaccacagattataccaatgtaaattgttctcattcggtttttatgtaaaactgtataatctgtgatgaatggtttttattttaaattatcaataaagaaattggctacgcgagtcagtaaatgtctagttgtgttgcctccactgattccatggttgcggttggtatagatttgcatgtcaaattgcttgtcggcctgtaccaatgcttcactatattctgcgttgttacgtaagtgtacattatcatctgctgtgccgtggatcagcaacaattcaccgttcagtttgttggcacggttaatagcagatgcagcattgtaaccttccatgttttctttgggggtacgcatgaagcgctctgtatataccgaatcgtagaaacgccagtctgtaggagctgcaacagcgactcctgctttgaatatcggtgttccttcactcatggacattaatgtattgtaacctccatagctccatccccatataccgatacggttaccatccacgtaaggtagtgtacttaagtatttggcggcttctacttgatctttcgattcttttactcctaagttcaagtaggtacatttttcaaaatcagaaccccggccaccagttccgcgtccgtctacacaagccatgatgaaaccttgaccggccatataagcttcgaacatgccgccatctctacgggctccaattccccatttgtctgcaacttcttgtgaacccggtccactgtattggtgcatgataacaggatattttttgtttggattgaaatttgcgggtttcattatccaaccattcaattccacaccgtcattggtcttgaaactaaatagttctttacttggcatattcagacgtgaaacttggtgtttcaatttgttattatctactaaggttgccaactctttaccattattgtcattaagggtaatgacaggaggggtgttgatattagagaaagtattgatgtaatacttcatattgttactgaaaatagctttatgagttccttcctgcttggacagtttggtctttttacctttgccatccactttgtagatagcggtgcgtagcggactgccttcattgctctcaaaatagaatgtgttggtagcttcatcccatcccaggaaatctttcacttcgaagtttccttttgtgagttgcttaaccaggtttcctccgctagtgtaaagatagagatggttataaccgtctttttcactcatcaccacaaaattttttggatagaaaacgatgttggagtatgcttcttctttaatgtattggggagcttcatcacgtaccatcagtttacacaatgtacttcgtggattggcaaaatagaggtcgaaacggttttgatgacggttcaaagtcatgattgccaacgcattctcatcatccgtaaacttgatgcgaggaatataaccgtctgcgtctagaggcaagtccatcttgcgggttaccttactttttatatcaaaagtatgaacggttactttggagttgtcaattcctggcatagggtatttgtattcatattctcccggataagtgctgaatttctctaatgcgggaaccatacctttgtatagtggaaaagaatacataggtacttgactctcatcaaaacggatataggcaagcatctggctgtctgcactgaagtcgaaagcacggttgaaaccgaattcctcctcatatacccagtcgggaataccatttagtacttcgttgaatttgccgtctttggttacttgtgattcactgttgccaaacaataattttaccagatagatgttattatcacgtacaaaagctatctgattgccatccggtgagaataaaggaacctgttgtgggccgttttctgagagcggttccattttattgttttttacgttgaaaatataataattggcagtaaacgaacgacgataaatcggtttggtatcagtctgtattagaatcagtttctcatcgggtgacatgatatagtcatcaaatgacttgatgctacagtcacgggccgtatttacatcgaagatggtacctgtctctttgccggtcttgaaagaatactgcatgatttttttgccatcagtactcatttgggtgtaatgttctccatccaacatcggtttgatacctctgattccttcggcacgatacgttctgtttgctacgtcttgcaagcttacttgttgggctccgactgtcagcaggcagaagaataaaataataaatatgcttaattttctcataatagataaattctttaaatgataatcaaagacaaaggtaaaacttttgtttgaaaatacgtatctttgtcccgcaaaataagttcatgaacagagagatgctttataacgacttatccggctttttagccatgcactttccttgcaaagtgcagaagatttctattaatgccggatttacttgtcctaaccgtgacggctcggtaggatacggaggttgcacttattgtaataatcaaacatttaatccggcctattgccatacgggaaagtctgttactcagcagttggaagaaggaaagcggttctttgtacgtaaatacccggaaatgaaatatctggcctattttcaggcttataccaatacgtatggggaactggaagagttgaaaagaaaatacgaagaggcgctgatggtagaggatgtggtagggctggtgatagggactcgtccggactgtatgccgatatcattactggattatttggaagagcttggtaaacacatttttgtattagtggagtatggcattgaaagtacggatgatgaaacgttgcgcaggataaaccggggacatacttttgccgtttctgcagaggctgttcggaagactgcagagagagggattttggtaggagggcatataatccttggtttgcccggagaaaaaagagaaatgttaatcggacaggccggagtactttcacaattacctctgactactttaaagctgcatcagttacaacttattaaaggtacgcgtatggcgagtgaatatgtgaaagatcctgaagctttccatctttatacagctgatgaatatgttgatttagtcattgattatatagaacatcttcgtccggacatcgtactggagcgttttgtttcccaatcacccaaagaattgttgatagctcctgattggggattgaaaaattatgaatttacgaataaggtgaaaaagcggatgagagaaaaagatgcctggcaaggcaaatactataaatattaaaagaaggaaacagatatggaaatcaaaggaaaagtacattatgtgggagtgaatgaccgtaacaaggctttgtttgagaacttgtggccgttaccttacggtgtgtcttataactcttatttgattgacgacgagatggtcgccttggtggatacagtagatgtatgctattttgaggtttatttaaagaaaattcgtagtattatcggtgataaacctatcaattatttgattataaatcatatggaaccagaccattccggttctattagtttgatcaagcaatattatcctaacattgtgattgtcggtaataagaagactttcgaaatgattgaaggattttatggtgtaggcggtgagcgttatgtagtgggtgaaggagattttttagctttgggacaccacagactgcgtttttcattgattccaatggttcactggcccgaaacgatggttacttttgatgaaacggaaggtattttgttttccggtgacgctttcggttgttttggtgcattgaatggtggtgtggttgatacaaatattaatacagatatttattggaatgaaatggtgcgctattattctaatattgtaggcaaatatggtgcgccggtacagaaggccttacagaaattgcaaaacttgaaaataacgactgtttgttctactcatggtccggtatggacggaagaaattcctcgcgtggtacgtatttatgaccgtttgagtcgttatgaggctgaagaaggggttgtaatagcttatggctcgatgtatggtaatacagaagaagtggcagaagttattgcagaagaactgagcaagcagggaattcgtaatatcgtgatgcataatgtttctcataccagtcattcttttattattgcggatgtattcaaatataaaggactgattgtgggatgccccacttataatactcagatgtatccggaaatggaagctctgctgagcaagctggcttctcgcgagataaagggacgttatctgggatattttggctcatttacatgggctagcgctgctgtgaagaaaattgcagagtttaatgataagttgaaatttgagcctgtcggaaatcctgtagaaatgaaacatagcatgaaggccgaaactaacactcaggcaaaggagttggctaaggctatggctgatcgtttgaaagcggatagaaaataaatcttgtgatagaacataaatgacgcaaatgacacatgattggtaagatcaagcttgtgacaattgcgtcattcgtgttctaaaaatttctgacgttaggcttgatgtacagtaagctgcgggaatgggaagttaattccttctttattaaaagtagtataaacagtctgattcatactgaaaaatacgttccaataatccgaactattcacccatacgcggatttttatatttacactgctggcagcaagttctcctaattcaataaaagggggcggactggtaagaatacgtttatcattggctatgatttcgcgcaatactttttctactttattatagtcttctccgtagtccacgccaaaattccattctatacggcgggtgtccagtttactgtaatttgtaatgaccccactactcatggctccattaggtacatatatcatcttgttgtctgcagtgataagaatagtatgaaaaatctgtatttcttttactgttcccgaggcaccggtagaagcttcgataaagtcccccactttataaggcctgaacaataagataatcagtcctccggcaaaattttgtaagttaccagacagtgccataccgatggcaacaccggcagaagcgagaagtgcggcgaatcctgtcagttcgatacctaatttccctatcacagcaagaatcagcatgatgagcagtaagatattcaccatactctttaggaatgactggatactcgggtccacttttcttttttccaaaatacgtgcaaaaagtctgttcagccaatttatgaggaactttccgattataaaaataataagtgctcctaatactctttctcctaattgaatgccggagtcgatcagtttctctaatgcattggttaattgaatacttgtttcagatgctaataacatgataaatttactttaatttgacatttctaatatataaaacaattcagattaaaaatcgttcagaatacctttgccttggcgtacaatttctgcttctccgcttgtacagttcacaatggtagaaggttctatgtttccgatacctccgtcaataattagttctacctctttcccgaatttttcttctattagttctggagtggtaatatattctatgtcttcaccatctttcagaggcaacgtggtggtcatgatcggtgcttttagtatatggcatatttctctgatgatgttgttgtcaggtacgcgtatacctacttctttacggttcttgaatattttgggcagacggtttcccgtattcaggataaaagtaaacggtccgggaagatttcgtttcattagcttgaatgtgctgttatctactttggcatattcgctgatattgcttaagtcgtaacagataatggataaattgtttttacgtggatcaatgtttttcagtttgcagatacgttctattgcacgttctttcaggccatgacatcctatggcatacatcgtatcggtagggtaaataattaacccgccctcttccaatatccggattacttcttccagatctttgggattattattcttattataaagtcttaaaagcatgttattttaatttttagaatttttttcacgcaagcgttccgcaatagcccattgtagggcggcttcctcttcttttcctactttcatcaatacgtctccgaaatattcatgggcctttggatgttccggttttaaagaaacagcccggtcaaaatctcccaaagctccttctatattatctagtgctagtctgttttttcctcgattataaatagctttgaataaagcgggactaaggcgtactgcttcattcagacaaacttcggcttcgtaatattccttgtcattatgtaatgtgatacctttacgcacccaagcgtccgtataagaaggattcaattcaatcgctttgtcataattggcaatagcagcacgtgaatcatgtgcttggataatacattcatttcccattaaataatattcgcgggcatatttttcaagatttttacgttgtacatggaattggtcttttagccgtttgttttcgaccttcaaattgttgatgattcccagtttcttacgtataaatcttttaatcaaaggtttttcgatgtcataacgtgaatggatggcaagaaagaattgttctagaaatctttcaaaatcacctttgtcgaagtgttgtactgcttctacatattgtacatcagcttgtgcctgcttcaatgctttttcaatggactggcggttgttgaatcgttgagagaactttactatttccggacggacaaagatatctccacgtgtaatttgcttttttagttggatgccgtttagtgaagtacagcggctcaatgctacgtaggcttgtccaccggcaaacacccctcctgtaaaatcaataacgaccctgctgaaagtcaatccttggcttttgtgtatagtgatggcccatgccaaacggataggatattgtataaatactcctaactcttcttcttctatttttttttctagttcattgtacctatatcgtatattgcgccaactgtcttttttaacgtcaaattcttgcccgtcttctgtgataacatataatgtatcctcttcgtctatacctgaaatggtgccaatcgtaccgttcacccaacggcggtcgtaatcgttttttataaaaataatttgtgctcctggttttacttccagttccatttgggtgggaaggctgctttctggaaactctccatgtatctcaccggtcagaatcgttgattctccaggcagttcagataatttcttttcattgataaagtctacggtatctctccgggtagcaagtgtgatatacatatcactttcattttcttctatttgagtgttgtaacgggtgtttagtagttgtaagtcagctgctccggcagtattggtccggatatgatccaatacattaacaaaaactttgtccgactggcggtatacttttgtcagttctatggataccaactccatttcctgaaagactcgtgccgaaaagaaataaggggtgggatagaagcggttgattatctcacgttcgtcatttttaatgactggttcaagctgaaaaatatctcctaccagcaaaatttgtttgcctccgaatggttcacgcatattttgtgaatatacccgcaatattttgtctataaagtcaataatgtctgcccgaaccatggaaatttcatcgatgatcactaattctatttcttttatcagtttgcgatgggcggaagtatatcttagaaagctatgtaactttccatctttcaaactgaatttaggatcatccggcaaaagtggatagaatggtaatttaaaaaaactatgcagtgtgcttccaccggcattgatagctgcgatacctgtgggagccagtactatatgtttctttttggttacttcgcagacatattttagaaaagtagatttacctgtacccgcctttccagtgaggaatactgactgacgtgtatattggataagattcaaggcatcttgaaactctttattatgggtatctacttgcatttgtccatacgtttaaaaatgaatgaacaaagatagtggaaatcccgtaaaagggcataaaaaagacggttaaataaccgtccttttttatagtcctacagggtgttgctctgtattggttctaatttactttgtttcgttcaacataacgtaaccccaaatcataggatcagcgttagcgattttgtgaaaaatgttttttacctttttcataatgttatcctttcttttttaattaatacctaaaaacactcataaatagcaggcatacctcccggttagccttctttaaacaatctttctttttaccttagtagctactaaaaaatatctttttatgttttacaacacaaagataaagcttttgttcgttataatatgtattttgcagcatatttttaatcaatattccaattttattgatttaggtcaacaaagtaggagcttcttgttgcattttggtgaatattttgttcgtttctgccgtataacatataaatcagtttgcttacctcaagaaatattgtttgatttgtgatatcataataatatcaaaataaatcattatggaaacaaaagaaatgtcttacaatgagctggtaatcaatggatttatggctttgttctttaacttggttatgttgcctgcactagtattcctgaactttttgatttttggacaactaccttggttatctattcctgttttatttgtgctggtattgttgtttgtgctgatgcttccgggatatttttctcaagaacctaatgaggcacgtgtaatggtgtttttcggtgaatataaaggcacttttaaaaacacaggcttcttttgggtaaaccctttcatgaacaagaaaaagttgtctcttcgcgcccgtaatctggatgtggagccgataaaggtgaatgataagattggtaatcctattctgatagggctggttttggtttggaaattgaaagatacctataaggcgatgtttgagattgatgcgcagacgatggcggacagtaaagggactgggacggcaagtgttagcgtggcagggcgtatgaatgcttttgaagattttgtacgtgtgcagagtgatgcggctcttcgccaggtggccggacagtatgcttacgatgacaatgagcatgatactaatgaactgaccttgcgtggcggaggtgaagaaattaatgaccagctggaacgtcagcttaatgagcgtctggctatggccggtatggaaatagtagaggccagaatcaattatttggcttatgccccagagattgcagcggtgatgcttcgtcgtcagcaggcaagtgctattattaccgcgcgcgaaaaaatagtggaaggggctgtttctatggttaagatggctttggataaattagccgaggatggaattgtagaactggatgaagaaaagaaagccgctatggtcagtaatttgttggtagtgctttgtgcggacgagccagcacagccggtaattaattccggaacgttgaatcattaatgtaggaaatggcaaagaaagagatgataaaaagctttgtgctcagagtggacgcagaaactatggaagctatcgagaaatgggcggcagatgaattccgttctacgaatggacagcttcaatggattatagcggaagctttgcgcaagagtggcagaatgaagaaaaagaagacaataatcaaaaaagaagaaacagaatgatacagttattttgattgtttatactgttttgggtctgtaaaaagggcatcaatatcgataaaacaaattatttttcttattttcatagggtattttaatcctgggtgatcttataagtagaaacaggattagtatttacttttttaataccttaatgaatatgagagcgcataaaaaacaatttattgaatggacactgctcattgttctttggctgagtgccattccgggatggagccaagaggaggtaccgtttgctgaagagaatacttatattacagtcagcggtgtagtaaaggacaaacaaaatagaaggactttagagtatgtcaatgtatctgttccgggcagcagtgtggggacggtgacaaatgcggatggtgaattttctttgaagatagaagatgcggagatggtttttgctttagaaatttcacatatcggttatcataacaatagagtacgtttagataaagaacatttatcggatttaaagatttaccttacccctcatgccaatatgttgaatgagattgtggtttatgcccacaaccctcgttttatagtggaagaggccattcgcaagattcctgtcaattacagtaataaaaacaatatgcttaccggtttttacagggaaactgttcagaaagggcgtcgttatatcaatatttcggaagctattattgatgtttacaagacttcttatgaggatatgacaactactcgagaccgggtacaggttttgaagggacgtcggctgcttagtcagagagccagtgatacgttgggggtgaaactggctggcggtcctactttatctatctatgtggacattgtgaaaaatcaggatgcgttgttggatgtggaaacgttgaactattatgatttctttatggaagaaccggtacagatagacaatcgtcagcaatatgtgatcagtttccgtccccgtgtcgttttgccttatgccttgtattatggcaaattgtatattgatcgtgacaagttgtcgtttactcgtgcggaatttagcttgtctatggataataaagtcaaggcggtacaggctattcttgccaagaaaccttatggcttacgttttaaaccacaggaactttctttccttgttacctataaagatgtggatgggaaaacctttctgaactatatccgtaaccgtattcggtttaagtgtgattggaagcgcaagcttttctctaccggttatactgtgctttcagagatggtggcaacggatagggaggaaaataatgtggcgataattcccggaaagatggcttttcatcagaaagatgctttttatgataaagtggatgaatattggagcgaggatttctggggctcctataatattattgaacctacggaatcattggaaaatgcagtccataagttaaagaaacaatcgcgttaaggcctcggatgaagtttgcatggttgaaaagaattaccaaaaaagaagtggatgctgaatgatttgttaacactgaccaaaataagggagggagatataaaggcgtttgaagatgtgtttcgccgttattattcccctctctgttggtatgccatgagtatcaccggcagtatggaggctgcggaggaaatcgtagaggagttgttttatgggttttggagagatcgggagaggctgccgttgttccgttctatgaaaagctatctttatgttgcggtgcgcaatcagtcttttcaatattgcgagcatctggaggtgagaaacaaatatcgggagtttgttctctcgcggaaggggcggacacaggatagcagtcctcaagaagagatagaataccaggaattaagacatttgatagatactacgcttgctcggatgccggaacgaaggttgcgcatattccggatgcatcgtatggaaggtaaaaagtatgcggaaatagcttcgcagctttctttgtcggtgaagactgtagaggctgagatgacaaaagctcttaaagcattaaaaaaagaaattgagaattatattataaggacatgagtgaaacaaaaagaaataaggaaagagtggatcgggcatggaataaattgtatgaccgtttggatgctgacggacttttgttatcaggccggcaggataggaaacgtttgtctgcatccatgttgtggaagtggggggctgtggctgctatatgggtcggaatatgtgtctttttgactgttacttatcgaaaagtgggcgaatcggtagaagcccaggctttaattatgcaggagaacacggagcaatctactttggtgaccacactcgaggatggatctattgtctatatgggtggggaaacctctttgcaatatcctgaacatttctctatggacaagcgtgaggttagtttgcagggaaacgctctgtttgatgtgaccggtaaccgggaacgtccttttctgattgaaacagaggaggtcagaattgaggtcttgggaacgatgtttcatgtgaagagtgatgtagggagtactttcgaactgtccgtacagcgtggcaaggtcaaagtggcattgaaaaataaaaatcaagagatgtatgtcaatgcaggtgaagcggtgacgcttaaaacacatcaattgcgtttcactgattatagggacgatacccggatagctcattattggaaaagtatgcgtttcaaagacgaatctttgatgaatatccttagagttattaatatgcattcttccggtttgcagcttaagacttctccctccttaggggagcgtcggcttacggttgcattttctggggaagctccggagtctatggcagagcttatctgtttggctatgaatttaaaatatactcgtgaaggtgatataggtgttttatccgaataaagtgggaagatgaatcatattcgtacatatcattattattggcatatcttctttttcagtttgctggtttgcatggcagaatttacgaaagcggcggatagagatgtgttggagcgagtcatttatcttgctaagagtaagggtactgtctatactttactgggcaaggtgtccgaacagtctggttttctttttgtttatgacagcaaggtggtggacaatgatcgtatggtgaagttgggggcaggacagcgcactattcgtcaggctgtttacgaaattatcggtcggcaggatatcagtctgcgcattgtggagaatcatattttgatcaatcagttgcaggtgcaatgtccggttgttaccacttctaaagatactttggcctattttactttagagggcaaattgcaggataatcagtcaggggctcccattgcttacggcacggtaggggtagtcggtacttctataggcagtattaccaatcaggatggcgaattccgtttacgattgcccgattcgttgagacagggtcgcatcggggtttctcatgtggggtatgtgggacaggagatggatatgtctttattagaggctcaacacgcggtgtggtctctggaacctcgggtgattcctattcaagaagtggtgattcgtgctgtcaatcctatacggttgttgcgtgagatgttgaaagctaaaaaaacaaattatgcgtcggttcctgtttatctcactacattttatagggaaggggttcggtataaacaaaaatttcgtaatctgacagaggctgtttttaaaatctacaaaccttcttctttgttgaatcattctcaggatcatgtaaaactattaaaaatgagtcgcatagtcgatagtcaggaacgggatacactgatagccaagatgagtgcgggaattgatgcttgtttgcaactggatattgtcaagaacttgccggattttctgttgcctgacggtaagggtaatgtgtatttttatgcctcctgtgatatgacggtgatagacaatcgtttggttaatgtgatttcctttcggcaaaataaaggaataaaagaacctctttattgtggcgaattatatattgatgctgaaaacaatgcgttggttcaggcacgtcttgaaattaatcctgcttatgtgaggcaagctacggatatgtttatagaacgaaagacacggaagtggaaaataaccgcgcaagaggtggtttataccatttcttacaggcagtggaatggcatttattacatgaatcatattcgtggcgatctctattttaaagtgaaacttaaacggcaatggttcagtgcttcttccttgcatacatggtttgaaatggttacctgtaaggtggatgtagataatgtgacccgtttccagcgtaaagaacggatgcctacacgcactatattttcggatacacattttaaatatgatgctgacttttggggagagtttaatgttattccgtgggaggaagaactgggtactgtcattgaaaagttgtctcctaaaatagaacagatagaatattaaaataaaagttggatacggagcattgtacttagcatcttttgtcatgatatgtgacatagaatgtgttagcctgatgtttgtaagtttgtatattcatcagtctttagtttaaaatcgattcggctgtccggtcaatattttacccgtgtcagaaagcatgcttttacacgtatgtctgcatagggctacacatattgtatgtgcggacttatgcggatgtatgtggaatctcccatataacaactacattaggcctaaaaacaactatgcaaatctgatatagtaataacaatagaagttgttaactaaatcctagtacacatctgtgaaatcattcacttccaaaagataacgagctttcttaaaagtgtcttggtctttttactgctgccgggggggctatcatattccgtggaggtatgcacactttttgcgggaaaaaggcccgagaacgctctattttacattaaattggaatagtctataaaaagaagtatatataattggaagcaagcatgttatacagaaatatgcttcaaaacacagtgagggcatgggttgtaagtgagggtgataatttttactctaactacataagttgtttataatgagtttgttgtacacaaagtgagggcatgagggcataaaggtccgaacttcctaatgagaaagaatgatgcgtcaagaagactttcggaaattgtccgaagaataaaatgatcctttaagagctaaaatccttccctatgattttgcaggtgagccgatgtttatccaatattcattttagtctatcgcgcgcgatatataatatggtgtgtactttttgatattgcaaaatggattatcgaaataaacattatagataatctgtaaatcagttatttataagtataatcataaaaaaaatagaaaaaacaatagatatatttggataaagaaatgaaatcaactacttttgcatccgcttagcaagagaggtaagtttaaaactgacaagatgatttgaataacatagatgaaacaaaaaagttttaaaaaaaaagttcgattttttttggtggtttaaaataaacactttatctttgcaaaacatttccgggtaaaacggaaatagacaagaataagagttctt

SEQ ID NO: 14437 - DNA, 228 bp, Unknown
  gut microbiota DNA sequence
tttcggaagtaaaaaagaatgtaccggtggaagaagtcatacgggggtcctacaattttttctccaccaaacgcaaacggacggaagccggcacgttcaagaaaatccggatcgtgttcacggcatgcaacaaagacttgggccatcccaatttcccggaccggaacaatccgcaggcaccctggtttccggagaaccggacagatctggaaccgtccacgtttatcg

SEQ ID NO: 14438 - DNA, 26975 bp, Unknown
  gut microbiota DNA sequence
ctatattcatacctatatcgttttaaatattaatctttttcgatgaaagtgttagtcgtgtttatcacaccagcagaatcaacgctcttaccatcccggataaacactttttctcgcattaactcttcatagtcatatcgtgacattccgattacacacacacgaccatcaacatacaatttacatttcattaattcagtttcttctatcggaccgataacatctatttgaattgttcttttattcataattcattcctttctataccgttattagttaatcctcaatggcatacaatgcctgcatacactcaaaggggaaagatgaatttaaagcgtcatatatttcttccggtatatcatcttcgctttcaaaattaccttcaacactttcagatccaaatgctgttgcaacatgcttctctttatactccttaccattaatggttacggttgtttcccatccgtcagaggttacttcgattactatcttattcattactatcttcttttaaattaaatgcaactgattcgatatgtgtattcatcaatcatatcattaccgataatctcaggtagctcaaaaaatcttgtagctgggcaaacatgggcttcaatctctatgcaaagaccgtcacccggcatataggcacaacctacgctatcgttccaatttatatgcttttgggctgctttagctactttatcgcaagccaataagtattcagcatatttactgtttgctctttttatttttttgaatagtatatcgttcatttctttcttgtttatagtcatacccagttatttctgttaaaaatcaaaaatggctttttgcatctcttcactatctttgggtatatgtgtttcatcaatatggcaataacagtagttgcttccgtaagcacatgtacaaaacatcttattcagctcctctccaacttcccatctggcattatcgttaggtattcttccctcctgtaaccattgccactgggttttcattttctctcggtatgcagcattttttattcttttctctttccgtttcttggctacatcccggtactccttccttttggcaaaaaggatggctttggcagtgtccttatcttcatggacctcactgtctttgaaatagacagctttggcagagtaaaagctgttagtccattgttttgtacctttggccccctcattggggataaaaccctttttagcccattgcagggccgttaatatttccatattgctccctttctattatatattatttaagttcgaagattctgttgatggtgtcagctaatttatcattgatgattttcgagttccaactgtcaaattcaagaataataccaacttgtctggaaccgccggagtctgtataagacctgcccattgtgatatttacaggcaggttctcctctttggctacctctataaaagcgtttgccagtttttttaacatttcacatcttatcaacatagtattttcggattagtgattatgaattgacagccatgaagaaaccggcattattatactgttgcctgatttctgcggatgtaagaatatgatacttggtatacaactcagcattgaacaagtcaacctgaatacaatactccacgattttctccacttcttccggagagagtgcccaatagtccgctactctgcaaagcatattcttacaccaatacaatgaatggtttcctgtacggaatatctcattttctatataatcataaaccgcatatccattacatccatatacagttttcagatcactaactttggtttcatgcaactgtgatgtccttttataacaaggcaggaatggaataatcttattgtctgaaataacggatttcataatgtcttttatttaaatttcggtaataaggatgcagttcagattcttattgaattctgaacaaaagattgttgctgcaaaaaattatactcttgcaggtatatcgtatcttttacgtattttttttacgtaattgaaaacagtcttttcacagacttttggaaaagagggattattctcttttagatattcatgaatctgggtggaagaataataaggacaggttatcagcaaatgcttaactgactcctcataaggatcgagacggcaggaataagaagggcgcggacgattgccatgttgaagaagctcatcaacatttaatcgggaaagccgcatgactctgccgggaggaagttgcagcttctttgctatttgagaacggctcaagccaagaagtcgaagttcggcaatgttatgccagtcgtggtagtcttctgtaatcttttttgcatccattttctacataaatatagttttcgtaaagtgaaatatttaatgttacgaaaaagtgatgcggcaaagttacgagttacaggttgggtataacaacaagatagaaccttactatatgcctcgtattgatgtgcaagaagttgatgggaagagtgttcttgtgatatgggctcctgccggggttaaccgcccgtataatgtaagagagcgagttacggcaaaacaatctccaagcaaatggtatatccgcagcgggacaagtaccattgaggcaaaaggcgaggtgcttgacgaactcagggaaatggctaataggacgccttttgatgaaagaggaaatgagcggattgatatttcggatatttctccggctttggttctggattatcttcagacggtgggaagtcgtctggcaaatgactttgaaagtaagccatttgtggaaatactggatcagatggatttgctgacaggaccgaccgaacatcaaacactcaaaaatgtagcgacgatgatgttttgcaagaatcctgcgaaattctttcctacgacacaggtggacattgtcatattcccggaagggtgcattgagaatccaaacaacatgatagaagttcccaagatagtagggccagttccggaaatgatcaaacagactttggactatatccggacgaatgtcatcaagaagcggattatcaagcctaaagacaaggcagagtcaattacatttttcaactacccttatcaggctattgaggaagcagttgtcaatgcactttatcacagggattatcaagaacgggagcctgtggagattactatcgaaccgaaaaagatttccattctcagttatgcagggccagaccgttccatcagtctggatgccattcataaagccgaacatctgaagtcacgtcgttaccgcaaccgtcgtttgggtgactacctgaaagaacttcagttgtcagaaggtcgtgcaacgggtattcctacgatacaggatgagttacgaaagaacggttcagagcctgcaaggattgaaacggatgaggacagaacctatttcttgatagaaattccttgcaaggaaggatttgaaaatgttaatgagccattaaatgaggctataaatgaggctataaatgaggctataaatgaggctataaataaaaatgctttgtctgttttattggaaatttcaaagtctccgtatataaagagaaaagcattattagaactgatggatatttcaaaggcaacattagagcgtatcataaaacaactgtcttctgaacctttaggtttgatagagtaccaaggctcgctaaagacaggagggtatgtattgaccgaaaagggcctagcatatttgaccgcattgaaataaccttatatcatgatattatgagcagcagttttataacaaataaagagaagttcttgtcagacataatcaatggcatattgcctaagacaaatgcggctgatatattggtcggttatttctatttttctggttatgtacagttatcggagaatctgaaggacaaacaaataagggtattagtaggactggatgttgatttgcaaatatctggtcatatctgtgaggtagagactattcggaaaagactgatttcgcgaggtgctgtaaaagaggaatattatgagcagcttgtaaaattaattaacgagtctgattttttggatacggcagagaaacaggagcaattcaaaatgttttatgggaaagttttggatggtacacttgagatacgtaaaacacttgagccttgtcactccaagatgtatttgttcgcatataacgatttagtaaatgaaggtggagaattaccaggtgttttaattacaggttccagtaatctgtcctatcaagggttaaaaggacgtttggaattaaatgcccgcttcaatgataaacaggattatgacgaaggcaaaagactcttcgatgagctgtgggagacttctgtagtgattgtgagcaaggacattctggatgattggaataataaagtgatgactcgtatctggtacgataaaatttactcacctcatctaatgtatatcagagtccttaaagaatacttcaatatccctacatccaataatatattgactccgtatgatataaccgaagggaagtattcaaatttaaggtatcagactgatgccgtacaaatggctctgaatgcgttgaataatcacaatggagctatcatagccgatgtcgtcggattaggcaaaagtgtgatagcttctaccattgcacgtaatttgagattacggagtataattgtgtgtcctccgcatttgtataagcagtgggaaggttatcgtgatgaattcggatttaccgctaccgttttcagtgcggggaaaattgaggatgcagttttatattatcaagagttgtccaaagagggggaacagttcctgataattatagacgaggctcatcgtttccgcaacgaatatacacaggattatgccttgttgcataatctttgttcaggaaataaagtcttattgcttacggctaccccttttaacaatcaaccggcggacatttatgcgatgatcaagttgttccagataccgtcttgttctacgcttaaaaccgttgaaaatctaggggcatcatttaaggatttaatgagcaggtataaaactttgcgtgagaaacaaaaggctgaaaagataaccgatgatgagattaaggcagaggttgatgacatagcaaaaaaaatccgctcaattataagtcctttggtcatacgtcgttcgcggttggatttgcaggatataccggaatatgccaatgatttaaagcaacagaatattcagttggtattaccggatgatccagaagaattggaatatgatttgagtgggctgaaagagttgtacctttctactcttgacagaattagtaaatcagaaggaggcagtgactcggtttatcgttttaaggcagcccgctattcacctgtcctttatatacgcgaagaactgaaagacaaattggcaaaggaacttgaagataagaccggtgtcaaattcaatctcctgcttggtcgacaaacaaacatatcgagcttcatgcgccatttattggtcgctcgttttgagagttcggttgcggcattccaagcatcattgggatatatgatccaatcctcagagcatttgcttcgatggattgagaggcggcataagattccggtattcaagaaagggaatttgccggatgtcgaggcattctatgagtcgaatggcgatggaacggaagaaattgaggagcttttcgagaaatatgaagaccgaggattctttgagatagacatgaaatatgtaaaggatgatttcgtgaccgatgtggagtcagatatccaattgttgaagaatttgcgtgtgcagtggtttggcaaggacaatacagtgaagtctgacccgaagctggattcgtttattgacattgttcgcaaacagatgaagaatgagccgaacagaaagttggttgtattctcagaatttgctgatacggtgaattacctgggcgaagctcttgcgaatgccggacttcctgtgatgaaatatacttcggcggatgccacctcggccaataaagactgtattcgcgccaatttcgatgcgggactaaaacccatcttgcaacggaacgattatcacatattggtggcgacagatgccatatcagagggatataacttgcatcgtgccggagcgattttcaattacgatataccttataacccgactcgtgtcattcagcgtataggtcgtattaatcgtatcaacaaaaaggtgtttgataaactatacatctataattattttccgacagatgtaggagaagctgagacccgaacgaaagaaatctctacgcttaagatggccatgattcacgccattatgggagaggacacaaaggctcttaccaaggaggaagatttacaagcctattttaaggagcgttaccgcaaggaattcgtccgtagtgaagaagcatcgtgggatactccttatcgcaaactgctaaacagcctgaaaggtaccgatgcctacgacaaggctatggaactgccacatcgtgcgaggaccgctcgtgatatggagaaaccgagaaaaggagtcttgatgtttgggcgtaaaggagatgattttgtatttaagataggagatacgataaataatccggtaatgatttcagctgaagaggcgatttcgctttttgaggcaaataaaagcgaacaaccggttgatttcacgcgtgatttcgatgcggtgtatcaaaaggtgaaagcatctttattcagcagcgatgtggcagagcggaatgaaaaggagttgataaatgccttggccaaagtaaaggtcttgatgaagaatcagttgttgcccaaagactatttgtcggatttggctcaggtcattaaagccgaggcattgtcgggctatgagataagatatatcaatcaattggctccaaaagatgccggaaagttaccgttgaaaatctctgcagaatacttggctcgtatgattaacagccaaaacaaagtggatgacggtgaagagatcttgattttgagtgaagaattacaataaatgaaaatacaatggaattcaacaggacatataataggcaggaatttgtcaatttcctacaacacagttttttaccggaagacttcatttcggctactactcccgtagagtttagaactaaaatgaaatataccacccaagctgtaaaattaggttcatcagcttctcttgatctggtggtttatgaagtaaagcacaattctaaaaatgatgcccgtgtttcgctttcaaaagaagcattccgtctattggccgatgagatggaagatagggctttagttgtctttgttcctgaagacaatagtgataactatcgcttctcgcttattgaaattacgctcgaagcaaaagaagattcggctcgtatcacacggaattacagcaacccacgccgatatagttatttcctggggaaaggcattgcttattacacccccaataagtacctgaatgaaaaaggccgcgttgtcaatgctgaggatttgcgtagccgtttctctgtcgaggtgcttacaaaagaattctatcaggagttgagcgattggtacgcttgggctattaaaatcattcgttttccaaacgaccttaacgacaagacagatgacgataagttcaacaatgagagtgccattcgtttgattacccgtctgatttttgtttggtttctgaaacaacgccatcttgtgcctgacgagttttttgacgagcaatatattgcaggccatctgatagaaggctttaatcctcatgccatggccgatttgtttagcaaatcccatgagagcaaatattataaagccatcttgcagaatctcttctttgccatgctcaatagtcctattacaccggaaggaagcaacgagctttcagagaggcatttcagaaaaggacgtggggattatgacaacaacaagctgatgcgctatgagtattattttaagaacccgcagttgtttgtcgatttggcgaacaagacagttccgttcttaaacggagggctgttcgattgcttggatgagaaggacaaggacttgtattatgacggctttagcgatcgcgaagctgtgaagaaggcattgatagttcctgattatcttttctttggtgaggaagtcggcaaaaatatagatttgtcggagtggtacggagacaagaaaaagaagaaagtgtcagcccgaggaataattgatatattgaaacgctacaattttaccgttgaggaaaatacaccgtttgatcaggaggtgtcactcgatccggaattgttgggcaaggtattcgagaacctgcttgcatcctataatccagagacgcgaaccacggctcgcaaacaaacaggctcgttctatacgccacgggagattgtgcagtatatggtggatgaaagtctggttgctcacctcaaacgcaccgtgggtgatgaccttgaaactcaataccggcaattgatgcaatatacagacgaggttgttgacctgactgaagagcaacgaaaacaaatcatgcagtcgctctataactgcaaagtccttgacccggcctgcggctcaggtgctttcccaatgggaatgctgcaacagatggtacatattctcaaccgtattgatcccgataatacgcaatggaaggagattatgctcaataaggcaattgatgaaacatcggatgcctaccgtatggcatcttctgatgaacgccaggaaatcattgcggacatcgagcgtagttttgatgaaagtgtcaatcgcccggactatgcccgtaaactttacttgatagaaaattgtatttacggtgtcgatatacagcctattgccatccagattagcaagctccgcttctttatttctctggtagttgatcagaagtccaatgataatcctgtagagaactttgggattcgtccactcccgaacctcgaagcgaagtttgtagcagccaacacattgataggattggataagaaagatgcatctttgtttgatagtgcggagataaaggcgaaagaaaatgaattaaagattgctaagcataaaattttcggggcaaagaccgtacgcaccaaacgtaaatatcgacagattgtaaatggtttacgtcttgaaatagccaatatgttggaagattgtggggcagtgggtaatgccgaagctcagcagttggctgcttgggatatgttcgaccaaaatgcctcttcgctttttttcgacccggaatggatgttcaatgtcaaggatgggtttgatattgtgattgggaatccaccgtacatagattctgaaacaatgactttattggggcaaacaaaattaagggaatatatcgtcaataattatgaatatataaaaggtaattgggacatatatatggcatttttggagcgtggattgcttttatcaaataattgcttatgctatataacacctgataaatggttatcaaaaccttttggcagcaagtttagggaaaaatgcatgattccaagattgaagacaatattgcatactggtaataaaactttcgaaagtgcaactgtagatgctataataaccttgtttttagataagtcgaatgagattagtgcttaccgatttgataaagataagaatatcattcttatgaatacagtgctgagtaaatcgattatcaaaccttattacattgattctttattcagtgagcataatttttttgtttccaatatggagcgcggagcaataacattgaaacagattgctgaatgtgagaatgcttgcgctacgaatgttgcatatgagctttccccttatgtttttaatgtcaatgcagattatgaccctgtgagatgtttgaaacttgtaaacactggtacaatcgacaagtatgctaataaatggggagttaaggagattacatacttaggttctaaatatatttatccagttgtagataaaaataagtttagagccaactttggagtggcttatgtaaggaaagctttttcaaggaagcttattttcaaaggattgaacctattggatgggtttattgattttaatggtgaatatttgcctggcaagacaactttggtgatatgttcagataatatctcagatctaaaatttttgtgtggattgctgaattcaaaattagcgttgttttatataaaattgaaatatgcgtcaagtagttattgtggaggaataacattttctaaggatatgattaataattttccgataagagagaatattgacataaagaataggataatagatattgtcgatgccatattggcaatcaagcaagagaatccgatagctgatatatcaattgaagaatttaaaattgatttattgacataccgtctatatggcttaacctacgatgaagtgttaatagtcgatcctcaaacacctataacctgtgaagaatatgaaaattaaatataaataatatggaacgtcatagaaaaataggatccgtcaaaaaagagttagcaataaaggctagggaagcaatgttgtctgctgttcagatatataataatcctaatattcaatttaaatcagagacatttattgttttatccattattgcgtggacatatttactacacgcatattataaagagaagggcattgattattgctattatacgaagtctattaatggcagaaaaaagtatgataaaacaaaatatggagctaaaaaacattgggagttagagagatgtttggatgacaaagaatgtccattagataaagtggtaaagaaaaatttaaaatttttaattggattgaggcatgaaatagaacatcaaatgacgaccagactggatgatgcgttaagcgcgaggttccaagcatgctgcataaattttaatgagtgcattgctaaatttattggcgaatcttataatataagtaaacatttatctttttcattacaattttcatctttatcagataaacagatagatcaattgaaagattacaaagatttgcctaaaaatgtgacaacttatatcaatgattttgatgaaaaaatagaagatattatatataatgattcaagatattcttatagagtaatatttgtgccaaaaatagtaaatcataaaggacaagctgataaggtaattgagtttattccatcaaattcacctatagctgaaggaattaataaagagtatgttgttattaaagagaaagaaaagaaaaaacttttacctaatgctataattaagatactgcaagataaaggttatgtgaatttaaatatgtatcatttcgttaaatgttggaaagagaataatgcgaaaaaggataatacatatggaacaaaagtaggtggaaaagaatggtattggtatgagaattttatagcagttgttgaaaaatactgcatagataataagttgtaatttatgtcacggttaagcaaactatatgaagctatggaaacccttcgtaaagagggacttccagtagatgaaaatcttgagaagaaggctaatgaattggaagaggaaatcatcaagaaagagattcttccggtgttgagtaagactatcgagcctgcattgcaacctgtaaaacgtgaactggtgttggtggtggattatgtaccaggacaaccattgagcgttcaccttagccgtaagcggaactttgcagcggaattaactgatgccaaggaaatggtgcttgacccggaagtaactcatcggaatcacacttcaagttcagaaggaaaaatagagagatgcccaacaagagatatgtctgtggtatttccggatggaactgtcattgcggaaaagactgctgtggaaactttggttgcggtcgtgcagaaaatcggagtggcaagggtacgccaagtggtagaggagtataatctgaaattctgcaaggttccggtgatttcaaatcgcagagatgcaaaatatggcagaagccaacgggatttgggtggaggatggctgctaataactcacagcaacaatccaatgaaaaaggctttcatagaaaaagtttccgaggtcttgcatcttggtataaaggtcatattaaaggattaggttcaggtatgctggccgattttggcgcagttggcaacaaataaatccgtgatagtatggacgcaaagcagtgtatgattgtagatatggagcggagaggcgataagcggatgttcatcaccgaacaggttgcttcgataagcgaaaacaagaacggcctttggacggtgcggttcttgtcctcgccccgtgtgttcaattacaatcactctcggctgctttatcttacgcatcctgacgcaatagatattggtatcaaaggattgtatgtcaagaacaggcatattacggatgtaagcgagttgcttcgcttcaccgatggtaggcatactttttaccgagtgacttacgccaacggctattgtgaaaatcttgatggcaatgaagtgtatgtaacccgtacaccgattgataagaatggcggctctacttgggattatctgcacaaattggccgctgagacaggcctaacaaccgaggatgacgagaatattctgtccaaacagtatgaattggttgacttgaagcgcgacaacgtgcctttggcgcagtatcttggtgacaaaacaaggctggcggtctatcgtgggcccaaacagatattttatcctttcggttgcaacgcaagtcagaaggctgccgtagaagccgcattgacgcaccagataagcgtcattcaaggtcctccaggtacaggcaagacacagaccattctgaacatcattgccaatttgttgctggcggacaaaacggtgttggtggtgtcgaacaacaattctgctgttgagaatgtggcggaaaaacttgcaggggaaagtcttgactttatcgtggctaaattgggcagcgtgcagaacaaggaggctttcatcgccaatcaacccaattatccagagatgagcggttgggtgatagaagaagagcctgtaagacagcaagcgcaaaactcacttcataccacgacccaaggatttgatgcccagacacgccaagcccagttgaaggcagaatacgacgctttgctgaaagaagcaaagtacaatgatatgcttcaacagaaatctgtcggtaaagagtggttgaacgacaaatgttcttccaaactgatgaaactgctcaatctttatcaactgaagatagaggacaagactaaacctgacatctggtttcggttgaagtggacattttcattgggcatgaggatgttctcgtttctcggaggtaagccgtcggatgtggttgcaggcttggagtcggcctattatttttctcgtaaaactgaaatagagcaagagttggacgctattgccacaacactgcaaactatcgacatcaagcggtgtatggtggagttgcgttctgcttctcttttggtattgaaaagtcgaatagctaaatggtatcaaggctctgaaaggagaaaattctccaccaaagacattaagccaaaaaccgaggagttcttgaaagaatatccggtcgtgcttagcactacttattccgccaaaagctgcatcagcaaggatatggtctttgactatgtgattatggacgaggcatcacaggtggacataaagactggtacattagcgttgtcttgtgctgtgaatgccgtaatcgtgggtgatgacaaacagcttccaaacgtggtcagcagggaagaagctcaggcattgaacgccatccagtctacatacaacgtggatgacagatacaatgccgccacacacagtttcttgcaatcttgtgtagaggtgttcaaagacgcaccagtcacgttgcttcgtgagcattatcgttgtcatccgaaaatagtcgagttctgcaatcaaaagttctatgacggcgagctggtgtctatgacggctgacaaaggcgaggacaaggtgttacaggtagttcggacagtcaaagggaatcatgcccgtggacatttcaaccaacgtgagattgatgtgatagcccaagaagtgatgcctgaatatgcggatatgggcactgtgggcatcattactccctatcgcacacaggcagaggaaatcaataaagccattgggtcagacattgccagcacggtgcataagtatcagggacgtgagtgtgacacaatcatcatgagcatggttgataacgctccgacagagttctccgatgaccccaacctgctcaatgtggccatctcacgagccaaaacgcatttatgtatagtgaccaatggtaatgacatgccggaggacacaaacttagcccaactcatcgcctacatccagtataacaattttgaaatgaaggaaagcaagctccattccgtttttgatttgttgtacaagcaatatacggcagaacgtttggcatacgaacagactcacccggtcgcatctgggtatctgtctgaatgtcttgtgtatgatatattgctcaaaggtgtatcccacttgggattggcaaacacagaggtcttgtgtcactatcccctgtcaagattgattgcagactgggatgtattggacgaacaggaaaaggcgtttgccgaaagccctcttacgcacgtggacttcttgatttataactccctcaccaagcgtccgcttcaagcaatagaagttgacggttggcatttccataaagagagcgaagtccagcaatcgcgtgatgccctcaaagaccgaatactcacgaagtttagattgtgtccacatcatatctcaacaacggatacggtgaatgaagaaacggtcatgaaaatgctccagccgatgtcttgaaagtataaatttcccagatttaatctgacttttcatctgttcctaatacgctgctgccaatttgagtaaatttctggaatggacttctcgtttcgttaattgggatatattgagcagatgtagcaactaattctgccagatgtccatcagtgtttgccggattaccgaagtacatttatggcaaagattatccaatccacgaaatctcacctgccaaatcccatgatagaagtctgccataacatgagctaattttagaaggaaaggatgtggtatgcgcattggacattcataacttggttttgatagagagtttgactatagactcgataaaccaagttcgaaaataggggagacaaaatcaacatcatatacaacaggtaaggcttggagttgtacaatgttctgccgaataattccgtatgctttggtgactatttcccgctaaagttgtgatgcgtatttttgatgtgcctttgctcctaaagcgacagttctttgaaatcacaacttggttaaaagccctaaccgatttttctgttgaaactatgagcgcagagccgaagtatagtcggtcacaccaaaggataggattttccgtatcctgtccactcccgacaacgatttttacgtgcccagcttgctgttttgagtgacacgcatcccgccgccgaaaggcgagtggggtattaggctcccccataggggttattactggcacacgggcaagcccgacacggattgataccacatctcaaaacagcatggggctgttcaaattccagtgtacatacaaaaggggaaatggcagattgcacctgcatggtgaaacctgccatcactttgctttatttctcttatctacacctcggcaataaagtaaagccgggaaatgtcacagaaaaatgtcacaccgatggggttaaacgctaacggctcagtaatagaaatctctgttgaatttgtattctttcccttctttgacaaccatccgtttgttgctcaagaatgttgcgagctttacggctttgttatgccccagttttattccttgccgtccgtagccctctttcagccgttcaaggtagctgtcatagctgctgatattgccgtcctcaaaagcggcgtttagagcggaacggtgcatattctccggtatctccttgtaagggtcgaatggctctttggctggacgtcccggttgccttttctgaggctggtaaaactccaccagttcgggcagggctttctcgtttatccggaaagcaaacggctcaaaatcacggtcacggatatgcagggcttccactacgcttattgatttgtcgtccttgtccggttcaatctgcatgatggtttccgccttgttgttcagttcagtgcctatatgaccgcgtgcgtgttcatcattcttgttctgatgcaggatagtatgaatgtgtatctgcctgtcgtcagtccaccgcatgagtctggatattacatcggtggactcaccgggcgaattgatgtcgtagacaaagtcccggatgccatctatgatgaccagtcccaaatccggtatcgtgccgattgcctgttccgttattgccagtcgcacttcgggcgaatatttacggagtgccagcatcatcaggttgtctgcatcgcagtcttccggcagatctgccagtctcaggattctgtccagaactttctgacaatggttcttgccctgttccgtgtcaatgtagagaatcttccttttgtcctctgggaagcaggcacggtaatgcagcaccgtgccgtttatcagggcagccgcagtgatagctgagacattgaaggtcttcttgcttttggcttttccaatggatgcactgaagtttccgagagtcccgattatggaatcatccaccatcagcacggaagcggactgctcgtatgttccggttacgctgatgaccgattcatctatgtaggctttcagttcctccggagtaggaatattgctgtttgtcttttccatattcctacaagttcttaggattagccttgtgtcttgtcgccgcaagcatttgttcgtgttcttcttcgatgctcagcggcacctgacctattctcccagtctccagccatttgtccagttcgtcacgatagacaaacaggtgcttgccctgtttgatggtgggaattcctccgtgcttggctttgtaatagaaggaagattttgatattccgagatagctgcatacttcctccacagtcatggggacatgcaggttttctttgaccggagcctgttttacgagggtgtctttcaacgcattttcaaggctctcgattctttcgcaaagtttgcctaccatttccggcaggtcgttgaatgtaaggttttcttttagcatgactaaacgatttaattgtttaacatgctgcaaaccaatacaatgatattaggcagattgtaatcagcaggaactaatttttccgtcagcaaaatttctcatgcagtcaaactgatagtccccgttttcaggcacatcgatcttgattttgctcgtaacagagtctctgaggttcttggaaagatattcgatcgtcgcacttcctagctcatgtgggaatatttcttttatgaattttgctctgtcgattagcggaatgtcaagtctctctccgatattccatgcaaaatgccttaaagcaggagacttgatgggattttcctctttagaacggattggtttgtatagttccggttgtccgtaagccaaagcgtctatgttctcatggagcgtttcaagttcttctttggtgaaaaactctgccattatatatgtggtatagtcatgaatggtgcggactattgcagtccgtctttcctttttcgcacgctccagttcttccatgcgtgtttcatattctttgaggtacgaaggtatagtactgaccgcactggctgtattgtctgtttgcgaaagtacctttgggttatcagtgtttatccctattgaaacggcttctgttttaggagaaactttacagccaaaagaaaaatagcccttgccgaacagtgaacagaacaggcgttgcagtgcagcacatgaaaggattgccactactgtgccaattacaaatggagcagagtagccaatcgaaccaatctgatgattcttgtacaatattgtggcaactgtcgcaaaaatgatgcacgtcaatgcaaggacaaggcttgctttcttgatggtgggtctgttgttatctgccatagactgtcgttatttgaaatttcactacggcaaaattagatgcccgtttgcagatagtaataaataacgatagaaaatcaaccgggaattaagaaaaaatatggttagagtatgatttccagcgaaaaatcatactctaaccgataaaaagggggcaaagacaagccggtcagcccttccttgtcaaagtgattttagtgctcgcttcacgcttgttgctgtccacgactttcatatagcgttgcgtggtagtaatgcacttgtgcgccatcatgctttggatggtacggatatctgtccctgcggcagcttgcagggtagcgaatgttctgcggtatgagtggaaagttatgtccttcgtgattccagcagaacgaatccattctttcatcggatgctgtgtccaactccgtttcagacctttgaaaaccaatcctgtcttttcagggctgtagtctatcagtctcaacgcttcatcgcttatcgggatgatgtcttctgtctttgttttttgcgtgatggtatggacgcattttcctccggcggcaaagtcaacgatttcttcccagcaaagggaaagcacatcactgagccgcaggctggtcagacacgaaaagagggaagcagttttaagaacaggtatcttgcaaggtgtctcggccagtctgtacagttcttcgaccgacagatagtcttttgcgatatcttccgtttcaatcttatccagaaagtcattgacattgctcttaatcatcctgttacgatagaggattttcaggaatcctctgaatgtggaccaataacccgcagcggaatttcttgagaccggtctgtttcgctttagctgccttgcattaagcaggtattcacggaacttgttgcacaggtcgacatcaatctcttcgaaagtacacttaccatgaacgaagttgtaaaagtgctgatagacaaacgcccatttctggtcgtgcttgcggagctgcttccggtaatactccagaaagtcggccttgtacttgtgcttgtcgaaaaagtcgtacctttcgttcacgatggcttcaaacctccggcatcggatggcttctgccttttccgacatgacggcattgaagtcccgttcacgctggttcttcgggttggcatagatgtaaatattcaatccctcatgacggatggtcttcatcgtttcttggtcacggtagcccggatagtaatcaaggtagaaagacagcatacccttcttcaatgggcgtgttctcaatgttactgttttgcattctgacataatgatgaatattaaatggttataactgatttttgctgcgaaaatctttaatgatgttgtgcagaccgtaatcagcaggaaataatttccggataattacagtcggttgcatttagccgctaacgggctcccatgatgtggtcgaattctactttcaggaaccgcacgaagcggcctttcttctcccgtttgatttcgtgaaattgtaggatgccgtaaaccgaatccctggtaaggttgtatttcttcatggcttcctgcacggtgtagtattccgatgaatcgttctcggcggtctgcttggacaggtcgaaatgaagtttggagtagaatatctgtccgtgttccttctttgaagggatgttgttgcgatagacttgcgagcggatggcgacacgggtcatgccgtacttcttctcaatctcttcaggagtgtaccattcggtcagggcatcatccgtcctgtatttggcgaatatcgcatcaatgtgttttttgctgtagtagttgaactggcgaatcttgacctttggaacatcgtgctctctggtgtatgtccatacccatttggtgtttaccttgtacttttcagctatctgctcggcagtataatattcggtaatatctacatcatctttgggcttaatgctttcgtaaggtttggttttcagcatcagctcaatgtccgcacgccggataagtgacttcttgccgctaatacgggaagcccgaagtttgttttctttgaccaacttataaatgtactgacgggtaacacccataagtttggccgcttgtgcaaacgaaaagaagtcttgtccctcggatgcctgtttgggctgcagcaattcctgcattttcttcaattcgcgcttgcgttcccggatgcgttctttgtaaccgagatttgaacactgatgactgcaatagcaagtcgtcgttttcttggcgatgaatggttttccacaccattggcaaatctttcttacttccatattcttctaatttattttgaggttctgtctctttatttctccacaaatctgtcaatacacgtaaaccattgtcaacacacgtcaactactgcgtcagtgtgacatcggggcaaatcccgaaattgtttcgtggtagaaatacggtagaaaaataggatgaacaactgcctccaactgctatcagccggattttggacaaataaaaaagccactgatttacagtggcttcgttatagttggttctaattcgttgcagtcagttatgcgcaatcacttgccgatgcaaaagttttgaaatatattttgcaatgtttcttccgaggttatacctccttctgcaacaatctcacttagttcgtggatacattgtcttaaatcctcacttaccaaatctcctgataatcccaattgcaatccttcctgtactctatgaatagaatccaatgctcgtgttaatgcttcgtaatggcgtacatttgtaatgataatatcgttttggttgatttctggtaaggcggctgcctgtactaactttttttccaggatcgttatattttcccttttctttgctgagataaatagtttttccactttcatgtcagcaaatatagctgacaactcttctttttgtattgctagtaacagatctgacttattaaataaaataatcatctttttcccttcgcagtgtggaagaatttcggcttttaattcttcgagccgtctttgggcatctgtagagtctatcatccataaaatgacatatgcttggtccatcttttggaaagtacgttctatccctagattttctattgtatcgttcgtttggcggattccagctgtatcaataaatcggaatgtgacaccttgtaaattgatcgtatcctctattacgtcacgggtcgttccatggatatcactgacaatggctttttcctcattcagcaacgcattcagtaaggtggattttccagcattcgtctctccgataattgctacaggaatgccattcttgattgcgtttcctacactgaaagaatgagctagctgggcaataacttgttcgatatgggtagctagactgctcagttcgtcacgattggcgaattctagttcttcatgatcactgaaatccagttctaattccattaacgaagtgaaatgaagcaattggttacgcaggttagaaagttctttactgaatcctccacgcatttggctcatggctaggcgatgggtggcggcagacgatgaggctatcagatcggccacagcttcggcttggctcaagtccatttttccgtttagaaaagcacgttgggtgtattcacctggtagagcggcacgacatccattatagatcaggagttgtataacttgctgcaggatataggatgaaccatgacacatgatttccgtactgtcttcaccggtataagaatgaggggcacggaacaaagaaattaaaacttcgtctattacttcttctgcagaaggtataattgattcttttttttgtaacgtttcacttttttcttgcggaatttcactcgttttttggaaaagtgtattattaatttttcgctttggggaacaaatctttccgaaagtaagagtatatggtgctcgttctgtcagtggcttgcctgtggcgggtgtaaatatgcgtgacgttatttcaatcgcttttgggccagatacacgaattattccgatggctcctccctgggcggtggcaatggcgcagattgtatcttggtttatcattttcatttggttaataatataatgttttagctacgatggctgttacttcttctaaataacggcggtctgtctcatcaaaagagtttaatagattactgtcaatatccaatactccctttacttgtccattagcaagaataggaacaacaatttcggagcgggaaagagaactgcaggctatatgtccggggaattgttctacattgggcactatcaaggttcgagcttctgaccatgaggttccacatactccctttcctttatggatgcgataacaggcggtgcttccctgaaaaggtcctaaaataagttggccgtctttaaccagatagaaacctacccaaaaaaagccgaaggcttcccgaagagcagcggcagtattggccaaaacacttatttcttctttttcatctgatattaaaagttcaaactgagggaggaaaagacggtaacgttctactttattactagttgtttgtttgaaactggtttccatatttttatttgttttatgaggggacatcttgttgtttttttacaaaaaatggtcttctatgaagcgatgtcccctgttaggtaaaaagagttggcttattctgtaaaaaatctgtttatgccaatcttcttctcgatgataataagaataagtattgatagatgatccggtgaattttatccatattatatagacaactaaattgggaattatattctttccaagactttttctatcaaaccatcaatagagtttttatagccggtattggcttcctttattagtcggttggcaattaccatacatacagtcatggctttgtgtcccatcaggcgtgctaatccggcaagggcggaactttccatttcaaagttagtgatgcgatagtctttgtattcaaatttctcaatcttttcattctgttcaggatcggccagtggaatacggagttctcgtccttgcgggccaaagaaacctcctgcggcgatagttatgccacggaccatatcattttgcgcgatgcggtctattaattcccggtcggcatcaatgacgtatgggtgggcgatgcatacattaccttcccaacccatgtaatttataaaagcttgttcgaatttcagatcgcaaacctcattgcgtccggcgtagaaattgagtagtccatcaaaaccgatagacttttcagaacaaatataggtgccaacgggagtataaggctgtaatccgccacatgtaccgatacgtactaattccaattggcgtaagtggtctttttcataacgggtattgaaattaatattggccaaagcatctaattcattcatcacaatgtctatattgtcacaacctataccggtggaaactacggtgagacgtttccctttataagtaccggtaatggtcttgaattcacggctttctatttcacattctttagtttcgaaatgagaagctactaatgctacacgcccagggtcacctactagaattattttatttgccagctgttccggtttgatatgaaggtgaaaaatagagccgtcgggattgataatcaactcagattctgcataatattttttcataatcttttttttgtggttaatggtctgtataattgatgttatatttcttgtctttttaatgggtatacaaacagattatttcttagatgtagatgccacggatttataaactttcattgatattagcatgataaagagaaaaacagtttcattcgcatccaagaaaaatacattaatcgttgaatactagttttatttgcttaatggttcattaccgaaagttgtttcgggttttgcaatattttcacgcatggaggtatctgcttgtatattcttcatgcggtaatagtccataatgcctaggttgccactacgaaatgcttccgccatggccttgggcacttcggcctctgcctgaattacattcgcacgggcctcttctgctttggctttcatttcctgttccaaagcgacggccatcgcacggcgttcttctgctttggcttgtgcaatattcttgtcggcattggcctggtctatttgtaaagcagctccaatatttctgcctatatcaatatcagctatatcaatagacaggatttcgaaggccgtaccggcatctaagcccttgcggagtactaatttagagatagaatcaggattttccaatacggatttgtgattttcggacgatccgatagaggacacgataccttcaccaacacgtgctagaatcgtgtcttctccggcacctcctactaattggcggatattggcgcgtacagtgacacgagctttagctataagctgtatgccgtctttggctacagcagtaacgggaggagtgtcaataaccttagggtttactgacatttgcacggcttcgaatacgtcacggccggctaggtcaataccagttgccatttggaaagacagttcgatgttggctttggatgcggatactagtgcgtgtactactttttctacatgcccgcctgccatataatgagcttccaattcatctcgggttatgttacttaagccagctttatgtgcttcaatcattgctgggacaatgacataaggaggaacattacggatgcgcattaagaataattgcaccaatgaaatgcgtactcccgaaactttggcagacagccagaggaaaaatggtacataatgaaagaatagtaccacgaaaataattccacctcctataaggatgaaaggaagatagttgggttcgatcataataatcaattgtttaaaagtaaatatttatatttgaacagctccacatcgaatctctgctgttttcactattgtctaaaatatacttgaatgagaatgtcaatcaagaaatttgataaaatcgtatttgtaagtcatttttctatcataggttgaatttgcgtacaatcaccgttccttcaaccattctttctacataaatgggggtattctcatcaatcaagccatcggcagagcgcacttcgatgatgtgtccattaaagtttgcattgcctatcagtgcaaggcgggttattgctatgcctttgtctccgatgcggatatgggttccttttaggggatcgattttataatccagtgttttcttcaaagaaagcttgtccatggtttttgagtgcataaaccagatgataatggctatgcaacttaggacggatgctatcaaagtaatgaatcctgctatcggtcctaatgtgtcgaaagcgtaatagttggcatatagcaggcagatggccgatgctattccggctatactgatgccgggaataaggaaaacctctacaataaagagaagtactcctgccaagatgagcgctatgataataaatacttccataaatatctttgtattagtgtttcaacttctttatttcttcgttgcggacgctgatatccagttgggccatttctttcagaagttgttcagtacgtttttccaattccaaaatggcgggtgtcaaattcttctttcgtgcactgttcccttgggcatattgttcgcgtttgtcatccagatttttcttcaggttgtcataatccttctgcttttgtattctttgctgataaagtttacgtgcttcggcagagcggaagtcgttcaatgtgtggtaaacagcagagtcatctattatcaaggtgaagtctttttgttgttctccggattctttggcatacattattgccgctaggcgttgcttgccggttcgtactttctcttcatctttccaggtggtacggatagaatgtaggctggccgcatttataatgatctgttcgtctgtactttcgtaattgtatacttcttttgaagagttcggtacaaacacatagatacagactttgttatcaggctgatagcggtctgaagcaaaccagccaatattgttgaattcatcaatggcatacatatagtcattggcgggagagttaaatggcattcctatattatcgggacgaagataattgccattttccgaatcatagcgagttacaaaaatatcgtacccccccaaagagccttctccatccgatgcataatacaaggtaatgccatctgacattaagaagggatagtttacatttccctgttcattaagggacatgaggggttcgggctcgctccagccgtccaacagacggatacgggagtagagttgcattttgccgtctgtgcttttgttcccgtaaagtactttattgcccatttcggtttgatagacagtcccggatatggtaggatcgtgatagagtgctcccgattctctactgattttatatgctttcagaaaatcatttttatcgactacaaaactatctattacagtaatgttttccactccttttatcatacgggctgcttgctttatttgttccagctctgcttcagccatttcggtagggcgttttttcttttccaaccattctatgtgttgttcgtagttatctacggcatcgtcaaaccgatagatatcataatatagtttccctaaatagcggtatgcgtcaatgactttgcgggcggcgcttttttcaaggtagggctgtgcttcttttttttctcctgtttcataacaacatgcgccataccaataattataattggcattagaaggggcttgctttaccagcttttggaaagctggtttggcttgttcaaattctccgttcaggaaaagttgtttggcttgtgccaagctttgtgccgcagtgttgcctgcgcagcataaagtaaataaaccaatgatatattttttgtacatagttagtttataatccgtattatttagattcaaaaatacaaa

SEQ ID NO: 14439 - DNA, 177070 bp, Unknown
  gut microbiota DNA sequence
ctctgttgaagaactaataacattatactctcaagagaaagaagtttcttattttaagaaatctgagcgtttgaaaagtgagcctataaatattttttcatggaaatactatgttttttatgaaagttcgaaaattcagtgtgatacgaagtttagtaacgacaatttaaataatcttattgatgaattaaatcatttatttgttataaataaggatactatagatacaacaaaaaaaattctatcacgatatggaattaaatttatcatagtgcccaaatttgacaaaactcccattgatggattttctttttggcaaggagaaaacccaactattgtattaacattacgattaaacagaattgacaattatgcctttgctttattgcatgaaatatatcatgtttatatgcatcttttcaacaatagagaacaaaaatatatttccatcgaaggagctgaaataaataaatgtgaagaagaagcaaataaattcgccaagtattctttaattagcaaagacttatggagtgcattcttaaaacaacattctatgatttctccacatgcaatgcaaatgaaaataaaacaatttgctcatcaacataatatcaatgaagctattgttttaggattttatcaacacgatattaatttgtactctattaaaagttcaatatcaagagaaataaaatagtccaattatatgtaccgtgcaaatctaattgcacgcaatttgcacgcatcttcagaaaatagaagaaaacaagaaagattatttgaaaaagaaatactacctttaggcttgaaaatcaaggagtatgaacctgaaaagaaatgaagagcaaattactgaaaatcaattatttgcgactcataatctggaggtccctggttcaagcccaggctggtccacaaataaaaaaggctgattcctaagggaatacagccttttttatttgtaaactctccaggtataaatccgttgctttagataacattggaatttaatcaaggtagttgttggcttcagaatttacacagagataattaatgtattgataacgaggtagctttacatttgttgctcttgttataggaatcatgaacagaatttctttctcttagtataaaatcatgagcacattatatactctaaaactgcaaatgtgggttttaccttaaaaaaacaggatggaaatttgtacgaaatagaaagatgactttatctttgaagaatattaaagctggccggactttttattttgacggaatacagagattgttagtataaaaataaaagattaaatttaggttttatggttaaaagttatgcttgtgcaggcattttattgtttgcgataggattattccccttaatggcacaggacaacactgtggccaaagagatggctataaagatagccgatcgtattattgcttctacggtttatgagttcaaagatgtaaaaacaggtaaagtatacacttctttggacaatgttgctttaaatccggatatacgtgtcaatagtaaatatttgaattggcattatacaaacggagtaacgaatatggctttgatggagttgggtgataaaatacagaaccggaaatatgaggattatgtgctgaaaaatatgaagtttatttttgacaagactaatcagtcttattttcatcgtctgtatgataaaactttccgtgaaggaggatggagggcggttccccgtcttacttggcatatgatttatagaaacaagcgcttggatgacaacggtcctatgggggctagtctgataactttgaaccagcgtcatccggatgaggctttccaacaatatgttgaaacaacaaatcatcatcttatggtttcggaaccccgcttggccgatggaaccatagctcgcttgtggcctcatgaaaatactgtttgggcagatgatgcgtttatggcggtatcttttatttctagaatgggagaggttaccggtgaaaagaagtattttgatgatgcggccaatcagatattgaattatacaaggtatttatggtgtcctgagaaacagatttattatcattgctatcatacggataataaagagcatggagtggcgcattggtcgcgggccaatggatggatttttatggcgacagccgatttgctggccagaatgccggaagatcaccccatgcgtgatgatgtgataaagaatttccagatgcaggccagtggggtagcccggtatcaagggaaaaacggtttgtggcatcagctattggataaagcagattcttatgaagaaatcaccggtacttccatgtttgtatttggtatagctaaaggtgtgaaggaaggatggctgcatccggatttcatttatgtagcatggcagggattaaaaggtatgttgtcaaagatttcagagaatggtgatgtgacggccatttgtgtcggtacaggtatcatgccttccaccgtattttattataatcgtcctactcaggaaaatgatccgatgggtgaagggcctgtgttacgtgctttggtagaaatgattgatgcacctaaatatacggaaattagtgcgaatgatcagtatgataagataaaataaagatagaaccaagaaaatacaattgccgtaggggtggactggattcgcctggatacacttctttgtggtgccagacggaaacattccgcccctacagtaaacctgatgataatgaaaaatatttttttcagtcttttggctatatcagaactttaaatccaatcgaccctcttttattctttctccctcgaaagtgccactgattattctgttatttaaatcgaaacgggtgatattgattattccatcttccagtttttcttcttgattattctcattcttgaatataacatcagtatagatagtctgatcgtcactcgctccttctgagatactgtaaatagtgatgtctttctctttggggtcaatgatgttgaaagaaatggaagcattgttgtccactcggatatctatgctgactatcgctttctcgtcttcgttgcgggcaggataataagaagccttatcatctgagtcatagcgctgtcccgtatatacccagccatctatcaggcaaccaaaggtattggctcctgtttgagtggcagggggcatgatggtaggatctgctgaaaagtcttctctatcacaggaacagcataatgcgattgttaatactattgtaataagatatttaatcatggcttgaatttttaaaaatgataattgatacctactgagaatcctaattgtgaaatgtcgtccgcccccttcattggatagtgtggctgcaccatccattccttatcatgataacgaacagaatactcgccggaatatgccaggatatagtttatccttgcactgactccccaatgggtgaaagcacggtattctccacctatgccaaagttcgccgcccatttattcatggatactttccgtggcttatcatataccgtactgttatcttgatataactgatatccggttccggtagtaaaatacaagctgaattgctgtttcagccaatgcagggagaactgtggagcaaaataatgtgtttgaattttatcactgctgtttggcatgtcgttagtataccggctgccttgataaagtactccgaatcccacccgtatggcaggcttgtttcctatcagataagtataacttcctgaccagcctatgccattgcgtaaacttgaagagtgtccagctactcctatcagttttccggtgtaaaaggtaggccctgtttggagggacaggatagaacgttcgctagtgccgaattgtgcgtatagcactgatgaatacagcagcatggctgttagtaaaaaacataatttacatttcataatagttgtgtttgtctagttaagcattataaatacaaaaatagtaaatcattgaatataatgatcttattagcctatttattttaaaccgagcatgaaaaatgtgatagattaacgcttatccgaatctgtcttagggtggaaaataactgttatgtaatgatttgacttcttttgctactgaatattatgtaaatataggtaccgaatcgtgaacgaaagttattatttgaacattttcctatggaaatttgttataaaggaaaatatgatatacttttggaaaaagtttcctagggaaataattaaagaagatgatgtaacagagtctggttttaatcataaaaagagaagattatgaaaaaagagtttataagaaggtatggatggacattgcttggcattgtggcaggaatggtaggaggatacttatattggcgttatgtgggttgttccacgggaacttgccctatcacttcttctcctgtcaacagttccatttggggggcggcaatgggaggattattgctcagttcatttataccggaacgtaaagaaataaagaaggaggaataagtatgaataagacaattttattttttctagcccttatgctggttaccactacagcttgcggcagaggaaacagtaataataaccctgtaaaagaagaaactatgacaacagaaggagatggaaaagtcatacatttgactaaagctgattttttggcgaaagtatataatttcgagaaaaacccgaaagagtggaaatatgaaggtgacaaaccggctattgtggatttctatgctgattggtgtggtccttgcaaaatggtagctcctattctggatgaattggcaaaagaatacgatggacagattgtgatttataaagtggatacagagaaagaacaggaactggcaggcgcattcggtatacggagtattccgtccattctgttcatccccatggaaggaaagccggagatggcacagggagctatgcccaaagcatcttttaaaaaggctattgatgagtttttattgaaaaaataagtaattttgtgcaatagcattcaagaagaagcatcaatatggaaactttatgtaaaataagagacctctatcgcgctattgcagaatttgaaacccggtttgaaaaggtgcatcacctttgtctgaacgaaggaatgttgttatgctgtctctccaagaagaaacgcttgtcttcgggagagattgcagaactgttaggccttactaattcaaatacttctaaagtcatcagatctgtggaagataaaggctatgtagagcgtaatctgggagatagtgacaaacgacagatgtatttctcgcttacggcagaaggaaagaaaattctgaaggagatggaatgctgtaatattgagattcctgagttactgaggtctgttttgtaatagtaaacaagatactgctgtagatgaagcccgtttttatttttatatcattgctgataatgctctgtcccgctttctcgcaaagcaggatggagcattatcttgactccttgggactggtgaatgtaggccggatggacccgacattgaaaatagatttgatgtatacccgtgccgacaattttaccgggaaagtcctttatgaggatttgcaggaggcttatcttcatcccgaggccgccaaggccttattgcaagcgcaaaagcggttgaaagagttgtatccaggttattctttgattatttatgatgccgcccgtcccatgtccgtgcagcagaaaatgtggaatgtggtaaaaggtacttcccaaaatatatatgtatccaatccggctcggggaggaggattgcataactatggtttggcggtagacgtaagtattgcagatgaaaaaggaaatcctttgcctatggggaccaaggtggatcatttgggcaaggaagcccatatagatactgaggcggcaatggtacagcagggagtcattacagcacaggaacggagaaaccgcttgttgttgcgtcgggtcatgacggatgtgggttataaacctttgcgcagtgaatggtggcattttaacttccgcagtcgtgaagaggcaaaacggaactataaagtaattagataaaggatggaaatatcagcaaaaacactccatttcatcgaagaacataaggaggacgatacgcgtacactggctttgcaaagtaagaaatatcccgatgtagacatggcggtagctgtcacacaaattgccggacggcaggtagcggcccgcaagttgccttcatggcatctggtttccgcattgtggtatcctcctcatttgtctatggagcaatgttcttccgaagcaactgctttgtataaggcctctttgttggaaggcgatacttttgccgatttaaccggaggtttcggcattgattgcagttttatctcccggaatttcaagcaagctgattatgtggagaggcagacggagctctgtgagctggctttgcataatttccctttattggggctggggcatatccggatacataaccgggatggggtggcttatttgcaggaaatgcttccggtagattgcctgtttctagaccctgccagaagagacggacacggtggcaagacggttgccatctctgattgcgagccggatataagtgctttggagtctttgctggttgacaaggcaaagaaggtgatggtgaaattatcgcctatgctggatatgtcattggcattgaacgagctgaaaacagttcgttcggtgcacattgtcgctgtgaataacgagtgtaaggagttattgttgatattgcaaaaagaggccgtttcatcggaaataagcatccattgtgagcatattgcaggcaacggtgagagccagcattacacctttaccttgaagcaggaaaaggcatcggcctgtcccttgactggtcaagtcggaacttatttatatgaaccgaatgttgctatactgaaagccggtgcttttcgttccctcacacaaacctatcctgtgatgaaacttcacctcagcagccatttatatacctctgcttctttggttccggattttccgggacgccgtttccgggttgagtccgtatcgggctttggaaaaaaggaactgaaagtgttcttgatggatatggacaaggcgaatattacgatccgcaactttccattatcggttgcggaacttcgcaaacgtttgaaactgaaagagggaggagatgattatatctttgccactaccttgtccggcgggcagaaagtcttgattagagggaagaagtgttagtttataatcagtttgtaacctattccccttacattcacaatccgtatactgttgtctttggacagtttatggcgtaatttcgtaataaatacatgcaggctgcgtgaattgaagaaactgtcatctccccatagctccaacaagatactttggctgttcaccacttcattccggttctcacacaggcgttttaagatttccgattctcggtgggagagttcttgtatgttccctgcaaaatccagttgttgggtgatggaattgaattgatatcctccgatggtgtaagtattggttatttctttttccacaaaagctttgtgcatcaaggctttgaggcgtacaataagctcctgcatgccgaatggttttttcagatagtcattagctcccagttcaaatccttttactacatcattgatggcagaccgggcggtgaggaataataccggggttgctttatccgattggcggatgcggcgtaccatttcaaaaccatccatacggggcatcatgacatcggccaccaatacgtccggtttctgttcgaaaaactttcttaagccttcttcaccatctccggcggtagtaatgataaaatcctgttcttctagtgtgtccttgataatcatggcaagagtctgttcatcctctactaataaaacgtgtatcttttccatttgcttattcgggaattttaagtgtaaaggtactgccttttcctgtgctgctttccacggaaacagttcctttatgctgttctatcattgtttttacataataaagtcctaatccatatccttttacattatgcagattaccggtcggaacccgataaaacttatcaaacagatgtttttgtctgtcggcaggaatacctattcctttgtcttgtatctttagcatcacataagcgttacggtcactgttacatggactgctgcagcgtgttgcagaaatgcaaatatatgccttttcatcggaatattttatagcattgtctatcagattgctgatcacgttgtacaagtgcaagcgatctgcgcgtaggatcatgtcttctttcataataagtttgaactcagtcggcttatcagctttcaacctatgttggcttatcagattttccaacataggcctcagttcgacaagctcatagtttagacggaaattcttccgttgttccatactcatggaaaggatctgctccaccaatccgctgagctgtttcagctgggcttggataatctgaagatagttctgtcgtttcgtcaggttttctgctccgttgaagttcagtaatgcatcgttggcggcgtaggctacggctatcggagttttcagttcgtgagtaatgttatgtgtgaagtcctctttcatttcttctacgcttttctgccttaagatgatgcggataagaaaccagaatgacagacctaatataataatgataaggaaagaagtataaagtattcctttcatttgctgcaggacgatggtgtttgtcggttctacccataaccggtatgccattttgttgtacaagtcataattgtaataatagctcactgcttccttgcttggcttgtacttttgaggtgagctgaatccctgtaccagagtactgtcccggtgcaagttcacaatttctatgcggtgaggcagatagatgatgccgcgcatggcaagtgtccttgtgaaaaggctgtcgaaagtatgcagatttatttccgtgaaaagatccagctggctgtgaatcccccgttggaagtatttggtgagcagttccagtgtaccgttcttgtcgatggtggtagataccggttcttttatttccaatccgaattttctttgctgtttgaaggcttcggtttctacagtcttggtaaccaatgcactgctgtccagattgatactggattcaatgtaaccgtttacggttgcgttgctccgctttacggagtcgcatcgttccatcatttcattgtagtcgctcacctgtaaggtttctatcaggcaattgtccatatccttcttcatcgaggtatatagtcctgtcaaccaatatgcctgataggcaaagacgcctatcagcgaaaggataatcaatgcggctatggctttaaacggtatcttcatggtgaggcaaaaataggcacaaaataagtattttctttcttttgataacactaaataagacttcgtaagctggtggtaacacatacggaacacttttagcctttactttgcatagaccttaaaaataaaacgacgatgaggacagtgattatcttttgtttatgcttgtttacattcacggtacaggcgcaggacgatgtgaattatacctatatggatagtctttttcagcagctgccggaagtgttggtgaaaggtgaacgtcctgtagtaaaagcagaacggggaaaactgatttacgatttgccccgaatggtagaacggcttccggtgaataacgcctacgaggcggtaaaggaactgcccggcatcgtggaacaagacggtaatctgacattgggcggtcgcggtataacggtggtaataaacggaaaggtcagtacattggataaggaagatctacggacagtactcgaaaatacccctgtcagtcgtttggagaaagcggaaatcatgtatgctgctccggcccgttaccggattcgtggagccatggtgaatgtgattctaaaatcgaatatcgggcagaaacctgctttgtccggcgaagtagcggctatgtatgaacagtctcgcagggaggacattgcaggccgtggaaatttgctctacacttcccggcgcttttcggcggatgtgatgtattcatacgggttcaaacataccactttcggattggacaaacagtcatggcacactatggcgggggaagtacacgagttggacttgaaaacagaggctaaagggtatggcggccggcataacctccgtttgggggcggattatgatttcgggaagaagaacttgctgagtgtggtttacaatacacaataccgctatggacaggactgtacaaaaatgcgtggaacagcccacagtgataaaacggatgacggcagccgccagttacataatgtgacggccgattatcaatcttctttcggcctttcggcaggaatggatttcctttttttctccagtccgtcacagaccttcttacagaaagatatgcaaagtgtccgtcagacattgaattatgacagcaaccaacgtatcaaccgctggttgttctatgccaaccagcttcattccttgcaaggtggaaccgagatcaattatggtgtaaagtatactaccacacacgataacagctaccagttctatcgggatggtgaaactggagccttgatttccgataattccgagaaactgcttcgaaaagaatatactctgaatatgtacaccggtgcttcacatagttttggaaagaagttttctgccgaagtttccttggccgcagagctttatcatgctgagggacgccatagctggatgctgtatcccactgtaaacacaacttatactccggcagatggtcataccttgcaaatgtccttcaccagtaatcgcaaatatcccgcttactggcagttgcaacctattatacagtatgtggacagctataccgaggcccatggaaatcccgacctgaagccaagttccaattattcgctcgacttgaattatctgtataagaataaatatatgataggggtgaattacaattacacccccgattactttgtgcagcttccttatcaattgcccgaccgtctggcggagatgaatcagtttgtgaattatgattttcagaaaagatggaccatacagactatggcttcttataaagtgagtacatggtggaacgggcgcatttttgctttcggtctgttctctcatgacaagaacagccatttccatgatattgcattcgaccggcataaattcagcgtcatcctgaataccacaaacacattcattttatcgaagaaaccgaatatcataggtacgttggctggcttttaccaatcacgtgccatacaaggggtgtataacttaagtcctatttgtaatatttcgacttcacttcagtggacttctccggatggaaagacgaaggtgatattgaaaggaaatgatattcttaatacatcgaatatgaccacccggctggcgtgggggcagcaacggaaccggacagaaatgaattgggacaatcgtagctttacattttcattcctctataaattcggcggatacaaagagaagaaacgtaccgatgtcgataccaagcggctggggcgatgatttttagtggttagtaatcactaaccactaatcactaatttgccatttttgccttgaaagccagcgcatacatacgcatctgttttaccatcgccaacaagccattgctacgggtgggcgacaaatgttctttcaaacctatcttttctataaagtataaatcactgcttaatatttcatcaggagtatgtccgctgactactttaatgagcagggcaatgataccttttacaatcaaggcgtcactttccgcctggaacaccactttgccgtcttccatatcggcttgcagccatacgcggctttggcaaccatctatcaggttttgttctgttttatattcgggggcgagtggttcctgctcgttacctaagtctatgagcagttgatacttgtccatccagtcatcaaaatcactgaactcttctatcacttcgtcctgaagttcgtttattgttttcattattttatcatttatttctcattataaatcacatccatcaccgtctgtcctaccgctttcagcgtgttacggtcaatgttctccatcgtatcatttaccgtatgccagaaagagccgaaagaactttgcggattaccggcatcataattaatgatatccacacacgggatgcgggccagtttgttgacatagatatggtcgtctactgtttcgcccccgtcttcctttacaaaatatttgccgtatcccagctcatgtgcctttttccagatcttcttcatctcggaacgggcggtgcgggccgagtaaccttcataatagaacgtggcatcttttccgcctaccatatccagcaagattccatagcgtgcattatagttctgaacatgtggggtacgtgcccagtattgtgaaccaaggcaccaagtgtcttgtttgtatctaccgtcataaaattcaggaattccataatcctccgaatcaaaaaacacgatatctatgcccagagcaggttgttctttctgtatctgacgggcgatttccaataacacacctacaccactggcgccatcatttactcctaaaataggagtgtggtgatttttcgggtcgggatcattgtcggcatacgggcggctgtcccaatgggcgcaaagcaggatgcgttttttactttcgggcttgtaagcgccgataatgttgcgtgatttcagtatagtaccatcataagctatcaaatcagcatattgattgtataccttggctccgaatttttccaattgtcctgccagatattccccacattctttgtgcgcctgcgtgttagggacacggggaccgaaatcagcttgtacctgaatgtactggtaggcgctgtccgcattgaattcgggagccttgatcacttctttgtctacggtttctgtccggtcgtttctgcttttactgtttccacaggctacagccgtcaatacaagcagcaagaccgggattactaaaacgttttttatcttcatacttattccttgttatttgtgcattgtccttatcaagatagagaatctgcgccgcaaagttacgttattttctttgtacttcttccataacgcgcaggaagtttcctccccagatcaggcggatactttcttcactatatctttccaacagcagccggcgtgtaaagtttatcaattctgatgccgaagcacagcctgtgataccgccgtcaccgtcaaaatcggttcctatccctacatgctctatgcccatgacatttaccatgtggttcagatgctcgatggcatccttgatggtagcttctccgttcttacgaaggaatccgccatacatacatacctgtgccaccccccctttggctgccaatgctttcaattggtcatccgtcagattgcgcggatggtcgcaaagggcacgggccgaagagtgagaggccacgatcggtttgctgctgatttccagtgcatcgtagaaacttttctctccggcatgagaaatatctaccatcattcccacacggttcatttcttttatcacctgttcgccgaatgtgcttacgcccagttcttcctcattataacgggcggagccgcagatatcattatttccgttgtggcaaagtgtcatgtacaccacgccacgatgtcggaaacgttctacattcgtgatatccttgccaatggcatatccgttttcaatgcccagcatgacagcctttttccctgcttttttcaaacgggacagatcagcgggagtatatgctatatctacggctgtgcagtttttggcaaccatctcctctatttcgttcaggatgcggtctgctttggcagtagcggccgataaggcttcatcggtacgttccaattgcttcaggtaagccaccatgatggttgcgtccagatgtccttccgtcatcttatgcaggtctaccaggattttcttgtcacgggtggcaaaatttattccttgatcgaagaacatgggagtgtcgcaatgtgaatccagcgttatcatgcgtctgtgaagtcttttggcttctctgaaagaagaagattcccttataaaccactcgaatagtggcatcatgcatgtgttgttttccaatatgaaacattccggatgccattgcactcccatcattgacttgcattcggtagactccatcgcttcaatgactccgtcggatgaacgggcggttaccctgaaacccggcgcaacctcttttaccgcctggtggtgaaacgaattgaccggcaaaacttctgtttcaaacaatttgtaaagtaaggaatctttctctatccgaaccgtatgcgaggcatacccccgtcccaaatcctgatcgtgtttgatccgtttcccttccatttgtacatgaatatcctgatacaggctgcctccaaaagcggcgttcatcacctgtatgccacggcatatccctaaaatcggtatctgccggtctgcggccagtttggcaagcaataactcctgacgatccctccgaggattgatgctgtgtaattcctttaccggctcttctccaaggaacaaagggttgatatccgcacctccggtcagcagtaagccatccaatgcattcaatgagtttatcaaactgtcagtgtcgtcaactggagggatgatgaaaggaatccctcctgctttcagaatggaagtgaaatatccttccagtaaagtacaggctccctcctggaagtttccggtaagtccgataacaggagcgtccttgtggcatggaaatgtgcggtgtatggcatcgtactcggctgaaatgtcaaatgtttgaaacgttttcataagttaaattattcatagaaactgagcaaagatagggataaattcagatttatttttcatatttgctaaaaatctaatgaccatggaaccgatacaggacttcgccagcttgataagctgtttacgctcgttgaaagaacggaaacgggttgtggttgtttgccctaatgaccctcataccgaatacgttataacccgtagtttgcacgaaggctttgccgatttcttattggtagcggatacgccccatttattgaattcggaatatatccggatgcaatatccggaccatgtgaaagtatacgaggcgacaagtcccgacaaagcggcgcaggaagctgtttcgctgatacgtgagggacatgcggacgtgttgatgaaagggattatcaatacggataatttattgcgggccgtgcttaataaggaacatggtatcctgccgaaagggaatgtgttgagtcatatcacggtagcacagattcctacatacaagaaacttttattcttctcggatgcagcggtcattccccgtcccaccttggaacaatttgaggcgatgttgctgtatgatctggaggtgtgccggcgcatggggatagaagctcctcgggtagccttgattcattgtacggaaaaagtgaacgagaaatttccccatacgctggactatgtgaccttgaaggagcgtgcggccgccggtgcttacggaaacatgtacttggatggtcccatggatgtgaagacggcatgtgatgcgcatagcggtgaggtgaaaggaatcagttctcctgtggtgggacatgcggatctgcttatctttcccaatatcgagtcgggaaatacattctataaaacggtgtcgttgtttggtgacgccaacatggcaggcatgttgcgaggtactacttctcctgtagtggttccttcgcgtgccgattccggtaattcgaaatattatagtctggcattggcctgcgtggccggataaaacctttaaattatgaagatatttgtgattaatccgggctctacttctaccaaaatagcccttttcatcgatgaaaagccggtatgggtggcaggggcccatcatactgcggatgacttgtcggagtttcaccacgtcaacgaacagtatgagtaccgtaagaattttatactgcgactgcttgccgaggcggatattccgttggattttgatgccgtcattgcccgtggcggtttgttgaagcctacgcccggcggggtgtatgtcattaacgaacagatgaaacatgatttgctgaacgcccggatggagcacgcttgtaacctgggagcgttgattgccgatgaaattgcccgggaatgtcattgtcccgcctacattgccgatcccgaagtggtagacgagctgcaaccggtagcccgtttgacgggaataccggagatagagcgcatttccatcttccatgccttgaacagtaaggcggtatcgcgtaaatatgccgtttccatcgggaaacattatgaagatttgaatctgattgtggtgcatctgggaggtggcatatcggtgggcgcccactgcaaaggccgggtgattgatgtcaacaatgccttgaacggtgaaggcccgttttcgcccgagcgtgccggaacgattcctgccgaccagtttgcagagctgtgtttcagcggcaaatacactttgaaacaggttaaaaagatgctgaatggcaaaggggggctgacggctcatctgggtatgaatgatgtggtgactatcgcccggaaagcttccgaaggcgaggagccttataaaggggtattggatgcgatgctctatacggtggccaaacaggtaggggccatgtatgtcactctccgtgggcaggtggatgccattattctgacgggaggcattgctcatagtgattactgtgtagggattctcaaggaacagattgattatctggggccggttgtgttgatgcccggtgaagacgagatgggttcgctggcttataatgcgttgggagctttgaaaggtgaattgcctttgcaggtttaccggccggaataagaagatggtggtacatcggaattaaaataagcgataaaattgttcaaatccctcatggaagggtaatgtattgatatacagaagactattatgaaggaattattataaattccttcataatagcttcagggatgtttttacccggccagtgctaccagtttatacatatttcctgttgtggtatgcatccgttccgctcccagggaattcatgattcttcccattttgtttatcgtgatgccgcgcatggctgctggatatcgtttcagtaggatattgaacaagcatactgccgagtaaagtttgaagtcttctcctttctccggcagtctgaaacaatggagaatcatttccgcttcggtgggcaaggcataataggcctggttgcgcagtttcagttcggattcctccgccgccgagaaccagtaacgctttccctcgtccagttctgctttcagttgggcgaaaagctgtttgtgctccagtggcgagcagtctatcttttcttttacctcggcaaagaaataacggcggcttccgctggggtcggtgagcagcgctttccggttgctggtgccgatgaacgaggccatccggggcagatggctgtaggacgagcggtgcgacttgcggaaatccagttttttcatctgcatcagatttttcagtaatggcagtttctgtggtgaaagacggtcgtactcatccagattaatcagtccgaagaaagccagcttctgctcacatcctgcctgtccggtcagttcgaagctgtccgtatagtagtctttcaacgaatcgggcatcagcaattcgcagaaagtggatttgcatcttccttgttcgctgctcaccagcatgggagctacggcgttggcacaccgcgccatgtgtccgctccactgggcggtgacacccagcatccagcggtggaaactgtttacccagaaatctttcgtagagatgcgttgtgccagtggcgtcacgcggtccatgccgtcccattcgggaagagcatccatataggaaagcaacgggtgatagtcgggcatctgttccgagtttacgaaccggcttacatccttgtcccagcagttgatgtgacgtgcacgggcttccagacacaggctgttcagggtgcgctggcttattaccttatatataggtgtgtcagcgtcttttttgcaacattccgtttgttccgtcagtacgttgaagcggaagtggtagcggctcagcaaatattgttccagtttttgctgtatttgctccatttccggtttcttctgcattgataatgagggagatgaactcttcactgtcggacttgtcactacattcgaggaagcaagcttcttcattactttgtttaataactttttatccattatttgttgttttaggtttccgttagaacaaagatactgtgtaaaatagcgttttgcaagtgtttttcgtggggttttagagaaaagtgactaagcgtaaacatcctgaataacaagctgtttcgtccggttgattacacgatatcttccttttgattcagttgtttcacttaagtgatgaagtttgagcactctagtaatgaaagttcatcacttaggtgatacaatatcatcacttaagtgaaacaatttacttgaagggaagatacaacgacttcgaccggatgatacaccttattcgtccggttgttgtcatttgatgaaatgtgagtattttgccggacagtcatcacctcgggatgcgtttttggagatggaacggggctgaaagaatatgaagttattatgaagaaatcgtagaaggatcattcataataacttgcttgtaatcagtaggtaatgtgctgatgaagggtttgacggaaataattccggtattacattttctatgccggcgagtatgttctcggttacagagatggaaacaggagttatttgaacagaccggtgggcaagagatttttcatcaggctccggtctgataatagaatggtatctcatgatgaaataagtaaattatggggaaggagcgataatggaaaatcatagcctttataatttgattgcaaaaatggggaaggtcttatcagtggatactcgcattgaattagttaccgtagggaaggacggttatgctctgaaaatagaggatgttgcgagctgcatatgagtaagcgtttccgcgattctataagtgtggtaaaataaaaagtttaattagccttgtttagctattttccttttcccatttatcaggaagtagttccctgtatttttcaaggggtgtgttcggttgcattctgcggttctattgaaggtgattgtgatcccggaaaggctgaactcttcttccgacaacatgatgggtactatttgagtgaacgaaggagaggaggttgtcgttcgggagtgggcaacaccattataataatcacgaaccacatctttcctagcttgtttaacgctatagccccgtcgggacatccaggagctcatatcccccaaagtggtatgttgcttgcggcaaacatcggctaaagaacaattgtggtctactttcaatacttccagaaaacgtttccaagtggctctaaatctactttcttctaaatccataatacttcgtttttatacgctgcaaagatacaagaacgaaaaaagacagactaggtagaatcgcggagacgcttacaacatattaaaattaaagacttttcgataattatttgcgcaaataactatcacttgttgtctgtatgctttccgcacgttttacctttactttcttgccaaagtcaaacttatatataaggtttaagcacgctccttgataaggggttttattattttcttctattctgcttagattgttattggtaattgtggtcaggtttcttcttttattcaaaatagcgtaaactgataaatttatgcagaacttttgatccaggaaatatttgtaaaggccggcattcatattgtatacactgtgatatattgtttcgcttctacgtgctcttctttctgccataaagttaaaacttccaccgaaagtatttgtgaaacgaagactgttgtcacaaaagaataagcaatggactatatggtaggtctgtttgggcgacacttctttagtgtagtcgccatcaagggaggcattggtagtccaccagctgaacaaggccttagtgaaacctattgaaaaagcatgtcgataagacttccctatattggtcggcatagtataggtgatgatcggattgtctttatcttgatagatcaggggaaataaatcatctttgcactttgcgtaagcgtagcttatactccaagtatttgacagactcaacaatagcctgatacgatgttcggtagtaggtactaaatccggattccctttagcataagaatattcagagatatagacaatagccggattcatgctcttataagggatatttcccattctttttgaataggataaagaggcttggttcttttcagagaaaaggtaacccaccttgatggaggggaacagattgcgatatgtgcgtttgtcacctgctatgttattggaaatacatttcacttcatcttcttgtacccgtataccgccatttaatgtaaatttcttccattgccatacatattctgcatagcctgcataacctatacctttataggtaaatagcccgcttttatcttctttctgccatccttcttcactctgatatgcgtaatacatttggttgccggtgtggttattataatagtcgccaccccatttcaacctggaatgtttgttgagcaagaagatataatttatctctgctttccataaatcagaaacagttccggtgttgctacatttattatcctcttcgtttttctccggatactgataaagataatggtgattcagttctttcgtttcgtcacttctcaaataatcaagaactgttcgcaaagtatgctttccgttttttgatttccaattatagttcaaactagcctgatatattttgtcatcccctttccctttactatggtaggaagaggtatattccttttctgtttcttgtatttcggaaaaagaagaagattttagtgtgcttccagcttgttttaccatacagttaagtccgatgctttgcagggtagttatatcatataacatactgaatgtttcattgattcttcttatatttttacggtctatattctggtttacaatatgggtattctggtggctgttatgggttatattttccgtgatataaggatctcctgcattagaaagaactagattgttgtaaaaattccatttcccaagccgaaggcttaatggaagacccaagcgttcccaatgactatttctttttctcatttctcctagcaaagagggtgaaccattgcctccgccatctgcattttttttcaaagatatatatgattcctcctttagtcgtggcattatattgtaaatcagcttccggcaggatttcaacattttctatgtccgtggcttgcagacttgataattctgtgcggtcatgaagttctctgccgtttatgtatattttagacacggttcctccattcagccttagttcaattatatgcaaggaaagaatttcaaatataggaataagaagagtttgcagagtacggagcaggggataaagttgtgaaataatttttgttttatatgttgcaggcacgggatgcgtatgatattagaatcgcggaaacgtttacgaagagcgcatgaggaatgcgcgaaacttgagagtgtcatctgatgtcatagtacaggctacagggctttctgaagaagaaataaaagccctttaattgaattgcaaagggtttggccggaaagaatagtttctattcatattcgtgtttccgtttcggattcatcggaaaccaacctttcagcacacgttcgcgttgctcgaagatctccttgatagtccagaaagaagagaaagagaagacacccaataaagaggaaatcaagatgtcactgataagtacagtccctataatgcctgctatgcccagtaccaaaaatatccaccagcatcgtgtaccccaataatattcggccttgaccacgatggggtggaaaagaccgattattaaaaaggtacaaatgccgatggcgataccgcctaaatggtattcattcagccattccattctttcttagctttgaatgggtatttcttttttgatgctctgttccagagagatcaaggtctcggtagccgtaacaccgggaatttcctgaatctttgagttcagcaagtccatcaaatgttcgttgtcacgagagtaaagtttggtcagcatagtatatggacctgtagtgaaatggcattccacaatttcgggaatcttcttcagttctgccactacgtttttgtacatggaacctttttccagcttgattcctacgtatgtacaggttctataccctaaactcttagggttcacatgatatcctgaaccgataataactcccaaatcaattaatctttgcacacgctgatgaatggctgcgcgtgaaactccacattctgctgcgacatctttaaacgggatgcgggcattttgggatataatttctagaatttgtctgtcgagactatcaattttctccataatataccgattttaatgttatcaatctgtaagcaaatataggaatactttttaatttatctactattttgcaagaaaaaacaggatttctttgaaaaaaagtgcaagaagaggagctaatcacctattttcttctctatttcgccgattttccctcttctttcaaatgagaaggtatcgctatgtgtatctaaatagttcaacaggaatagcgattttcttaacaaatatttttgttcttcggactctttcaacaaagcatcctgatagagcagttcggataacatgtcgatgcgcgtgagcaattcctcgccaccatagttttgtcccatttcgttcagtatatattccgcatcctgatcataatagaaggtggaaggatgattgaagtaggcacgataaatgctttgaagttgcaattgcagctcgggaccgtcctttttatctctttcttctaccaacttttccaatgcttcgaaaaactgttgaagcaaccgcataatgtaatctctttgcagcatgttaattgtcctcttcgtttttatgggttagtgttactaatactttatctatccgggctccgtccatgtcgactatttccagtgtgaagtcattccattccatggcttcaccggtcttgggaatgtgacctagttgttgcaagatgaggccgctcaaagtgttgtaattataatcggggtataaatcctccatttcgaaatgactcagaaagtcatagaaagagcattgcccgtctatcagccagcttccgtccttgcggggaacgatatcgggatcttccgagtcactgggcaaggtgcctaccagggcttccagaatgtccttcatggtgatgatgccttgcagactgccgaattcatcacagattaatccgtatttgatgttgtgctggcgtatttgttccaatactttatatacatccatgttttcgtggaagtattgtgccggacggatcacatcacgcagattgaattcgcaactgttcagcttcccgaagaggtctttcaggtaaactactccgatgatgttgtccagggtgtttccttgagttacagggtaaacttggtacaggtgttggcatacgatgtcatacagttgcttgttgttcatgtctatgtcaatggatacgatgtcgctgcgataggtcatgatggtgttgatgctacggtcgcccagggagaagacgcggtccacaatatcctgttccacttcttgcacttcgccgttctcagtcccttcgtctatcatggatttgatttcctcttcagtcactttttcttcagctgtgttgatatgcagcaggttgaagataagtgaagtgcttttggcaagtatccatacaaaaggagaggctatgacggacagccagtacatgggacgtgccaatagcttggcagcacgggtggaggcactcatgccaatgcgtttgggcaccagctcgccaaagataatagtgaggtaagtgaccagaatgacaatcagggtttgagccaataaataggcatatgtggcgggtacgccggcgtcagtcagtatgttcccaaaatcggtggccagcacgtcgccggagtaaataccggtcaatataccaatcagggtgattccgatttggatggtggataaaaacttgtccgggtcattggcaagctttaaagcgatacgcgctgtagagcttccatgacggatatcattggacaaactacttttacgcgctgagatcagggcgatttcggacatagcgaataccccgtttaataagataagtgcgataataatggcaatttccatgtaagaatttacgttttgttttgctaacaaatgtactaagaattgtgttttctctttcttcttttagatttaattaatgaattatctgtcatttgcgctatctttgcggtgtctatgcttagaaaggagtaattatgcatccgttggaactattcaaatattgtccgaagtgtggttcgccgcactttgaagtgaacaatgagaaatcaaagcgttgcgccgattgtggctttgtgtattatttcaattccagtgccgctactgtagcttttatcttgaatgataagaatgagttgttggtgtgccgcagaggaaaagaaccggcaaagggaacattggacctgtccggtgggtttattgatatgtatgaaaccggcgaggaaggtgtggcacgcgaggtgctggaggaaaccggcttgcaggtggaggaggctgtttatcagttctcattgcccaacacttatctttattcaggatttctggtacatacattggatcagttctttctttgtaaagtgaaagataccagtcggataaaggcgatggatgatgtggcgaaatctttctggcttccgttggatgaagtgaatcccgaagaattcgggctggattctgtgcgtgaaggagtccggcgttttttgaaagaacataaactttaatgataagatatgaaaagaaaaaccttattgatggccgcattgatgggaggctgttccttgcagggaatggcgcagcagataactcccaaggatgtggcaggtgacaaggaatataaccgggtatgccgggaatatgagttgaaaggcggggacagcatggaactgttacaggcttatctggacaaatatcctgactcccgtcataaaaacagggtgctgtcactgattgcctctgcttattttatggagggaaaatacaaggaggccattgccctgttccggtcgtgtgatctggaggctttgcctgataaggaaagagatgattgtgccatgcgtctggccacctcttatctgaaagaagataatttgcgtgaagcggctgtatggtttaccttgctgaaagaggtaagcccattgtatcaggatgacgctgtctataatctggcttatattgattatgtggagaaacgctatgacaaggcgctgaaaagtttccagtctttgcagaatgatgccgtatatgcagcattggttccttattatataggagagatttatttggtgaaaggaaattatcagcaggcccgtactgtggcaaaagcgtatctggagcaatatccagctaaaaaggatgttcctcagatggaacggatttggggagaggcttgtttcggattgaatgattaccaagcggcgatacctcctttggaaagataccgtgaaagtgtctcccacccgcagcgtaagcctttgtatgaactcggtatgagttattattatactggtgtttattccaaggctgccgctactttgggggaaatggcttcggtacatgatgccttgtcacagaatgcttatctccacatggggctggcttatttgaacttgaaggagaggaacagggcacgcatggcattcgagcaggcagccaatttcagttttgacccgaaagtaaaggaacaggctctttataattatgctttgtgtattcatgaaacctcttattctccatttgccgagtcggttaccgtgtttgagcgttttctgaacgagttcccgaactcgccttatacggagcgtgtcaatgattatttgatagaagtgtatatgaatacccgcagttatgaagctgctttaaaatctatagcaaagattgaacatccgggcacacgtattatggaggccaagcagaagattttgttccggctgggcacacaagcgtttgcgaatgctcgtttccaggaggctctggagttcttcaaccaatcgcttgctgtggggcaatacaatcaggcgacaaaggcggacacttatttctggagaggggaatccaattatcgtttggaccgttttccgcaggcgggtaacgattaccgcttgtatctggaatttgccaccagcaaggacggacaggaatacggtctggctctctataacttgggatatacttatttcaaacagaaaaattatggaaatgcgggcacttggtttacccgttttgtggacaggggaagtgccaatgaacgtgccatgcaggcagatgcctataaccgtataggtgactgtaacttctatgaccgccgttttgaacaggctcgtcaggattatgcccgtgcggtggagattgatccgtcactgggggattactctttgtatcaggaggcgtttgtacgtggtttgcaacgtgattataatggaaaagtgcagacgttgaaccgcttgatttcggattatccggaatcacaatacatggatgatgccctttacgagcagggacgtgcttttgtgcagatggaagataatgccaatgccattgcccgtttcaatattttggtgaagaaattcccggagagcaatgtcgcacggcgggcagctaacgagatcggtttgctgtactatcaggatgacaagtatcctgaagccattcaggcttataagcaggtcatagccagttatccgggcagtgaggaggctcgtttggcgcagcgtgatttgaaatctatctatattgatttgaacaaggtggatgagtatgccaactttgcttcaactatccccggcggtgccaactttgatgtaaatgagcgtgattcattgacttatgtggctgccgaaagggtatatatgcgaggagaggtcaccgaagcccgcaacagctttacccgttatttacagactttccccgaaggtgctttcagcctgaatgccaactattatatcggtttgatagactataaccagaaagcctatgaaagtgcagctcggcatttggataaagtattggaatatcccaacaacaaatattctgaagatgccatgttgatgggtgccgaaatggcttatacggcgaaggattatgaaaaagctttgcatatttacaagcaattgaaagataaagctgcttctatggagcgtcgccagcttgcaaaaaccggaatgttacgcagtgcgcatatgctgggaaatgaggaagagattatctttaccgcaacagatttgctggccgatactaaactggcgccggaattgtctaacgaggcacattattaccgtgcaaaagcttatttggatgccggcaagacggatggagctatggaagatctgaagatcttggcaaaagacacccgtaatgtatatggagcggaggccaaatataaagtcgcccagatttactttgacggcggacaaacggataaggcggagcaggaggtgctgaattacatcgaggtaagtacaccgcatacctattggctggcacgcagctttgtgttattggctgatgtgtatatgaagttgggacgtaacttggatgctaaacaatatttgctttcattgaagcagaactatcaggctgatgatgatattgccggaatgattgaaagcagacttgagaaattgaaaactgagaattaaaaattaaaaaataagtgctgaatatgataagtaagaaattgtcaattgtccattgtcaattgtccattatattggcttttttgcctctgtctgttgcatatgcgcagcaagatagtacgttgaaccgcactgtggtggtagagaatgagtataatcccaatatcatggatgcctcaaagattaatgtcctgcctaaggtggaggagccagctgtaatgaagaaaggcatagaatatgctacagccttgcgccctgttttggcctggacgtatgaaagtatgtctcctataacccgtgaatgggctatgaaccgcgcgaaacgtgggtatgtccgtgccggatatggaaattatgggaatgtggattttaaggctgggtatctgtgggatatcaccggaaaggaccgcctgaaagtcggagcatctctggatggcatgaacggaaagctgaagcattggaatgctgaggattggaaatcacgtttttattctactgagttccgtttggactattctcatgatttcagcaaggtaactttgaatttaggtggcggcctgcaatcacaagtgtttaactatatgcctgattccgaagtatatacggcttctgccagagctgctgataaacagcatcatactttaggcgattttcacatcggtgtttcttccagagatgaatcgcttcctttgcaattcactttgcagaccggattgaagtattttggtatcaaatatccgctggattattcagataatgcatctacaggtaaggagaagattgtacacaccgaaggagatgtatggggcaagctggataatgagcaacgggtaggcatccgtttcgagatggataatctgttttattcttcggacagtttaatgggcaactatacttcactgggtttgaatccttattatatgttggaaagtgatgactggcgggtccgtgtcggtgctcatgtggattggcagtcgggggaggacagtggcattgatgtgtctcctgacgtgaaagccgaatacttgttctcggatagttatgtgctttatttacatgcgttgggagggcgtgaactgaatgattatcgccggttgaatgctttttcaccttattggtctttaaacgcccggatgccttctacctatgtgccactgaatgctacattgggttttaaagcatctccggtaaatggtttgtggtttaatatctttggtggatatcggatcagtaaagatgagttattttgcaatctggtggatgcggacgggtattattttactcatttcttgcaggataaagcaaaaaccgcatatggaggtgctgaactgaaatatggttataaggactggtttgacgcttcattgaaaggtacattttatagctggaagacagacaatgaaaatgaagagctgtatttaatgaccaagcctaagtttgaattgaatttttatgctgaggctaaggtttttgaaggattgaaggtttatttgggctatgaatatgtacagaggaaagagtatgtaatagaagaagggaatagcagcagggattttggtttgggcaatatcagcaatttgagtgtgggagccagttataccttcctgaaagacttgtctgtttttgggcgtgtgaataatctgttgaataaacaatattattatgagtacggctatcctgctgaaaaactgaatgttctagccgggctttctctggttttttagttaaatagacattcggaaaggacttttttaagaaaaaaaagcagaaacataccttattatataggtgtgcttctgctttttttctacttttgccccaaaataaaatggaatacatagtattatgcaaaaaaatctagtaatagttgagtcacccgctaaggctaaaaccattgagaaattcttgggtaatgattataaagtcctttccagttacgggcatatccgggatttgaaaaagaaggagtttagtatcgatgtagagaatgggtttgagccgacttacgagataccggcagacaaaaagaaattggtagccgaattgaaagcggaggcaaagaaagctgatatggtatggcttgcatccgatgaggatcgtgaaggagaagctatttcatggcacttgtttgaagtcttggggttggaccctgagaagaccaagcgcattgtattccacgagataaccaaaacagcgatactaaaggccatcgaaaatccgcgtgacattgatgtaaatctggtaaatgcccagcaagcacgccgtattctggatagaattgtaggttttgaactttcaccggtattgtggaagaaggtaaagcctgctctttctgccggacgtgtgcaatctgttgccgttcgtttgattgtggaacgtgaacgtgaggtacatgcttttgtcagtgaaccgtcttatcgcgttacagcagtgtttgaagttcctgatgttgatggaaatgaagttgaagtgaaagcagaattgtccaaccgtttcaagaccaaggaggaagcacaggctttccttgaaacttgtaaggatgcgcagttctctattgaagatataataacccgccctgtgaagaaatcgccggcggcaccgtttactacttctacgttgcagcaggaagctgcccgtaagttgggatttacagtagcgcagaccatgatggtggcacagcgtctgtatgaaaacggacaaattacttatatgcgtacggattcggtgaacctttcggatttggctttgaatactagcaagcagactattttgtccctgatgggagaaagatatgtcaaagtccgtaagtttgccaccaagactaaaggagcacaggaagcgcatgaggctatccgtcctacctatatggagaatgagacggtgagcggaaccggtcaggaacagaaattgtatgaactgatctggaaacgtaccatcgcttcacagatggcagatgcggaactggagaaaacaacggctactattgtaattagtaacagcagcgagaaatttatcgctaccggcgaggtgattacttttgacggtttcctgcgtgtatataaggaatcatatgatgatgacaatgagcaggaggatgagggtcgtctgttgccgcctctaagcaaaggggaaaaactgataagaaaagaaattttggcaactcaacgctttacccaatgtccgccccgttatacggaagccagcctggtacgcaaactggaagagttgggcatcggtcgtccatctacatacgcacctaccatttctactgtgcaacaacgcggttatgtagaaaaaggaaacagtgaaggtgtgaaacgtccgtatgataccttgaaactgaaaggcggcaagattacggaaattaccaagacagagattacgggaaatgaaaaggccaagttgttacctactgataccggtatcgtggtaaacgatttcctgatggaatacttccctgaaatcatggactttaactttacagcgaatgtggagaaagagttcgatgaagtggctgaaggagaaaaggaatggactggtatgatggacagtttctataaaggtttccatccgttggtagataagaccattcactctaagactgagcataaggtgggtgaaagagtattggggacagatcctgtaagcggtaagccggtatcggttaagataggtcgtttcggtccggttattcagattggtactgccgatgatgaagagaaaccgcgttttgcgcagttggcaaagggattgtctatggaaaccattacgttggaagaagcgttggatgcgttcaagcttccccgtacgttgggggattatgacggtcacacggtgacggtaggagtagggcgtttcggaccatacgtgcgctatgacaaactgtttgtttctattcctaaaggaacggacccgatggagatttctttggatgaagcggtcgaactgatcaagaataagatagaagcgcaggagaagaagtttattaaagtattcgatgctgaccctgatatgcaggtcttgaacggacgttacggcccatacatcagctatcagaaaaagaattataagatccctgagaatgtagaaccggcggatttaagtctggaggcttgttttaaggtgattgaattgcagaaaagcaaggcggaaacccgtaaaacgaaagcggcttcaagaaacaggggaaccgtaaatatggaagaggagtccgaaaaaaccgaagaatccgctaaaagtaaggcggctcccaaggtaaagggcactgcaaaagcaaaaaaatgacacgtatatttctaataggatatatgggtgcgggcaaaacgactctaggtaaagcgtttgcccgtgaaatgagtctgaatttcattgatttggactggtatatcgaggaacgtttccataaaaccgttcaacagttgttcttggagcgtggagaagacggattccgggaactggaacggaaaatgttgcatgaggtggccgaatttgaagatgtggttgtttcggccggtggaggaacaccttgtttttttgataacatggagtatatgaatgactgtggtgatacggtatttctggatgtggaacctgctgtgttgtttcgccgtctgagagtggccaagcagcaacgtccattgttagcaaataaaagtgatgaggaactgatggattttatctgtgaggcgttacagaaaagacatccgttttattccaaggcaaaacatctgtttaaagctgatgagctggaggataaaaaacaaattcaagcctctgttgacagcttgagaaagcaattgaataaataattatatatagtaaatacacactctttgtacagaagaagaaatgagaaaatggcgtattgaagattcggaagaactctacaacataaccgggtggggaacttcgtactttggtatcaatgacaaaggtcatgtagtggtaactcctcgtaaggacggcgttgaggtcgacttgaaagagttggtcgatgagttgcaattgcgggatgtggcagctcctatgctggtccgttttccggatattctggataatcgtattgaaaaaatcgcgaactgctttaagcaggcatctgatgagtatgggtataaggcccagaattttatcatttatcctatcaaggtaaaccagatgcgtcctgtagtagaagaaatcattagtcatggtaagaaattcaatttgggactggaagccggttccaaacccgaactccatgcggtgatagctgtgaatacagattcggattcattgattatctgtaacggatataaggacgaaagttatattgagttggctctgctggcacagaagatggggaaacgcatttttctggtggtggagaaaatgaatgaattacgcctgatagccaaaatggcaaagcagctgaatgtgcggcctaacataggtatccgcatcaagctggcttcttcgggaagtggtaaatgggaagatagcggaggagacgccagtaagtttggcttgacatccagtgaattgctggaagcgcttgacttcttggaaaagaaagacatgaaggactgtttgaaactgattcattttcatatcggcagtcaggttactaaaatacgtcgtatcaagaccgctctgcgtgaggcatcgcaattctatgtgcagttgcatgtgatgggatttaatgtggaatttgtggatatcggtggtggtttgggggtggattatgacggaactcgttctgccaatagtgaaagtagtgtgaattactctattcaggagtatgtgaatgactctatctctacgctggtagatgccagtgacaagaatggaattcctcatccgaatattattactgaaagcggacgttcactgactgcccatcactccgtgctgattttcgaggtgctggaaacggcgactttgcccgaaatggatgaggatttcgaagtaggtgaaaatgaccatgaattggtacatgaactttatgagatatgggataatctgaatcagagccgtatggtggaggcgtggcacgatgcacagcagatacgtgaggaagcacttgatttattcagccacggtattgtggatttgaagacccgtgcccagatagagcgtctgtactggtcggtgacccgtgagatcaatcagattgcttcggggttgaaacatgcgcccgatgaattccgcaaactggacaaactgctggctgataaatatttctgtaatttctcgttgttccagtcgttgccggactcgtgggcgatagatcagatattccctatcatgcctatccagcgtctggacgagaagcccgacagaaatgctaccttgcaggatattacttgtgattcggatggaaagattgccaattttatctctacccgttatgtatcgcatgacctgccggtacattcgttgaaaggaaaagacgcttattatataggtgtgtttctggttggtgcttatcaggagattttgggtgatatgcacaatttgtttggagataccaatgcggtgcatgtcacggtggatgacaaaggatattccattgatcaggtaattgatggtgaaacggtggccgaggttttggattatgtacagtataatccgaagaaactggtgcgtacactggaaacgtgggtgaccaaatcagtaaaagaaggacgaatttctgtagaggaaggaaaagaattcctctctaattatcgttccgggttgtacggatatacttatttggaataataacatgaaagagaaactgactatcataaaagtaggtggaaaaattgtagaggaagagtctacacttaatcagttattggctgatttttctgctataggaggttataagttgttggtacacggtggcgggcgctctgctaccagactggcggcacaactagggattgaaagcaagatggtgaatggtcgccgcattacggatgcagaaacgctgaaagtggtaaccatggtatatggcggactggtgaataagagtatcgtagccggtcttcaggcaaaaggtgtgaatgccattggactgaccggagctgatatgaatgtgatctgttcagtaaagcgtccggtaaaagacgtggactatggctttgttggtgatgtagagaaagtaaatgcctattttttggcggcattgatccgtcagggcattgtgcctgttatggctccattgacccatgacggcaaaggaagcatgctgaataccaatgctgataccattgccggagaaaccgctaaagcattggcctccttgtttgatgtgacattggtttattgttttgagaaaaagggtgtattgcgtgacgagaatgatgatgacagtgtaattcctgtcattactcctgaggagtttaaagaatttgtagcgcaaggtatcattcaaggagggatgattcctaagctggaaaattctttttctgctattgatgcaggcgtcagtcaggtggtaataaccttagcatcagccattagtgaaggaagtggaaccgtaattaaaaaataattcaaaaaaacaggcgggtgagtgtaactttagtgtaactcacccgtcattattacagagcaatgcgagagatcagtttccgaaacgatattctgcccctgaaagacaaactctacaggttggcgcttcgtattacgctgaatagtgctgaagcggaggatgtggtgcaggatacgatgatcagagtatggaacaagcgggatgaatggccgcagtttgaatccattgaggcatattgcctgaccattgctcgtaacttggcaattgaccgcagtcagaagatggaagcgcaaaatttggaactgacctctgaagtgcgggagatgcctgatacattgacgccttatgatcggttggcgcagaacgaacaaatacagttggttcaccgtctggtcaatgagcttcccgaaaggcagcgtacaattatgcagttgagggatgttgaaggaaagagttataaagagattgcagatattttgcagattacggaagaacaggtgaaagtaacccttttccgtgcccggcagaaaataaaacaaagatacactgaaatagaggattatggattataaatatattgaacagcttttggaacgttattggaattgcgaaacttcattggaggaagagcaaatattacgttcattctttcgtcagaaggaagtgcctgctcatttactccggtacaagcagttgtttgcttatcaggatgtggagaaggagaaaggtttgggagatgattttgataccagaattctgacccggatagaaagaccggtggtaaaagcacaacgtctgactatgcgtacgcgctttatgcctctgtttaaagcggctgcaatgattgccgtgttgtttcttatgggtacaatgatgcaacacactatggaaggtggtgatagtgatacggtatcggtacacgatgagtatcagaattctactaccgacccccaagtggcatacgaacctgtattgcctacagatacggtggcaaagattaccgttgatgataccggtacagggaaaacaaactagaacattttcatttgcttttatataaatatgatagttagtgcttattaaaacaactttttaattcgaggctgtgaagtttcaattctctcaaattttaaattaactaactaaataattttaaaaaggattaccgcgtgagcagtaatccttttttgtttggtagataatttaatgtaaagagagagttatgaaatgagttatttgctcttaacgcttccaattccggatttttttagtccggtaacctgagggtcaccgtagtagtttacacttcctactccctgggcactgatatttatcgtcccggatgcataacaagaaacacttcccacaccgttttgttcaactacgacatcagaaacaatcatgtcttttgctttcaggctacctactccttccaaataatatgtcgcatgaccggcctgcccctttaaattgatactgcctactccttcttgggatactttgatggaacgtgccattaatgcatttgcttcaatactccccacaccttcagcactgatagaaagatctgttactttcacgctgtctttcagataaatacttcctacacctctttgcttgatactacataagaccggactggtaattgagatattgatttttgaactcttgaagtttttgaatttgtctttatccatactgatactcagcgtactgtctttgaccatgacaatgagttgggggatgtaattatccggaccgtcggcttctactttggtcacattcccttgagtaaagacaatgttggcaggtgctttgttctctatcttattgaaaggagttacgctatattttttggtcattttactcttgctgggtttcggacctgatgatatgtggaaacagcctgtcatcattgtgattgccagaaaaagactgaaaaaataaatagtttttgttctcatggtaatatatatatttaactggtttctgttaattagacggtgaagattcctggaaagttgcaaatctctgcctttttttattggaaagctgtatctttgtatccgtatggcaactaaaagagtacttccggataaagattttgaccgtattatagtgcgtacacacaagctggcgcgtaatgttactatgcgggtaaagcccgacggactgcatgttactgttcctccttatagtttaagcagcaaagtgctggaggtggtggagcaatacaagcaacgtctgttggaggactggaggaaagtgagtaagaaaccgattgatttaaattttcgtattcatactccctgtttccgtttatggctggagcaaggtaactttacttgcttttccgtacgttttaccgaggagggagtcaagattatctgtccgcggaatgtggatttttctttacctgaagtacaaaggctggtacgtaatgccatcatccgtgccatgaagaaaaatgcgcaagaatatctgccacctcttttatccgctttgtccgaacagtatcatttgccatttaaacgtgtgaagattaccggcagcaagggaagatggggaagttgttcgggaacaggcagtatcaatctttcctgttatttgatgttgttgcctccccatttgatggattatgtgctgttacacgaattgtctcataccaaggaaatgaatcacggccctcgtttttgggagttgctggatagtatgacaggagggagagctcgtgccttgcgtgcggagttacgtagatttaatactgatttttagaactattaaatagaattacaatgaaaaacagatttttaagcatgcttattggggctgtcttgttcgttctttcagtagcggccgaaaattatccttatcggagtgatgtgctttgggtaactgtacccgatcatgccgactggttgtacaagacaggcgagaaagcgaagattgaggttcagttctataaatatggtgttccgcaagatggtgtggaggttttatatgagctgggaggcgacatgatgccttcggataccaagggaactgtaaaactgaagaatggaaaagcggttatttctatggggacaatgaaagagccaggtttccgtgattgtcgtctgacggctaaagtaggaggtaaaacttattcccaccatatcaaagtcggtttctctcctgagaagcttcaaccttatacccagttgccttctgattttaatgaattctggaataagactaaggcggaagcggctcagttccctctgacttataccaaagagtatgtaaagaaatattctacggacaaaatggactgttacttgatcaggcttcagctgaataagcagaaccagtgtatttatggttatttgttctatcctaaagcggaaggaaagtatccggtagtactgtgtcctccaggggctggcatcaagacgatcaaagggcctatgcggcataaatattatgcggaagaaggctgtatccgctttgagatagaaatccacggattgaatccggagttggatgaggatactttcggcgagataagccgcgctttcagcagccgggaaaacggctacttggtaaacggcctggatagtcgcgagaattattatatgaaacgggtttatctggcttgtgtccgcagtattgatttgctgacttcattacctgaatgggatggtaaaaatgttattgtgcagggggggagccaagggggagctttggctttgattacggcaggacttgacaagcgtgttacggcatgtgtggcaaaccatcccgctttaagtgatatggcaggttacaaagccggccgtgccgggggatatcctcatctttttaagaatacggtagatatggatacacctgccaagatgaagacccttgcatattatgatgtggtgaattttgccaaacagattactgttcctgtttatatgacatggggattcaatgacaatacttgttctcctactaccagttacattgtctataatgtactgaactgtccaaaagaggcgttgattactccagtcaacgagcactggacttctgaagacacagaatacgggcatttgctttggataaagaaacacttgaaataaatcgatggaaatagatgtttttaagattataattgctatatttgtttagcatagtgtagcaactatctgtattttgatgttgaacccttaaatcgcaaacagatatgaccgacctcaccattctaatcgctgttattgcattggcattgtggccgcttgcatttttagttcttcgcatccgtcacgagcgtaaaaagcgtagagaccgtttggaccgtatgacaaaggaagatctggaggatatcggtacggaagagctggttatagctgtgctcaaaaagataggctgtcagccggaaaccaatgaggaaggacatattgtctttaaatatcaaggtgatgatttttatattgcggtggaggatgaggcccggttcatcatgatatggaatccgtggtgggcgtctatcagtgtggataatccggctttaccttacttaaaagagattgtcaatctggtcaatgtggattcgttggtgaccactgtctttacggcggatgaggatgagaaaaacgtggggcttcattccaagtgccatacggtctttactcccaaagaaggccagttggacgaatatctgaaagctatgctcgatcatttctttgttactcacgatgctatcaagcaaaatttgcagcaactgggtagtgccgcttcggaaagtgttaataaggaacggacaaaggtgaaaggatttgctgcttataaagagaacagtacgccactgtcttctgtcgaagaagagaaaaaataaggaatgttttcattcgttccggcttttatgaaagttgctttgatgtatggttcaaagcaactttatttgtgtttatacttatgctaaatcctttttctcttaagtattttttttcttatctttaagttcttttttcttgaaatcctgaagttcaacaagaaggaagataaggtggagggcatgtttgacaaatgcctgttcgttctgcgtaatctatcttcccttcttgagcgtctgtgtgcgttgcagagccgtgtattcgaccgttttttcgaggctgccgagattgcgaaattcacctctagggagtttggtgaacattgggaaaatttgaagagcttccgtgattggtatagcgtaatgtctactcaattgaagaaaggacgtgaggaggaccctaaagagggactcgaaaaaggtctttaggaaggatttgaaacaggtcgtaaggaagaatgctaaaaatgaaacagggcggtattgcatttgatgtaaattgcctaggttaccggtttatcggctcaggaaataatgtttctttaagttcttttctggagaaattgacttcgtaaagtgattaagttggcttgatgcctgaaacttgttgaccgatttccgttcaaagagtttgttcaaattatttcggtgaatcttttttaaggagagaatctcttttttgtgatagtaatcaattgattaacaattgattgtttccttcttttatatatgcttatttgtatatctcttaccaagagatatacattttctgtgcaaaaataagcaaagttttgagaactaatacatttttggcaaaaaaaataggaatttatataaaaaataagcttccaagtccatttttatactcctttatcctatttgaaataggatataatatgttgatatattgtttgttagttactttctatagatctcttggtaagagatctatagaaaatgtcgtttttaagttcctttattatatgataaagtatgtctttgaagcgatgagaatgaatgaaattaacatagagcagatggaatatctatttctaagacgtaaacgaagtagcgccgtttccgagcggcagaagaacttgcttttcaaggccgcccagcggcattgggaggaggagtttgtcggcaaggaagtgaatattcgtaaagtggactgccgtatatataaagctatattgtaccagcttgagatacgtcagatattccttgacacttcgctttcgctgaaaaaactgagcgatttgcttgaaacaaaccagacctacctgagtaatgtagtaaacaaatactttggctgtaacttgaaggagcttgtgaacggctatcgtgtggaatatgccaaggagcttcttagtttcggtcgttgtgcattgaatgacttgcctcgtagttgcggtttcgcttctaaaagcgctttctattcagctttcagtaaggttgcgggtgtgtcacctttgtcttatcagtcacgggaaaggaggaaacgggagttacaggtaataaacgaactaagatattaataatgagattaatatgtataatcaattttagttttttaaatttataaatttaaagtttttctattatgaacaaaaagtttttaagtgcaatcctgttcggagccttgatggtttcgtcaacgggaacatttgtgtcttgtaaagactatgatgatgacattgacaacatcaataaagagttgtcgactcttaaaggagatctgagtgctttacaggcaaaagtaaatgaaggcaaatggattacaagtttggctccaactactggtggttttaccgtaactttttcggataacacttcttataccattacgaatggtaaagatggtgctgctggtgctgatgctgtgaaatgggagattggtactgacggtttttggtataagaatgatgtaaagaccgagtatcaggctgttggtcaagctggcgaagctggtgtatctccttatatcggtgaaaacggtaactggtttgcttataacaccgagacaaaagaagtggaagatacaggtatctctgctgctggaaccagtacctacgtggtgaagaatggtgataactatgaattgcatgtgtataaccagactaccggggaatatgagtcaatcgttcttcctgctactgctgcagcagctgctttgaacgtggtgtttatgccgacatatagtgatatgcagactaaagtggttgctatcaatatctctgttggtgacgagtttaacgataagaaccgtttgtgggataataatgtttcattgactaacgatattgttttcaactatcgtgtttctcctgcaagcattgatttggcaaaagcaaatattggcttcttggtaaatgaagtacagtcaagaactgcaggttctatcttggaagttgctgataaatcgtttgctgatggtgttttggctgtaaaagctaaagctggtgaagcattctctttgaagaataagaaatatgccgtggctttacaggttcagaatgatgcacagagcgcaatttctacttatcatttgcttacatctaatacaattaatcgcgaagacttgacagtattcgaagctcgtaaggatgataatggagagattgggtatttccagttcctttctcttgatataaacctcttatatacaggtgaattgaatgttgctgatactttaactgtaggacgaactgttagggataattctatgaatacttcgtcatatagtgacttgagaaaatacggttttactccttactacgaagtagttaagaaagctggtgaagacaaaggcaattatttcactgtagaaaatggcgttattaaaactaacggacaaatttcttctgtaggtcataattgtactttcattgtatctgtatatgataagaaagacggatataaattggctgaaaaagaattgactgtatcgtcagttgagaagattgctactactaagacttatactaaatctgaaactcatgaattaactcttgaatcaaaagattatagattcaagtttgatatgaatgatgtatataatacattgggcatgtcttctcaaactttctggaatgcaggatattcttctgaatattatatttgggatgcagatagaagtgaatatgtacaatcaagcagtagtaatggtgttatttctgctggttcagtatatgaaaacaatgaaaagatcttgtatgtagatgttaagaatatcttgactaaggatcagcttggtaagtacaaagtagtatttaagattggtaatacaggtgcagaagttgtttatgaggttaaggtagtatatcctgaagtgactttgattaaagacaatgattactggaaagatggttatatgattaatgccggtaaacttgtaggttctaattatgttatgtctggtgacttgcgtcgcggatataagaataaagaccttgatttggtatttgaaacagtagctggtgaaactcgtacagactttactttgattaacaatgttctgacatatacaggagattgcaatgatgaagaaggtaaccgtatcaatatctctactatcgatccggttgatgtaatggtatttgttctgattaatggtcagaagattgacaatggtactaagatccaggttaagtttgctgacccgttgaagaatatcactttgaagaaagatgccaaatttgaaactacagacaagaagagtccagccgataaattgcagttgaattctgcaatcaacttggtaagcattgctggtgaaaaagtaattgaaaacggtacgatgaatgctactattgccggttactataatgctcaagcagctaagttcgaagtatcggaagaggatgctgctaagggagctagtgtaaatgctacaacgggtgaatttacatggcagaatgatggtgtagctttgacagccaacaagactatcaatgtgaaagttacggttacatacacttggggtgttgcggttggtacaattcctgtaactgtaaaatctaacctctaatctgaatttagatgattaaaaaataatcatactataaagtaaaagtccgcttctccttcgtgagaagcagcttctacccaaagtagaaattataaattctttcaagcggggaaagcatacgtatccggcaacgggcgtttctttccccgcttttttttaaggaaatgactctgaagaatagtttgtttcttttccggttagagtctgttcattgaataaattgtatataccatgaataaagtagaagagataaagaaaaaaatcagagatttgaagttaaagcagaagatgacaactgggcgtttggaatggaacgatatacagagagaaatagacattttgaataatgagttaaagcaactagaaacagacaaaccacaatatggaaaatagattatacttgtacaacttaggtataaagacatttggcggctttgcaacactgggtggagttatacaggctttgcaactatttacgcagcctgatcttgatattaaatcaattttgctttcgtttcctgcgtgggtagtatatgtatttgtatgcctgactattatttttgctatgttgagggaacggtacaaatcgatgagtcaaagggtggaagtattgaatgttaaattgaacgagcaagatgcaatgattcgttcattgcaggaaatgatgaaaattgtgccattcaaaggacgctttttcttgaccacagaatatttatacaatgaattgggggaatatatacagaataacattgatattgattcaatagagataaagaatacaatagaaaaaagaggtatgggaaacaagagagattcctttgtccgattaaatataagaggtgttgtttcgcataaaatcagtacatttcatttgctggtggcaggtgataccattgttaactttgaagatataaacatacaagcgttcgagcgtgttggtgggaagcagaaaaaattatgtgcaagaattgctgataacggacaggattctttgttgaagcaggttgttgtttcttatggcaaagtaaaaagtcccggtagtattgttgatttgatgattgaatggtgctggcctaatatgttgaatgttacagattgtgactatactacattgcctaattttttggctggtacggtgaaacatctgaaaatgtctttggaatgtaaagaagatataggttttaaatcggcaagtatatataaatataaagtcggtatggataaggcccagttgattttggacgttgatatgtccgaaatcacagatacgatatcttatgaagaagataatccgttaatgaattctacttatatattgtattacgaagttgccagatgattggaaatctgaaaaaatatatagataaggcatcttttatggaacatatagatgccaagctgcggcagaatgaacctatgattatagattcattcgtcagtaataaatgtaatctgaaatgtagacattgttattttggagatgcccggcccatatcagagtcggtttctttggcaagatggagaagttttcttgatgaagctattggaatgggtatgaaacattttcatttttcgggtaaagaatcttttttggataatagaatctttgatatcctgaatcttttagcagagtataaagaagataggaaaatattttatggagttgtttcaaatggaatgagtatggatattcaggggtatgacgaagttcttgcaaccaacatttcataccttgaaattagtcttgagggctctggaaaatacaatgatttgataaggggtgagaacggatacaatacggtttatgagttgattgaaaatgtggagcatcgagataaaataaacattacttctactatttttgatgataatggagctgatttattatccatgttgcttgcatattggaaattaggagttgataaatttaattttgctcctatcatgtattattcaccatttgaaatgaaaccattgaaaagtttgtcgtgtgaatccttgcttggttttgtttcgctctgtcttgattttatgaataatgataacagttcggatgctattgatataaggatttgtatgacgaaagcaatggcgtatgaactgtttttgaaagaaaatatattaaccggaaaaatagaggaatatatatacagaggcaataaaatgaaatatcagagggggaataaggtgttggagtttagttatcctttactcagcattccattccttaatgaattggtcgttactcatgatggttacattatatcctgtgcagatgatattcattataagtatcttgataagatcgctttaccgaacgtgaatatagtaaaaaacagttttgcagaaatattgcaagcgagaaacgaatttattttgtgttatttagacaaagaattatctcaatatactaaatgtttataattatgaaaacacaagaatttgtagatgttcgggtgggtgaaagcactcagccggatcacggttatgaattgagtgataagtgtataataacgaaaagttcaaatgctgtcgctagcggagcaggaagcaaaggcttgttttcgtataaaagtactaagctgaaaagtgctgaatgtaaaatcaatcagagtttacgggatgttgataatggagcaggaagcaaaggtttgtttagtgtgaatgttgattagtaagcatggctttgtagagaagtttgtttgtctttttaacttctgaacatgaagctaaaatgtttgacctcttttgcatgtggcaacaataaattgacataaagcaagtaatcattccttttcttataaaagtgtgctaaaaacacttatatctgaaaacataacaattatttttgtacgttttttaattaatggattgtttttattcaggtatgaagaagagtttgacggctttggcgttcggcacattaggattgggcattgccgagtttgtaatgatgggcattttgcccgatgtagcgaaggacttgcatataagtattccgcaagcaggacattttatttcggcttatgcactaggtgtgtgcgtaggagcaccggggatggttttggtggctcgtacccgtccgctgaaacatattctgttaggcttgatggttatttatatttgtggtaatttgtgtgctgccgtttcagtgaattattggatgatgttgatgatgcgttttatttccggattgcctcatggcgccttctttggggttggttccattgtggcggaaagagtggctgataaaggaaaaagttcgcaggcagtggcattgatggtgtcgggtatgacgattgccaatctttttggtgtacctttgggtacgttcatgagtaatataatgtcctggcgtattccttttctctttaatggagtatggggactgattaccttgttctatatttggaaatgggttccttcactgcctgctttgccggatacaggtttgaaaggacagttccgttttttgaagaatctagctccatggttgttgatatttacgactatgtttgggaatggaggtatcttttgttggtatagttatgttactcctttgatgacacatgtggcaggtttcagtgagaacagtatgactttcattatggtgctggcaggtcttagcatgactgtaggaaacttgatgggtggaaagttttctgatcagtatggagcagcccgtgtggtgaaatatacacagattattatggcctccggtttgcttgccattttctttgcagcttctatctcttggctggcagtgatattgatgtgtgtatgtacggcaggattatttgctgtttcggctccacaacaattattgttactccaaaattcacgcggaggagaaatgatgggagcggcctgtgtgcaagtcgcttttaatttgggcaatgccattggtgcctatgccggtgggctacccatagatgccggattgggttatcggtatccggctttggtaggagtttttatcgtattgaccggctttgtcgctgtttccctttattccaaaagggaatcggcttctctttccaagatataaatcacatctccactctttttaacctctacccggctaccttccggattcaggttgaaaggtgtggtcttgtctgttttgttatctacgaccatcagtacattatcttcggcaaagcgctttatttccactttcaggttggcgtcgggcatggtttggtccagcagcagactgtcatttagatataccgctatactatctccggcaaaactattagttagttctatgttgtagactccttcataagtctgtactttgtcagccttgcgttggaaacggaaggacatatacaaaaaaatgataataacggcaaagactccaaaagccagcataccgttacctatcatgaattgcttgttcgtatttaaactgtttttatccatagtgttataagtttctgcaaaactacaattttttaatagaatattttgtagcactggtagataatttgtatctttgcaccgaaatggatgaatggtggggcttgattaagccctttttttgttcttaatagtgaataaatgatagataaaaatgtagtaacccggattgttgacgagtggctggaaggtaaagattactttttggtagatgtcacggtgagcccggatgacaaaattgtggtagaaattgaccatgccgagggagtatggattgacgattgtgtagaacttagccgctatattgagtctaaactggaccgtgaagaagaggattatgaactggaagtgggttcggccggtataggacaacctttcaaggtattgcaacagtacttgatacacattggtaaggaggtggaaatcctgactaaagagggaaagaagctggaaggtgtattgaaggatgcaaatgaagagaactttaccgtaaccattgaaaagaaagtgaaaccggaaggagccaaacgccccaaactggtagaggaggatattacttttgcgtatgatgagataaaatacactaaatacttaattagttttaaataattatggccaaaaaagaagaaacaatcagcttgattgatacattttcggaatttaaggaattaaagaatattgatagaacaactatggtgagtgtactcgaagagtctttccgtagtgtgatcgcgaaaatgtttggcactgatgaaaattacgacgttattgtgaatcctgacaagggagatttcgaaatatggcgtaaccgtgaagttgtagcagatgaggatttgacgaatcccaatatgcagatctcattgaccgaggcacagaaaattgatgcgtcttatgaggtgggtgaggaagtgaccgatgaagtaatctttgccaagtttggccgccgtgccattctgaacttgcgtcagacgctggcatcgaagattttagaactggagaaagatagcttgtataataaatatattgatagggtgggtactgtaatcagtgcggaagtctatcagatatggaagaaagaaatgttgttgctggatgatgaaggcaacgaactgcttttgcccaagactgaacagattccgagtgacttctaccgtaaaggcgaaactgcccgtgccgtagtggcccgtgtagataataaaaataataatccgaagattattctgagccgtacttcacctgtgttcttgcaacgcctgtttgaaatggaagtacccgaaatcaatgacgggttgatcactatcaagaagattgcgcgcattcccggagaacgtgctaagatagcagttgagtcgtatgacgaccgtatagacccggtaggtgcctgcgtaggtgtaaaaggatcacgtatccacggtattgtgcgtgagttgcgtaatgaaaatatcgacgtgatcaactatacttctaacattcagttgttcattcagcgtgcgttgagtccggctaagatttcttctattgtgttgcacgaagaggagaaaaaagcagaagtatatctgaaaccggaagaagtgtctttggcaatcggtaaggggggaatgaatatcaaactcgccagtatgcttaccgaatatacgattgatgtgtaccgcgaattggatgagagcgcgatggatgaggatatctaccttgatgaattcaaggatgaaattgatgagtgggttatcacagccatcaagaatattggattggatacagctaaggctgtactgaatgctccgcgcgagatgttgatagaaaaagcggacctggaagaaaacacggttgatgacgtgttgagagttttaagagctgaatttgaagagtaactcttcagtcccggctcgtagttaataattaaaaaacgagtatgacgattagactgaacaaagtaacaagagatttaaatgtaggaataacgacggtagttgaattcttgcagaagaagggctataccattgaggctagtcctaatgcgaaaattaccgaagaacaatatgctgtacttgtgaaagagttcagcacagataaaaatttaaaaatagagtctgaaaaatttagtcaggaaagacagaataaggatcgcaacaaagcttctatctctatcgaaggttttgaatctaagaaagagaaagaagaggtggtgaaaactgttattcctgaagaggcacgccccaaactgaagcaagtgggtaaaatagatctggacaatttgaacaagaaaactgcgtcaaaggttgtagaaccagctgcgaaagttattgaacaaactccgaaagcagaacccgtggtggaaaaggtggttgagaggaaggaaactccccagccccagaaggaaacgccgaagcctgtggtggtagaggaaaagaaaccggaatcgactcctcaacctgctcctgctccagttttggaagagaagaaagagcctaaaattgaaaagacggaagaaaagacaccccaggtgaaagagatggaaaaagaaacacccgaagcagcacccgttcaggaaaaagaagaagacgatgtatttaaaattcgtcctactgaatttaaatcgaaaattaatgtagtaggtcagattgatctggctgcattgaatcagtctacccgtccgaaaaagaaatcgaaggaagaaaaacggaaagagagagaagagaaagataagcagcgtcaggaacagcgtaaactgatgaaggatgctattatcaaagagatccgtaagggagacgataagatttctaaaaacttggttaacgatgatgccgcaaagaagaaaaagcgcaatagaataaataaggaacgtgtggatataaatgctgccggtacaacgaatgttggaggagcatctaataataaccaacgtaacgataacgctaacagaccgaataggaacaataactccaaacctaatagtaataacaatcagggtggaggcaaatttaataaagaccgtttcaagaaacctgttgtaaaagcggaagttagtgatgaagatgtggcaaagcaggttaaggaaacattggcacgtctgactaacaagactaagaacaaggctgccaagtatcgtaaggagaaacgtgaaaatgttcagaaccgcctgatggaacaggaggagatggaacaggaagatagcaaaatattgaaactgaccgagttcgttactgcgaacgaattggcaagtatgatggatatccctgttactcaggttattgctacttgtatgagtatcggtatcatggtttctatcaatcagcgtctggatgccgagacaattaacttggtagcagaagaattcggatacaagacagaatatgtaagtgctgaggtagcacaggctattacagaagaggaagataacgaagaagatttgcagccgcgtgctccgattgtgacagtaatgggacatgttgaccatggtaagacttcattactggactatattcgtaaagcaaatgtaattgccggtgaggcagggggtatcacccagcatatcggtgcttacaatgtgaaattggaagacggacgtcatattacattcttggatactccgggtcacgaggcatttaccgctatgcgtgcccgtggtgcgaaagtgacggatattgctattattattgtagctgccgatgataatgtgatgccgcagaccaaagaggcgattaatcatgctatggctgccggtgtgcctatcgtatttgctattaataaggtggataagccgcacgccaatccggataagattaaggaagaactggctgccatgaacttcctggtggaagagtggggtggtaagtatcagtcgcaagatatttcggcaaagaaaggtacaggtgtacatgatttgttggaaaaagtattgctggaagctgaaatgttggatttgaaggctaatcccgaccgcaaggcaaccggttctatcattgaatcgtcgttggacaagggacgcggttatgtggctactatgttggtggcaaacggtacgctgaaaatgggcgatatagtcttggctggtactagttatggtaaggtgaaagctatgtttaatgaacgtaaccagcgcatcaaggaggccggtccttccgaaccggtattgattctggggctgaacggtgctcctgcggcaggtgatactttccatgtgattgatacggaacaagaggctcgtgacattgccaacaaacgtgaacagttgcagcgtgagcagggcttgcgtactcagaaactgctgacattggatgaagtgggccgtcgtttggctttgggtgatttccatgagctgaatgtgattgttaaaggtgacgtggacggttctgtcgaagcgttgagcgattcattgataaaactgtctacagaacaggtacaggttaatgtgatccacaaaggtgtcggtcagatttccgagtcggatgtgactttggctgctgcatcagatgcgattattgtaggtttccaggttcgtccttcaagttctgccggcaaactggctgagcaggagggtgtggatatccgcaaatattctgttatctatgatgcgattgaagaagtgaaggctgctatggaaggtatgctggcacctactttgaaggaacagattactgcaaccatcgaagtgcgtgaagtcttcaatattaccaaggtcggtttggttgccggtgctatggtgaagacaggtaaggtgaaacgttctgataaggcacgcttgattcgtgatggtattgtagtctttaccggtgctatcaatgctttgaagcgtttcaaggatgatgtgaaagaagtaggtactaactttgaatgtggtatcagtctgacaaactgtaacgatatcaaggtcggtgatattattgaagcttacgaagaagtagaggttaaacagactttgtaatatactgaagtctgagaatatagatggtaatgtcatcctgagcatagcgaaggatctggcacctcgcccagcgcgtgggctggcagattcttcgctttgttcagaatggcattactgctttttgtaataacgataaagatggcgacaatagatattattatattggctatgattggtgtgggtgtcattatgggattaatgaagggatttgtgaagcagatggcgtctattgtagggttgatagccggattgctgatggctcgtgccttgtttggcattgttgctgaaaggttggcaccggttttaggtacttcgacgactgtagcacaggttttagcttttatattgatctgggtagctgtacctttaggttttgcgttcgtcgcctctttgttgacaaaagcattggatgctgtgcacctgggatggctgaaccgttggttaggcagcggattgggagcattgaagtatatgatactgatagggttagttattcatgtgatagaatatatagacccgaataatgagctgattagtgcaacaaaaaagaaggaatcagtgttatattatcctatgagggacttgtccggtatcttttttccggtatttaagaatgtaacagaacaattaatagaaatataagatagatatgcaagaagaacccaataaatatgtgaaagaactgacgcaggagaagtacaaatatggcttcaccacagaagttcacacagatattatagaaaggggattggatgaggatgttatccgcttgatttctgcaaagaaaaacgagccggagtggttactggagtttcgcctgaaagcataccgctactggctgacaatggagatgcctgcatgggcacacctcactatccctgaaatagattatcaggctatatcctattatgcggatcctacaaagaaaaaagaaggaccgaaaagtatggatgaggtagatcctgagttgattaaaactttcaataaattaggtattcccttggaggaacaaatggcgttgagtggtatggcagtagatgctgtcatggactctgtatccgtcaagactacatttaaagaaaccttgttggaaaaagggattattttttgttcgttcagtgaagcggtgcgtgaacatcccgatttggtgaagaaatatctgggttcggtggttggaccgcgggataatttttttgcagccttgaactcggcagtgttcagtgacggatcgtttgtatatattccgaaaggagtgcgttgtcctatggaactctccacctatttccgtatcaatgcggctaataccggtcagtttgaacgtacactgattgttgcggatgatgatagttatgtttcttatctggaaggatgtacggcccctatgcgggatgagaaccaattacatgcggccatagtggagattgtggtgcatgaccgtgcggaagtgaaatattctaccgtacagaactggtatccgggagatgccgaaggcaaaggaggagtatataactttgtgacaaaacgtggccattgcaaaggagtggatagcaaattgagctggacacaggtggaaaccggatcggccattacttggaaatatcccagttgcatcttgagtggagataattctactgctgaattctattcggtggcagtaacgaataactatcagcaggctgatacggggactaaaatgattcatttaggtagaaatacccgtagtaccattgttagtaaaggaatcagtgccggaaagagccagaactcttatcgtggtctggtacgtgtggctcagaaagcagacaatgcccgtaattacagccagtgtgactctttgttgctggggagccagtgcggtgctcatacattcccatatatggatattcataatgagactgctgtggtggaacatgaggcgacaaccagcaagatcagcgaagaccagttgttttattgcaatcagcgcggtattcctacggaagacgctattgggttgattgtcaatggatatgcaaaagaagtactgaataaacttccaatggagtttgcggtagaggcacagaagctgctggctatttctttagagggaagtgtaggataaatgaagaactaagaatttaatagaattatgttagagataaaagacttacatgccagtgtcaatggcaaagaaatattgaaaggtattaatctaagcataaagaaaggtgaagttcatgctattatgggacccaacggttccggaaagagtaccctttcgtctgtgttggtaggcaatccggcttttgaggtaacgaaaggttcggtgacctttgaaggaaaagatttgttggctttgaatcctgaggatcgcagccatgagggtctgtttttgtctttccaatatccggtggagattcccggagtcagtatggtgaactttatgcgtgcggcggtaaacgagcagcgtaaatataaaggccttcctgcattaacagccagtgagttcttgaagctgatgcgcgagaaacgggctgtggtagaattggataataaattggcaaaccgttcggtaaacgagggattcagcggtggtgagaagaagcgcaatgagatcttccagatggctatgctggagcctaagttgagtattttggatgaaacggattccggtcttgatattgatgcgttgcgtattgtagccgagggtgtgaacaaactgaagactcccgaaacaagttgtatcgtcattacacactatcaacggttgctggattatatcaaaccggatattgtacatgtattgtataaaggacgtattgtaaaaactgcgggtcccgaattggctttggaactggaagagcgtggttacgactggataaaagccgagttgggagaataatattggatgcctaaagaagaaagtgattatgagagcagaacaacaatatattgatctcttttctcaatgtgaggcgatgatttgccagcatagtgccgaggtgctgaacgctccccgtgcgcaagctttcgcagatttcgaaaaattaggtttccctacccgcaagcaggaaaagtataaatacacggatgtgagcaaattgttcgagccggattatggtttgaatttgaacagactcgacattccggtgaatccgtatgaagtgttcaagtgcgatgtacctaatatgagtaccgctctttattttgtagtaaatgatgctttttatcgtaaagttttgccgaaggcgcaattgccggaaggagtgttgcttggcagcttgaaagagctgtctgaacaatatccggctttggtcaagcagtattatggcaagttggcagatacttccaaggatggtgtgaccgccttcaatactacttttgcccaggatggctttatgctgtatgtgccgaaaggcgtggtggtggacaaacccattcaactggtgaatatattgcgtgctgatgttaattttatggtgaaccgccgtgtgctggttgtgctggaagaaggtgcgcaggctcgtctgttgatttgtgatcatgccatggataatgtaaatttcctttctactcaggttattgaggtctttgcaaaagaaaatgctattttcgatctttatgaactggaagaaacccataccagcacagtgcgtttcagtaacctctatgtgaaccaggaggcagacagtaatgtgcttttgaatggtatgactttgcataacggtactacgcgtaatacaactgaagtaactttggccggacgtggagctgagatcaatttgtgtggtatggtcattgccgataagaatgaacaggtggacaatcatactttcattgaccacaaggttgctgattgcactagtaatgagctgtttaaatatgtattggatgatcaggcgacaggtgcgtttgccggaaaagtattggtacgtgaaggagcacaacatactaattcccaacaaaccaaccgcaacctctgtgctactcgtgatgcccatatgtacactcagccgcaactggaaatttatgcggatgacgtaaagtgctctcacggagctactgtcggtcagctagatgaaaatgcgttgttctatatgcaacagcgtggtatcagtctgaaggaagcacgtttattgcttatgtttgcttttgtcaatgaagtaatagatacgattcgcctggatgcattgaaagaccgtttgcatttgttggtggaaaaacgcttccgtggtgagttgaataaatgtcagggatgtgcgatatgtaaataggacgttatgtacgatatacaaaaagtaagagaagattttccgatattagatcgggaggtgtatggaaagccgcttatttatctggataatggggctaccactcagaaaccgcgccaagtggttgaagccataaccgatgaatattattcggtcaatgccaatgtgcatcgtggtgtgcatttcttgtctcagcaggctaccgagttgcatgaagcttctcgtgagactgtacgtcgttttatcaatgcacgcagtagcaatgaaatcgtgtttacacggggcacgacggagagcatcaacctgttggcttcttcttttgccgacagtcagatgaaggaaggagatgaagtgattgtttctgtcatggagcatcacagcaatattgtaccttggcagttacaggctgcgcgtaaaggaatcgtgctgaaagtgattcccatgaatgacaggggagaactgttgttggatgaatatgagaaactcttttcggaacggaccaaactggtgagtttcgctcatgtaagtaatgtgttgggcactgtcaatccagcgaaagagatgattgcgactgcccatgcacacagtgttcccgttttgattgatggagcgcagagtgttcctcacatgaaagtggatgttcaggatttggatgctgacttttttgctttcagcggacataagatatatggacctaccggggtgggagtgctttatggaaaggaagagtggctggataaacttccaccttaccaagggggaggcgagatgatacaaagtgtcagcttcgagaaaacgacttttaatgaattaccgtttaagtttgaagcgggaactcccgattatatcggcactactgccttggcaaaagcgttggattatgtatctgctctcggcgtggaaaatgttgccacccatgagcatgaactgacacaatatgctatgcagcgtctgaaagaaatagacgggatgcgtatcttcggagaggccggtaacaagagcagtgtcatttctttcttggtaggaaatattcatcatttggatatgggtacgttgcttgaccgcttgggcattgctgtgcgtaccgggcatcattgcgcacagcctttgatgcttcgtatggggattgagggaactgtacgtgcttcttttggtttgtataatactaaagaagagatagatgtgctggctgccggtattgagcgtgtcagcaggatgttttgatttctccaaacgaaataagtcgcctgtcattgataaacattatattaatggcaggcttttttgtataacaagaatcagcgtgacttcacacaagattaggagaaacttctcacaagatttgcctcatcttgtaacaagatatcaggcatcctggtttcttgcgtcttttatgttcttttttgtgggcatattcctcttccggtggaaaatatgctcctcccgaagaattgccccaaaaatccttcagaagtttcagccttttcgtaaactccctgttcatgggctttccggctgaaggattttttccaggctgaaagatttcgaggtatcaattcttcagccagaatgccgatgaacaaagcgtttgcggagaggctgaaacctctgaaggaaaaaataagtgttttgctatgtgtatataaagaaacaggagaaacaacaggacgtattaataaaagctcttgatgtttttttaatatgtcctgttgtttttaaaaaaggggcagatgttttgaagtttcctgttgtgaagtgtgaacatatactgatgtataggctgaaagatatatcatgtttcagccggaagatatataatcttacacctgtaacattctactcattcattggagaatttttatcacttctgaaaagagtgtattgggggtaacaggtaatacgatataaaagcagggggctacattcatcacgagtgcggcccccttttggtattatttatattaaggtaaaaagagagagtttatttgccataatcatcatataacatcagcaaatgtgatgaactccaactgaaatggggagcttttaacaattcaccggtgtgtgtgccatagttttcatgtatcggtgctccttctttcaagccttgcagacggtcgaatacctggagggtatattcatccgccatcttgttatatccatagttgcgcagaccgcggatagcgaaataagtctgatccaaccagatagggccacgccaatagccacgtgggttatacttcgggttgtctgctgctactgtggggaagggaatgtaggtagagaacttggctgtatcggtcagcaggggcaacatggcttttacctgatcggcagtagctacttctgtccataacggagtatatgcttcgcatcccggttcctgtataaagcttccgtcctttaaacggcgatcgaagaagaaacctttttctttgtcgaagaaataatcggctacttggctactgtaatccggaccgtcaaaagtaactcccagaatacttgcaaatttctttaatagtttacattccaaagccagataagcatttaaatcaacactttcctgatccatgctccatgcatcctcagccccgttatttttcagcatcttggcatcatcaaaacggatggcattatccataccgctttcccaagctgctgcttccaatgtgccatcggtagaaccgtattcacacataccgttgcggttatggtcacgcttgttataccaccatttgtaataggccatcaattgtggatacatttcactgatgaacgccgtatcattggcatgggtgaatatttcgtctaccgcccatgatacgagaggaggtttgctgtcgcgtgcattattttcggcaggatcggtatagatacagtctataatcataccgtcaggctgctggtagtcaaacatggcacgaatgttgtccttggccaattccggatcgaattttgccagagcagcagagaaacgccaagtgtcccaggcccagaatcctacgaagtagtatgcggcatggctcggaacaattccttcgtggagcaatccgccgcggtgggtacgccagttgctgataagtgtaacaactgctttcacggcgatacggtcatactcaggtttcatatctttgcgcagaatcttggtgagataaccttcccagcgttctttgttggctttgagcccttcctgcggattgcttagagccaattgtgctttttgtaatccggcagaaagttctttttctccggtatagaaagaaatggctacgtaggtgtcgtgttcgctgccattgatttttgcttggtaattattgtcagtgccctttacgctaacatccggggtaaaagttaatgctacaatctcaccggagggatgacgggcgatgacggtattttggtctgtttggacttgtatctcttttccccattggctggcagttaaggagagttccttccctgcatcggagtgaatgcggagcaatgcggtagaagcatctaaaaaattcaggcgttgaatgattttaccttcctctgaacttgccgaaagatataactctcccgggaaataacaagtggaatccggagtaaatataacattcgcctgatcggcatatcctaccgtgacagccgattgtgccatccattggcgtcggttcatatccagactgaacgggccacagaaaccgttcacccagtgatctttctgcggaagggtaaatcccatccaggaaccggcgtctgtgaaccaaccccggcaacgtgtcagtgtatcgggagtataggctatatccagtatgttattgaattcatatcttttgcctgtggggatgttctcactggcagggttacaggcggctgtgaagcctgcaactactgctgtgagaagaatgattttggtaaatttatgtttcatgttatttcgttatttgaagatcgtttcatcacagattattcagattaatacagatgcaatcattcacgaattgaaattcaatctgcgagaatctgtataatctgtagtgaatcagaatttttaaaaccatttcttatgcgctttttcagcagcatcgtcttgattgctcaaaggttgcatggtaaagctgtattgccattcgtgcggagtgatggtatattccggatgtacttgcgctccccaagtattatctccacctacccccatgtgacggtggtcgatgtttaaccataccatgtctttcttcataatacttccaccatgacggcgttctgtattgaatgctacatagtcaatatcctccaacgggaaattccatgcgctgacattcagcggttcctcacctgtgattaacaggccttcccctgctttattacgcaatgcaacccatcgtacatcggttttgttgccggtttcctgtgcacggacatacggatggaattgttcccatactgtagcggtatagagtccgataggataacccgtcttgcggtctgcatagttttcttgtggtccgcggcccagccaggtcatcacatcatattctgccggaagaatcatacgcatacccagacgtggcatttcaggaagggctttgttgccgggtacaaagtgcatacttactttgacagctccattggggcgtacctgatagatggtctgcaaagttgattcttgtgcttccagtttataatttacagtaacggttgccagtttcttgtttgaatcttcttttaaatcgatactttgtaacttggcgttcttgcctgcaaatttccagatgccgcaacgctccagatggttgttggcaacatcattgtcggttaatgcacgccagaaattgggttgtaatccttcttttatcagattctttccgttgtataagagttctgtcatttcaccatcagcagtagagaatgcgatacggaagttctcccctgtcaaggtgatagcatccggagtacgttcggtatttatagttttgtctactagttcccgggcagtccatgtagcattcagcagccgttctccttccggattcagttgccattgctccatggctacctgatgtccctttggaactaatggggcttcctttttggtaaatgcttccaatttcaggaaatattcttttccatcgttaggaatcaagttcatcgggatagtgatgaaggcagaagaacgggcagtcattgtcgggaaatccatttcaccgctttgtacagcttttccgtctgtttctacagtccagtgtagtttgtaatcttccaaactgataaaatcatgccagttagtcactttgatttgcttggtggtaaaggcaaccggctcaaaatgaatgtattgatatactttttttacttcccagatgtgtggatgaagtgaacggtctgcagctaccagtccgttggcacagaagttggagtcattagggacacctacaaagcccatgtcgcctccgtaagcccaaatcttattgccgttcttgtctttgatatcaaaggtggcgtcaacccagtcccatatgaagccaccttgcagctggtcatatttataaatcaaatcccaatagtcttgtagattacctacactgttacccatagcgtgggcatattcacatagaatcatcgggcgggcatcacgctggtttacatggcggcgcagggaccagatgcgtgcatacatcggacagtagatgtcagatttggcatcataaccacctccctcatattgtacagggcgagtaggatcgaatttcttggtccagtcatataacgtttcaaagtgttttccgtagccggactcatttcccattgaccaagtgacaatggcggtgatattgcggtcccgcagcaccatgcggctcatgcgttgcataaacggtacttcccaatcgggattattagccagtgtgccatctttatgcgcctgcataccatggctttcaatgtttgcttcatctaccagatacaaaccgtattcgttacacaatgcataccattcatagcggttggggtaatggcaagtgcgtacagcattcaggttgaattgcttcatcaactgaatgtcttttatcatgctctctacggtaatggtacgaccatgatgcggatcgtgttcatggcggtttactcctttaaacaatacggctaccccatttatcagttgcatgccgttacgcatttccacagaacggaaaccgaaaggctgtgtgaatgattccaatgcttttccttgagcatcgtaggtactgactaccaatgtatagagattgggtgtttcggcattccaaggcaatatggccgggaacaagtgtttctgagtgaataaagtatctgtaacagaagttatttcctttttatgctgataaattacattgcctttgtccataatcttcacttccacaattcctcccggatgaggcttgtggagtgtgatatccagattaaaatctccgtctttataaccatttgtcagaccggctaccagtttgaagtcttgtacacggctttgaggacgggcatagagatacacatcgcgttcaataccgctatatttccagtaatcctgatcctccaggtaggaaccatcactataacggaaaactttaacggccagtttgttcttcccggtttttaagaacggagtaatattaaaatgagccggaagacggctgtcttcactgtatcctgccaattcaccgttaacccagcaataaaaagcggactcaactccttcaaaatcaaggaaaatatccattcctttccaatgggccggtacggtaaattcacgtacatatgcacctaccggattgtaatcggttggaacatgaggcggattggcagggaaggggtaggctacgtcagtatagatgggggagtcaaatccttgcagttcccagcttcccggaacctgtatgtctttccagcgtttggtgttgtaccccattttataaaaatctgtcgggcattcctcattgtttttagagaataagaacttccaggttccgtctagtgaaatgcggcgttctgtggcggggtttactgcaaaacgttgggcggcaggtaaagcttgttgtttcagtgcattggcctcattcgtataaggaatgaaatgggcatgggcaggttcacgatttatttcatttatttgcggattttgccagggcacgttttcaccccaggcagaagcacaaacaaacaacagtgtaagaaaagtattaagagagtgtttcatggttattgttattttaaatagaacagaaaagagtcacaagaaaaggtacgctgaagtccactacaaagccgtgaaatatagaaaccactacgaagctttgaccggaatagcgggtgatgatgggtaatgttgtatccatcgtagtggctcctccagccgaaataggggccaggttaccaaaccaacgtactagcaacggggcaaaaagcaaagtgataatctcacgtgtgatattggataataatgcaatggttcccaactccggacctttatattctgtaataaagatactggatagagagtaatagccgaaaccggcacctactgccatacaatctgttactgagcgatgcgagagaaacagactgaccactgcgcatcctgccagtgttcccaatatggtcatgaccggtagaaagatcaggcgaggatttaatgaccggaaattacgtaaggtctgtggatcattacctacactgactcctacactgaacattaacgcacacaatgcgtagaaacttagcttactttgtgtaaagtcgtatggaataaggtgatataccccacaaagagctcctagtacaaagaatccgacgataatcaaacttcctttcatacttgtccctccttatttcttttgtaaagtacataccataaagcccatgctgccgtaacactgcccagcactgctgccaaggtgatgacaatggcttccaaccctatagtgtgcagaccattgataattttctgattaccgcctacatctatacccaataaaaagagtagcaaccaaataagaacggtgatgactttgtgtattcctgaaagcttctgcttgcgaagcaggaagccgaggagcatccccgtgagcattaatccaataattgtaaacatatctatgtcgttttatttataggcaaagatacttcatttttagattacaaggcggtatcactgtagcgaaaaccgccctgttgcctaattatatctaaccaaaaaagaaaatacttattttaaggcatcattagcattcagctctgtaagaggagtggggtagaatgaatttttgtcttcattgaagcctgttcttccggcagcttgcaaggctgaggatagtttgccccaacggcggagatcataccaacgatagttctcaagagggaattcaatcatgcgttcatgttcaatttgcgcgcggactgcttcttgagaagtacctgccatgggtggcatatccccgtgaacgcttcttacttcattgattaaaggaatagcctgttcgggatgtccctgctcattcaatgcttcggccttcattaacagtacgttggcataacgcatcaaaggaacattgatagcggaatagttttggtttaaaccttcataggtcgagggcatgaatttacggaaggctacgcgttctttgttgtcgaaccagtcattatagtcgtagccatagacacgtccgttaccatcgttataatagtcacaattaaaaaataatgttgcatacatacgcgagtcataacgtcctgtagtagccgtttccccttcttttttgaattcactaatcaatgtttgactgggaagaatctcatcccatcccccaagttcggaaacaccgatccatcgatggaactgagtacgataagtagctccgtttgcagaactcatagagaattgaatttcaaaaatcgattctttactgttcttattatccccgctgaacatagtgctgaaattattaaccagttcatatccttttacttggttgaatgcttctatagcactggccagataagagtctttgttggttgcctcttcataggcgcgtgtcagataggcgaaaccaagatatgcataagcagaaccgcttgtggcacggcctacattatcagcgtcacgtgttgcaggcagactggttgcacgtttcaagtcttcaatgatgaaattccatgcatcctcacgggaagaaaggggcttgcttaattcagccgggtcagtgatatatttatcacgaactatgatttctttccagttcaataaaagttgcatgtggtaataagcgcggataaagtagccttcattgaccaattgttcgcgtgttgctgcgtctatattctcatcgggtatttctgcggttttttcaattacctgattagcaaaactgatgcctttatagtagcattgccagtaataactgaactgagagttaccattggtgtaggtatagttgcctaattccacccagttcgggtaattcagagcatcgcttcctaattggataatatcttcacgataggcttccaccggccatttgatttccgggaaagaccacatgtcacccgaataagtcatcaggtaaagttgggagtatgcggcggcaattccggcttcagcatcagactggttgcgccaaaaactgcttgatgtcaactggtcaggagattctaccgtgagataatcgtcacaagcgctaaataaacttgcaatgcagatacttgctatgtataatagtttcttcattttcttattactttaaaggattagaatgtaagttgagctccaacggtgaatgaacgggtaaacggataaatcaatttatcaacaccggtattcaacacactggcacgagagaattcaggatctataccatcatagcctgtgatagtgaacaagttttcaccacttacatagaaacgcagtttctcaatatagaatttctgcatgagcgatttgggcaaagtataacctaactgtgcctgacgcagacggacaaaatcaccgttttcaaggaatctgtctgattctttcatgttgccgttcggatcttgatatactgcgcggggaacatccgtatttctattgtcaggagtccatgcattcaatgtagacttcagcatatttgatttagagttcattccttcatagaaatatttgtttccgttatacaatttgaagttccatgcgctgccaagtacgattgaaaggtcaaatcctttatagccgaatgacagatttaagttcgcttccaatgtcgggatacctgaaccacagtattctttgtcaccggcgtctatgcttccattaccatctaaatctttaaaacggatatcacccggttgggcattaggctgtaataattgtccatccttgtttacatgggcatttacttcatccatactttggaagataccgtctgttctataaagatagaatgcaccgataggtttgcccactctggtttctgtcgggaaatgctccgttccatatttcaatccttcaccctgaagaacttggtctgcatctgacaattcaaccactttatttttggtggtgctcatattgaaaccgatattgtaatcaaagtcttttatagcatctccccagtttaattcaagttcgaaaccggtattgcgtatctttccgacattcagggtgggattagtcatacctgctgaaggaggtaaaacttttgttatcaacaggtcttctgtttggttatagtagtagtttaatgtaccggttaatttgctgttaaagaagccgaagtcgaaaccaatatttttggtatccgttgtttcccatttcaaagaacggttttccaatccgcgagcgatacttcctgcccatgcgttatcaccgttgcctttcacgtatccttgatacatttcattgtatgtactaatcagcgcaaggaagtcataatatcccaaagcattttcattacccaaacgtccccaactgacacgaaatttcaaattgttcagtgcaatgtctttcgggaagaattcttcctgactgattctccagcctaatgccactgacggaaagcagccccaacggttgtctttaccaaacttggatgaaccgtcataacgtacagttgcctgtaccagatagcggtcattataattatagttcagtcggccgaagaaagaagcgcggttatatttccattttgttccgctaccatcaaatgtgccacctgctcctgcacctacagttgagaaagatggatcaagaaatccgcccggagtttcactggttaccaattttccgtcttctactttataaacagtggttttaccttctaccccaacagaattccatgtatatttgcgagcagtcatggaagtacctgccattgcattgacgttgtgttttccaaatgtcttattaaaacttaatacattttcccatacatgttcttcccagtatcctgtggtttcgctatgataaggatagtcacgtttggcttttgggtcggcaacataagccggagtatgataagtctgacgctggtgttcacctctgtatgcatagcttgtcttgaaattcagccatggggtgaagttcatagtcaaggcaacattggctgtggtatgatattttttgtctgtagatttttcataatgctggtcagccataacattacggttactgggcaggtcatcaaagtcacttaagccgaagccatactctcttgtatcatcatagataggaacaagcggagaaatcatgtacatttctttaatggaatattccggttgtttgctatctgtaaatttgaaagcgatatttgcatctatatcaaagatatatttattcatatggagtttcagacgggcattgtcttggcgatagttgttacctagaaaaattcctttttcgtcggcatgattgtaggagagtgaatactgggcgttttcggaaccgccacggatactaaacatatagttttgtgaaacaccaccccttagcatggcatcttgccagtctgtatctattcctgtgtttttatttacaaatgcaggcatagtaacctctgtatcattgggatactggttcatatagttctgatacatttgtttatgaacacttttgtattcttcggcatttagcagttccagcttttttgctacgcttgtaaagcttacataagtactgaaatcaattttcatgtcaccttttttaccgtttttggtagttacgataatgacaccatttgcagcaaccgaaccatagatagcagcggctgcaccatccttcagtacttccattgactgaatatcttgcggattcacattttcaatatcaccgggaaaaccatcaatgatataaagaggttggttatcaccaaacgttttgacaccacggattttaacctgcacacctgcaccggcattaccaccagccttcataatgtttacacctgcaatcttaccttgcaatgcttctgcagggttggttgtggtgcgctttaccaaatcgtctacatctactgaggaaatagcaccggtcatatcacttttcttcatggtaccatagcccactactacaacttcatccagcatctcagtatcttctttcaaagtcacccggatgtttgtctttccgtttacagggacttcttgtgttgcatagcccacataagaaataataatagtggctttgggggatacgcttaatgcaaagttaccgtcaaagtctgtgatgaccccgttggttgtacccttctctactacactggcaccaataataggttcgttggcagcatcagtaaccagaccagtcagttgaatcgtctgtgctaatgcaccgaaaggagtcataaaagcaaagagtagaatcaatagtatgattctttccttgaaataattctttttactcatgtgaataaattttaaggttaataattgtttttcacatcgctaagtaataggttgtatgtgcaaattcctaattattataccctacaaatgaactacaatgaataaaaaaactctcttttttaatctacaaatataaatgtaatatattgatatatagtgttctatataaagagataatatctacaaaatgctgtttaataaaaactataaaaatataggttctttaaatattttgtagatagtctgtcaagtcatcctccgaagataagtttagagatttacgtaaacgatatcgattcatgttgattgttttgggaacatttcctgtgagcattgagatttctttggtagatagatttacccgtaataaagtagctagatatttttctccttgtgttaaattaggatgccgttcggatagccgttgaaggaactcctggttcttttcttcaacattcatcagcaaggtgctgttcgttttatctccattctgatattggctgatgaaggcattgactttcttcagatgaggaatcaatgcttgttggtccatcttatatccttgctttatcatttctctgattttctctagcaattcattacggctatgcaggaatacagcaaaactggtagcttcctgacgactgttgtctaatgcactttggacagattttaattcgagttcttgctgtcgtactttaagttctgccaattcatgttccgattgctccagattatagcgggcaaccattaactgcatattctttttgcgtttataccattggtatagaaatatactgagtactatcaatgagatgaatatgattactagtacaaacagattccgtttcagcagttctattttataagcttgttctcttagttctgctttcctttgttggttttgatattgtttatgggaaatttcctgttctacgatgcgtaatttacttccactttgcaactctttgctgagagtatatagttgcatcaggcatttataagcgtttttatggtctccaagggcatcgtatacccaagataaatattcgtaattatcacaaatcagttctttggcactaatggaagaagcgacttcgtatgctttttgtaaagccatcaaagcattgttgtattgctttgcatagaagtattgctttcccatattgttatagttttcccctaatgaccattgagaattcaagttcttgttgatgacaatggcctcattaattaaacttagcttttcattaaaatcaccctcatataagcataaattattcaaattggcggatatccctcttaaatttttctgactgcggtttattgtaagggcttgtttaaggaattgttcagctgttttgaactcattcatggaataatggatgatgccacgatcattgtagcatagtgcgatagaaatggaatctccgatggatttaaaaattgagatggctttctcactcatttcgatcgctttgttgtagtcggtcagtttgcaatagagtgctcctatcagtgcgtaaatttgtccattcaactctttattggtaggagttgcatactccaaagcgtcatatagatttttaatgctcacatcaaaattgcctaatagcttttctgcctgactgtaatagaacattgcttcagctttttgatcattttgcctttcttcaggaaataattcaattaccttggcagcatagtaactagcctgcttcggattattgtataaggcatcaaccgactttttaatcagtgtctcggcttcttgttgcctattacgggcatgaacccatgaaaggttcaacaggcaaaggaggatatatataggtaggttgtttttcataatcaagcgtatttttgcaaaaatagtgattttctttgtaaaaagacactcttgtttctcttttaaaagaatatctttgcaagcaacaataaagatgaactatgttattaccttatttgaataaagacctgatagaagccggttgtgatgaggcgggtaggggatgtctggcaggatctgtatatgcagctgctgttattttacctgtagattttaagaatgaattgctgaatgattccaagcaactgacggagcatcagcgttatgcgctgcgagagattgtggaaagggaagcattggcatgggctgtaggtgtagtgactcctgaagagatagacgagataaatatccttaatgcgtcttttctggcaatgcatcgtgctgtggatcaattgaaaattcgtcctcaacatttattgattgatgggaatcgttttaaaaaatatcaggatttaccgcatactacagtggtaaaaggagatggaaaatatctgtctattgctgctgcatctattttggcgaaaacctatcgtgatgattatatgaatggtctgcataaagaatatcctttttatgattggaatagtaataaaggttatcctactaaaaagcatcgtgcggctattcgtgaatatggaacaacgccatatcatcggatgacttttaatttgttggggacagatccccaattagagattcctttctaatttaaagaatatataggaggatgggatgacttctttgcatttcattttacgttgttgaaaataaggcgaagaatctgtttgatccatatgggtagtaacagattcttcgtttcatttttttacaatggtctcatgcagcatatcaatatttccctcgctggtaagagcggtgtccataaatcgtaataaccacaaagcagataaatggcaggataaatgaaacatttacggctggcatattccaaatggtattcatatcaataatacttgcttgtaaaggaggaagtacggaacctcctaaaatagccataatcaggccggctgctccaaactttgcatcatctcccaatccggtaagcgctatgccatagattgtggggaacattaatgacatacaggctgaaacagctaccaggcagtacataccccagatatcctggaagaagatgactccggcggtgaagcaacaacccgcaatggcaagtatggccaataatttacctgggttgaggtagcgtaagatgaaggtacagacaaagcggctgatacagaaaataaccatcgcaatgatgttgtattcttgtgacagcacttcggcggctttttcttccataccttgtgacatgaacagatgtgtaccatattgaatgataaaggtccaacacataatttgcgcacctacatagaagaactgtgccacaactccctcacggtaatgatgaatggagaaaatacgtttcaaagtcggcccgaaattgatgccgtgggattggtcaccatttttaggcatcttagtaaaacggataatgagaaacatcacaaagatgacaataccgattgttaaataaggagcgatgagtacggaaagatccgcatctctcactattgcaaactccatcggattcagttgagctcgttctgccgtatccattggattcagctttgcctggataaagttcatggctacatacattcccaataaagaccccatgggattgaatgattgagccaagttgaggcgtcgggtagcggtagcttccgttcccatggacaagatataaggattagaactggtttcgaggaaagaaagtccacaagtcaggataaaataggctaatagaaacggataataattgccggtcattttggcggggaagaataataaggctcctacggcatagaggcctaaccctaacaggatgccagctttataagaatatttccggatgaacattgctgccggaaaagccatggcgaagtatccgccataaaaagcaacttgtaccaatgcgccatcggtaacactcatccgaaagattttcgagaacgctttcaccatcggattggtgatatcattggcgaatccccacagggcgaagcagcaggtgactaatataaatggtagcacgtagctgactccatctttgtgcaggatgggttgatctgtatctttcatttcttaaattaaagattgagaattaaaaattaagaaatgagaattgaaaacaaaaaaggataggcatataaccatttctcaatttttaattctcaattctcaatttattaactatttataaataggtccgtaagttgagcaagccctgtagtcggaaccttccttatccataccgaaagcattccatgatgccgggcggaaaatcttgtcgtcttctacattatgcatacaaacaggaatacgtagcatagatgccagagtaattaaatcctgtccgatgtgtccataactgatagcgccgtggttggctccccagttgttcattactgaatacacatcacggaatgcaggtttatcgcataggcggggtacaaaccaagtagtaggccatgtggggtctgtacgcatgttcagtacctgatggatttccggatcaatatctactgtccagccttctgccagttgcaatactgggcctaagccttttaccagattaagacgcatcatggtgacaggcataccgcctttagacaagaaattagaagagaaaccgcctccacggaaatagtcgcgatctgccggataccaagttgtagctttcagacaagcttctacatcggcttcagtcatttcccagttaggtttcatgcagggctctcccgcttcattatggctctcaccggtagcgtccagagtggttgcaccagaattgataagatggatgataccgtttttagccattccggtaagttctttgccggtaacacgtttcaccgcttcggggctccagtaagtacggatgtcggagaacatctgtccacaaccactcagcaggtgaccgaataacatggcaacaccattgcaagcatcattttcggtagccagaacgtatgcttcgcgaataccgttccagtcgaaagtggtgttaagcagtgcttcactgaagtcaccgtttggtttccagtcagtccattggcgttgtccctggaagccggctgcgatggcattatggccgatagcttcttctttgaatcccatttcaagcaatttcgggttgcccaccatcaagtcacgcatgatgatagtcatttttacaataaattcccagtcggcatccttctcttcacgggttttgcgcttttcgggacggttcttaaagtcttccccttcgttgggcttgcaatatttttcagtccaggccattgccttggcatattcttcatggtcatagattccttcttccatacggcgcaggatctcagtttcgtccacgctttcattacgtattcccagatattcctggaaaaagtcaggatcgacaatagagccggcgatacccatgcagacactaccgaaagaaagatagctttttccgcgcatattggctacagccatggcggcacgggcgaaacgcaatagtttctctgccacatcagccggaatcgtgttgtcatccaaatcttgtacatcgtgtccgtaaataccgaatgcaggcagccctttctgtgcgtgcccggctaatacggcagccagataaacggctcccggacgctctgtaccgttgaatccccagactgctttcggccagtgcgggtgcatatccattgtttcggagccatagcaccaacaactggttacggtaatggtggcccctactccttcgcgttcgaatttctcggcacaagcagcgctttcggctacacgaccgatggtgctgtctgctattacacactctacggggcttccgtcaccgtttttcaaattggatgaaatcagttcggcaacagcttttgccaggttcatagtcttgtcttcaaggctttcgcggacaccaccctggcgaccgtcgatagtgggacgaatcccgattttaggatactttttcatgatatacataggttttagttattaaattgaatttcttaaatggacttcggtaggaagataagttcttatttcctgtccggttagcacaaattctgcggctttcctccccagctcttcccagttgatacttagtacggtgatcccttggtctattacctcgtaggcaggagtgtcattgtaggctatcagtccgaaatcttctccgcatttcagcccggtcgtccggctttgcttgattatattgactacctctatctgacggattgcaatgtacacttctcctttgcggacttgtatccggtctgtattttccacaatggctgaatcaatgtgataatcctgacagaaacaattgaaatactgacaactgctacgggggtgtttgatgtcttcgggaaataaaagtactagtctctgatattttctcaaatgttcttttaatgcggccaatgcatgataaaaggaatcgtcaaaatcctgacatacgtatgaataatcctttttatcgaacttcccgaaatccaacagcagtaacttagacgaatctattttgtaaagatggggggatagtttctcattgtcgaagttcatcacaatgtatttgttgtatctgcctattgattcacgtaagatggtattgaaaagtcgttcattatattgatgaaacaataaatctactttgtagttgatggatagttttttgataaaactattatataacgagtatttaaagggagaatactcgtccagcagaagcagaatgtttgtaagcttgttggtaacgtagtaaccttttcccggagtagagtctattattccccggtcttttaaatcaatgaatgctttgaatactgtatcccgcgatacttgatagtcacggctcagtttgttgatggacggtaatgtgcagtccgatctatatttgcccatggaaatctcctgactgagtaaatcagccagttgtttcactttagtggtctgctgtccaaaggtaactttcatgaactgtttaaggttttacacggacaatgcaaactgtgctgaactgtcccgatgcaaaggaatgcaatttattcataaacagcaagataaaatggtatgttttataacacaagaatcgatgcttctatatcgatttccggaagaatgtgtagtacgtactaatcaaataatataattagagtatttgccgaagtatattaaccgcattacagaacaaagggggatagtcgtgtcttgccggtgcgccggatattgttttgctggtttgtgaaatgattgccgggcgtatgaatgcaaaattgactcgggatatggaatttaaagacggactgcattttatcatcaaacttcctttataaaaaataggtgaaacattattcattgacagggcttttttgtacctttgcacccggaaaaagcaaggataaactttaaacaaaataagattatgagtaaaaaagcccttttaatgattcttgatggttggggtatcggcgatcaaggtaaagacgatgtaatctttaacactcccactccttactgggattctctgttggcaaactatccgcactctgaattgcaggctagcggtgagaacgttggtttgcccgacggacagatgggtaactccgaagtaggacacttgaatatcggtgcaggacgtatcgtttaccaagacttggtaaagattaaccgtgcatgtgccgacaacagcataatgaagaatcccgagattgtttccgctttctcttacgcaaaggaaaatggcaagaacattcactttatgggattgacttcaaacggtggtgtacacagttcattcgatcatttgttcaaactttgcgatatctctaaagaatatggcattgaaaatacatttatccactgctttatggatggtcgtgacacagacccgaagagtggtaaaggctttatcgaacaactgactgcgcactgtgaaaaatcagccggtaaaatcgcttctatcgttggtcgcttctatgctatggaccgtgacaagcgttgggaacgtgtgaaagaagcatacgacttgttggttgaaggtaaaggaaagcaagccgccgatatggttcaggctatgcaggaatcatatgatgaaggtgttacagacgaattcatcaaaccgatcaataactctaccgtagacggtaccatcaaagaaggtgatgtggttatcttcttcaactatcgtaacgaccgtgccaaggaattgactgttgtgctgactcaacaggatatgccggaacaaggtatgcatactattccgggcttgcagttttattgcatgactccgtatgatgcatctttcaaaggtgttcatattctgttcgacaaggagaatgttcaaaatacattgggtgaatacctggctgctaacggtaagactcaactgcacatcgcagaaacagaaaagtatgctcacgtaactttcttcttcaatggtggtcgtgaaactccgtatgatgccgaagagcgtatcttggttccatctccgaaagtagctacttacgacttgaagcctgagatgagtgcttatgaagtgaaggataaattggtagaagctatcaagacccagaagttcgatttcattgttgtgaattacgctaatggtgatatggtaggtcatacaggtatctatgaagctattgaaaaagcagtgaaggctattgacgagtgtgtaaaagatacagtggaagctgccaaagctaatgattatgaagtgattattattgccgaccacggtaatgccgaccatgcactgaacgaagatggtacacctaatacggctcactctttgaaccctgttccatttgtatatgtaacagagaacaagaatgccaaagtagaaaatggggtattggcagatgttgctccctctatcctgcacattctgggtatgcctcagcctgctgacatgaccggacgggatttaataaaataatgtaggaagtatatttatttgtcattctgaacaaggtgaggaatctgtaatgaagcatggattcgccactttgtccggaatgacattttaatttaataagagatgatacagatagatgatgttgtaatctcctttgatgtgtttcgtgagaaatttctttgtaatctcgatgcctgtaaaggtgagtgctgcatagaaggggatgccggcgcaccggtggaactagaggaagtggaaaagctagaggaggtgcttcctgttatttgggatgaactttcacccgaggcccgggcggtaattgataaacaaggagtggtttatacagatgaagaaggtgatttggtaacttctattgtcaatcataaagattgtgtatttacctgctatgatgagaaagggtactgttattgtgccattgagaaagccttccgggcaggtaagaccgatttctataagccaatctcttgtcatctttaccccatccgtataggtgattatggcccttacaaagcggtgaattaccatcgttgggatgtatgtaaagccgcagtgttattgggaaaaaaagagaaccttcctgtatacaagttcttaaaggaaccgttggtgcggaaatttggtgaagaatggtataaagagctggaggttgcggcagaagaattgaagaaaagaggaatgatttaagcatcttcgatttttatcattcctgatttattacattaaccgaaatttaatactacgaaaataccccatgaaaagactactcttgtcatgctgtattctattatgcgccgtttcgaccttgaaggcgcaagaacagccattaatcagtccggacgattctatccgtagtttggtgggacgtttgtttcctaatagcaatccgaatctttcggcacacatgaacctgcaattctccacttcgggagttgccaactttattgaaggagatttagaggatgcctcttttaaattgaatcgtgtgaaactggagatattaggttctttcagtaaacaattctcttatcatttccgtcagtcatttaataaatacaacaatcctcactcgttggacaacttatcctcttccattgagtatgctttggtgaattggaaaatgtctgaccggtttacttagaccgtcgggaaacaagacattgctttgggtggttatgaatattatgttaatgccatcaaagtccgcgagtatagtgagtttaatgataacatcagttgctatcaggcaggagtagcgggaagattcaatctgtcatccaccaatgagttggtgcttcaggtagtaaataaccgtagtggagaaaatgatgaaacctatctttacggtttgccacaaggagtggaaaaagctaaagttcctgttctgtcaacagtcaattggaacgggttcttctttgataacgcggtacaattacgatatgcggcctcatacgggcagctggcggaaggcaagaatctttattgttttacggcgggtaatatttatgagaaaggccctgttattgcttatattgatttaatgtattctcgtgaagggctggatagcaaaggtattatcagtgatttgcaaggtcctgttttaatgactccatctacggcgcagaatgcagaatactttactacggtggtgaattttgactatcgtatccatcctaattggaatctttacctgaaaggtgcttatgaaacagcgggtatctataaaacaaacggaccttttgagaaaggactttatcgtactacatggaatgtgcaggcttgtgtggaatatttcccgatgcgtaatagtgaactgcttatttttgctcattttttatataaagggcatcatttgacccggcgtgcgcaggctttgggaggtatgagtccggacacgcaacgtatttctatcgggttggtttactctattcccgttttttgatgttccttatcatatcttcactccgttccgtttgatatttcacatgggtgaagcaactgcttcacccatgtgacaacggctgtttacctaagtgaaatcgcttcttcaccaaggtgaagcaatgaacgcagccggacaaaaatacaagaaaaaaggcttacctttttatttcaatgaggttgtttccccttttcattgcaagaccggggaaatacgctatatttgtgaaataattaattacttcaactaacaacactgaatattataatgaaaaagactgtccttttttttctgatgattatattgatagcctcgtgccatcaagaagaaattccttctgtttccgataaaccggaagggaatcagctgatttttgatttatcagatgaagatgtacttcagggttgtatttatgtgaaactgaaagaagaacctacagaagaggtgcaggtaaggagtattggcaacacggtaaggacaggaattaaggtgttggaccgggctgcctcttctttgaaaatagagagaatggaacgtacgtttccctacgccggcaaatttgaagaacgtactcgtaaggaggggcttcatttatggtacaatgtttggttctccaaagacacatcagcgactcgtgcagctgctgaagtagcttttctagatggtattgaaatggctgttcctgttcctaagatagtttccagggcaaggccggaaacagtatgggatatgtatggtgtcagagtgggggagtggttgttcaatgatccggatttatccaaacaatggtattttgataatcccggtacagaatcctggcagagggaaggtgcggatatccgtttagttgatgtgtggaaacaatacaatgggaatccggctattattgtagcggttgtagatggcggtattaatcaggagcatcctgatttgctggataatttatggacgaatccgggtgagataccagagaatggtatagatgatgatggcaatgggtatatagatgatgtacatggttataattttgtagatgataatgcaattttggtccctcatcgtcacggaactcatgtggcgggtaccattggtgcgacaaataataatgaaacaggtatcagcagcattgcaggagggaacggaactcccggcagtggggtgaaactcatgagttgccaaattttaaaaagtctgacttccactggaggagaagtcgcttctgatccgtttattgctgccgctattaaatatggtgctgataatggagctgttatcagtcagaatagttggggatacgctgtcggaacggggaggaatacctcttcatatattaatcctgtacataaggaagctattgattactttataaaatatgccggatgtgataacaacggagagcaacttgacggaagtccaatgaaaggagggattgtattgtttgcatcaggcaatgcgaatacttctgaccccaggatagcggcgccggctgattatgacaaggtagttgcggttgcagccattgaggccgattatagaaaggcttcttattccaattatggtacatatatggatatttctgctcccggaggagcattgaacggagatgggcggatatggagtacgaccacaaaactggccggtaattatgaatatctggccggtacatctatggcgtgtccgctggtcagcggtgtggcagcactggtgatagagaagtatggggtaggcaagaaagggtttacaccggaaactctgaaggaaatcctctatcaaagcgcatacgatttggatgaatataatccgaggtataccggccagttggggcacggatgcgtggatgccacagctgctttaaagatagatgtttctaatcttcatccttttacattgaagtccaatcaggtaactgataatactctgatatttagtgtaagcagcagtatggctggtaatggagaactgactttgtataatggcattggcaataaggtgctgagtcttcatttggaacttgaagccgcctccttgcattctgtggacataaccaagctttctgccggatattatacattggtgtaccgagcgaacgggatggagatcagagagaaatttatcaagtactaatcctgataaaatgaaataggacatgaaacgaataggactatatctgtttataataggcataacttttattaaagcttatggacaagaggattccggacctgtcaataccggagcggcaaactatctgactataccggttgatgcacgcagcgcagccatgggaggtgccggtgtggcgatttcgaggggaaataatgccgttttccataatggtgcggcaactttatcggaggccatgcacaaaggtggggttacgtatacttattccccgtggatgcgtgactatgagtctggatactctcttcatagtttaggcggtttttataaaattaataagcgcaatgccattctgttaggtttccgttatttcggctatccggagatggatggaataggggaggatgcttcgggaatacatcccaaagaaatagctgtggtggcaggttatgcatacgaggtcataaagaatctttcggtttccgctacttttaaatatctgtattcggatatgggtaagataggaaatagcaacggtgcgagttctgtggcttttgatttggggatattatataagcgtgagataaaggattgggaaggtgccggttggtcggtcgggattcatgcgagtaatcttggaccgaaaataaaatacctaacctctaaagaggctcttcctgcaatggtcaaagtaggaggtgctgctgacttgccttttgcatcaatgcataggttgactttgaccgctgatctaggttacaggctttcccccgatgatgtacaggcgttaaatgtaagtgccggggcggaatatgcatggatggagcatctcatgttgcgtggcggttatcattatggtgataagaataaaggagatgccagttatgctacggccggggcaggagtggaatatgcaggtgtgcatttggattttgcgtggatgtttgcgggacatgaatgtcttgccagaaatacgttttggatttctttaggatactctttttaactcttgcacggttagtcctagaagcctatatacatatattaggcttctaggttatcggttattaacaggaagattatgagttatctttactttctttttgtagatgattggaatgcattcataatggctgtgggttttccgtttttgtcaaaggctcccatatcatatccgttccattcgtaacattccggttcccagtaccatacaccagcgcaagattccatgtctcgggctttgtttataaaatcggcaaggacttgggcggaagcggaatcattttgttttacccctatttcggttatcatgacttttacttggaaagtctttgctagttggctgatgtgttttaatgctaacaagttcatttcttgccataattttgtggaatgagtttgtggatagtgtgacaggccaatcatatccaattttcctccagcttctttgaactgcttgaaccaccaagttaagtcgtcccaggcattgtctatgtgaacaataacgatactttgggggaagattttttttacggcatcgtagccggtattgacaaactcggccagattttgtgtgttttgtggatatttcactcgctcattggtactgtttaagcctttgacatcacattctcggatatcatagaatgcaccgctgagtgcgacattctcatcccacaacattcctggacggatttcgttacccacttgtacccatcgtggggatatgtcttccgcttttaatgcttgcaagatgtcgatggtatgggcggcaatggccgtctttagttccgctactgatttgccgatccatgccttgggcttgaactgttgtccgggatcagcccatgagtcgctgtaatggaagtctaccatgacatccagaccttgttctttggctcgtcgggctttgttcacaacgtcttgtttaccgttccatctgtctttgggatttacccatacgcgcaggcggatggcatttatgcccagctctttcatcagttggaagcagtcggtttctatgccttcatgattgtaaaacttcaacccttttttttccatttcactcacccaactgatgtcggctccttgagtaaaactggttttggaaggtgctggtgtatcggaattatctgttccggactgttcgttgccgtggcttccgcaagctgacgaggataataccagcaaagcggttagcatataattcttgaggttatgatatatttctttcatgtgttttcgtatattagttttttagaagatagacaacggaggcatatccgtctagttttaaataaaagtttccatggtcttccttctcctgtacatttccggatacggcgatagctttctccgtcctgtccgtcaagggaatctctatttcagaattgccaaaattatgaataaccaatagtttctcgctatctttagtcatgtaccaggcggcaatacttttgtattttttttctccctctcccgattcgttgaacagagcatgacgggtcatggttccttgggccagcgctggataggtgttacgcaatgcggtaaagatcaagtaggtattcaatactgactgatggtctgccgtctgtttggttacatcggggatgtttgtgcttactgtggcatctattttgtcggtatagtgggtggtataactgtctccccacaacataggtccgcgtacatattcatctcctttgtctttggtgccgtataatcctagttcttcaccataataaatataaggtgagccgggagtagtgagcaggacagcggctgctaatttctccttggcggtagatttacctagcttggaggctgcacgatcttcatcatggttgcttagtttggttgctgcgatgtacccgggacgataggcggcatattcttgcctatagttcaggatgtctttggtgaaataacatccggtggcattattgagagcccattccagacgataccagaaagagaactcgaacaaagcgggcagaccggcataatagggggctacttcgttgtattcggacagtacttcacccaccatgtagaaattgtccgtgtgtcctttttgcttgtaataagtgttcatgtcttcgtagaacatattcagaaaacggggattttcgttgctggtagcactgtggtagatgtgcttgacagcatccagccgcagtccgtccacacctcggtctatccatcctttggcactgtttgccatggctatgtacgcaggggaagaagtggcttgttccaccgcaccatagttgaggtcggcaaagtagtcggtggcaaactgggaatgataataccataagttcatggaatcgaacagaatatcggccgctgttttgttatcaagagtgaatgcagttcccaaagtgactttgtgggaagcagaagtagcaccgtatttagttcctgcaggccaagaaggatcgttactagtgcggattagaaatccccaagaggaaacgaagtctgtggtcagttcataatggttgttccctttgtcatagaattttttacatatgccttctccgaaataaaggtatttggctccgtttgtgccggggtcagggttgtccgcatcggctttttcggcccgggttactgtgacggtgggttgcgaggctttgctccagtcgaggctgaatgtatagatgccttttacttctgtatcttcggaggaggttgcgaaccattcattggcggcatattcttctttgggtatcatggctatttttccttctgctatctctgtttgaggagattgggagaagagatagtagctacgataaagattatcagtagatgaggtggcttccttgaaccaagggtgggctttgcccgtatggttcattacataatccaggtatatttttatgttgcgcttgtgggcttcggtgatgaggcggtcgaagtcggcctctgtacctagtttgggattgactttggtatggtctgtcacatcatagccgtgataggacatggcaggatggatgggggagagccagagggctgtcactccgaggctgttgatgtaatccagcttgtcaatgagtccgttgaggtcgccgtatttgtcaccgtctttgtctgcaaaggagtaaactaataattgataggagatgtcggcacgcttggtaccatcccaattgtcgggggcggcagtgatatttttccaagtggcggtaggaggatcagggttttcgggagtcggaggaaccggtatttccggcgaatcgtcagaacaggcttgtgacagaggtaccaagcaaagcaggaatagtatacctactagaaagagatggattcgtttcatggtttctttgtttataaggggtaaaagaataaggcggagtacagtattacggaaattccgcaagccgtaaaccgccttttgtcggtataggtacggggaggatacaagaagcgtacctatacttgtattgattagttcttagttagggtcaacaggttcatgccgtcgcattgagggatgaacctgatggtatagtttccggccgtaacagcgatgttgccggcattgaaagtcggttcggctatcgaaccaccccagttgatgtcccagtcattattggcgcggattttgatttcaccatccgttaggttggtggtcagattccaacttccatcttcttcgttgtaagtcatgtcggtatcggcatcccatccggatggggtggcgctacctatcactccgagagttgagatgagggtatgcttgtaagtcatggcagtcaaatccacttccatcatgtagaaccctgcttccggagcgtcgatatttcctgcaccgttttcatcaagtgtacctgccagagcatcaccacttactttttcccaatcgcctgtccagttatctttttctgggttcggcttgtatttgaattctccgttcaaataggcgaaacctctgtatttgccatcaaagtttattccggctagcgggcaagtacctgaccatgaggtgttattacctatttcatagatgtaaggagcgaaacccagctcttccagtgtgtaggtgtattccatcatatccaatgtcattctatacatgccggcttgagttatcatgccggcttgtggattgtttgttgtaagtgttccttcggtagcggtatctccatcggttacggttcccaatacaccagctccccagaattctccctcggtattggtcttcggaataattttccagcattgattatcagcggttgtggtgaatacgatggaaaatttggaatcttcataaacgtctgttcccgaatggctgaatcccaccatgccgtcagcgctccaaccatttaccgaggtttcatccttgtcgttctttattgtgaacatgtcgcctacaagatagtaaccggtgtcaataaatggtgcggccggagtgaaatttacgtcaaacgagccggcatttaccaataaggcttgtccgtcttttatggcattggcatatacttgggcaatgaagggacgcgctataggacgtttcccgtaagtttccactaccagcttctgaatggtcaggctgtcaatcattccgtctgtattggattccagttctcctgccttacctttctcggtagagagctctacccgtacattgcccaaggtatatccttcgggaagtgtggcattagatagagtgaacaatttgatgctgctccccggattggataaattgatgtcatcgaccttggatgccgagaaatcgggaagggttattgcagcttcttgttcgttggcttgaggagttgcccaatcagtgtaatcatctgtgcatgaagacatgcacagaacagtcagaccgattaatgaatggattgatatatttttcatcttgattcaattaaaaagattattatttgatttcgccttcgccggtagcgaagttcaggtagagctgctgtcccgctttgcctgctactcgtgcttggtctccatcgttggcacgatattcaattttgccgtcgaagaccatgaactcgctcttccaccactcaaaggtaggaatttttacgtatgcacgcacaccgtcaccatcgccacccggaacactggcagcaaaagcaggtgagacaaaagaagcgttaaaagtatcgggaatggtacataaccagccttcagcctgctctttccagtcgctgttgcctacaacaggtcccatcaaccatatttcaggtttgttaaactgtatatcatagacgaggttgcgtcccgaaacggaagaggtgattaccattaagtaccatcccggagtatcagtagcgatattgtctccgttgtctttgatattgcctgccaaatcgccgtttatactgtttataccagaaaatcctgtttcatttccatcccaagctttgctctgattgaatttgatgccggcatcgtctatccataccatagaccagaatacatgagttgcaccgtttacgggaatcatcttggttgccgaatcccagttccattcgttaaatccgcctacgatatataagttttcgggggtattgaccggaggaagcgagaaaagtaaatgtactttattcaatgacactacattggaaagtatttcggttccttctattgctttgttatcactggtcatcataactgctctcaagcggatatagaccgctatatccatcggaaaatcaacatcggttgcacctttgtttactttcatatctgtaagtgtactagctaaaagaggtgcgtctatactgatttttgttcctgcattgacattacctatttctgtaaaatcggtcatggattcatcgaatgccacttgcacatagtatccaacgttggcggggaagccgtagtcgggttgtgaacaggatatttcgatagaggaagaattggccaaatcgattactgtaccgctgatagctggagtgtttaggacaaattcggtgggtgagattagcgttgggttggagtcgcgatcatcatcacatgcggtgaatatacccagtcccaatccgataatcaaaaatgatttaagtattttattcattgtattttcatttaatatttataaaacaaaaagttttcagtatcccgggttctgagtcaaattggagttggcagtcaactcattggtcgggatggcaaaaatattaagatgtgcatcaaaactacgtccttcataagatccgcctttccattgccaagtgtaattgttgttgcctccatagcggttgaatctaattaagtccatacggcggcggccttcaaaatagaattctcggctccattcatcgcaaatatcatccaggctatatgcatttgtacgggtagaagcatgtgcacgacttcggatggagttaactgcttgtgtaccttcagatgtagtgtttcctccattcaagcgagcatcggcttctgcaaaagtcagataggcttctgcaacacgtagcaagaagtagtcggtatcggcgaaggtggcatcatgtccggctgaaccgtctgttttgaagttggtgaattttgcaatagcataaccgcttttaaaggtagatacatcttcattgtttaaggtacgtcccacaccgtcgaataaagcacggtcgtctttggctgctacatacatgtcgtagcttggcagttcgggggcatcattctgagggaagaatttgcggatgaggtcaggacgtgcgcggttaccgccccagttttgtgcagaaacaccgttggtggctgtcaggtcattagggtttgcatgcatctcaccatcaaagcaaccagctatcaagaacagggaagtaccccaactggtggttgtcaaaccgtcttgaagtaagggtagaagagcttcgtaagcagcatcagtttccccgttgtcacccatgaataacatttgataggcagtccatccgccttttcccacagtattgagccggtaggaggattttattactttgtcggcatattcttttgctttttgccattgggccgttcctgtataaatttccgaattcaagtacaggcgtgagagcaacagccagcaggcagctttgtctacacgaccataaccggcatctgtcgatttttttgcttttgcttcggaaagggccggttctattccgatcagttcctgttcaagccattcatacatttgagctctggatctttgttcaggtttggtcattggttccaatgtaaagggtatgtttccccaaccatccatcagtaagaagtagtgtagggcacgtacaaagcggatttcggcagacatggtggcatctgtatctccagccatagccagatattggttacaataggtgatgccggtagtcagacgggcatagaacccgtttaacataggatgggaagcattgtaagtattgtagcagaaactggctacaccttcatctccccagccgcagatagcttcatcagtggtcagttcgttggaattgaacaattggcggataaagcctgtcgtaccaccatccaaaccgtcaatatcacagtcaccgttagcaccaccgtttccggctaatgccatattggcgtagcacttgttgaacaatccgtttaaatcaacattggtatcgatgttcggatcgataggatctacatctaagtctccgatacatgaggttgcccccaaagccaacatcatgaatgtggcaggaacgatattctttatgtattttttcatatactgcataattttgcgaattagaaattcaggttaagaccaataataaatgagataggacgcggatagagattgttatcgaatccgttattgatttcggggtcgatgccatcatagtttgaaatggtgaaaacattcgatacggttccatatacgcgtccattcaaaccgcgatagcttccgttcttgaagagattggaaaagctgtatcctaaagtgatgttgtcacacttcaagaatgaggcgttacgcacccagtagtccgaagctttggcggtaatttcgtaagtttgccaatttctggctacagcgtctaccggacggttagacaggtaattcaaagagttggaccatacttcaccaggattcatgttgctccatccggcgttgattccatcataaacatagttacctagactggcacgcagtgagaatccgaagtcccaatttttgtattccaggcgggaggaaagccccatagttacgtcgggagcagcatttttataaaggtatttgtcattttcggtaatcttaccgtcaccgtcccggtctactactgcattttctatcgggttgccttgtgggtcatatacttgttggtatacatagaatgaattagctggataccctacttgattgtattgcagataaaaacccgaaccttgacctactttgatatcggtattggctacaggagcaccactatcggatacaccacttagatcggtaatctcattcttattataagtaaggttataattaatagtccatattaagtcattgtttacaatgggtttccagtctaaggcaaattcgatgcctttattttccaacgaaccgatattttgccatgcttgatttctatagccagccatggacgctaatggtgcatagttcagcaaatcttcggttttacggtaataagcatcaacactggctgtcagccgttgatccataataccaaaatcaaccccaatattataggtagtagtggtttcccattttaaatcaggagtatagttgtccgggcggtatagggttccgttacctatcagtggataaaaaccgttagtacctgtgcttactgagtatgtgggaatccagttataattgttaattttttctcctgcctgttgacctgtcatgccccagcctaagcgaagtttcaagtcagatatccaagatatgtcttttaggaagttttcttcttttgctttccaagctaaggctacagacgggaaccacgcccaatggtctttgaagcgtgaagttccatcatcgcgaacggtagctgtaagatagtaacggttcataagtatgtagttggcacgtccgaagaaggaaaccaaataactgtcggtcttgtattgatacggagtgtgaggacgctctgtgccggctaatgtggggtcatcgttcgtcatcggataacgacctacgtagtcactgtttgtgcttttccaaaaatgttgccattcgtaacctcccataatatcaaaatggtggttatcattaaagtctttataatattgggcgtatgcattcaatgaaaggttgcgttttaggatactttcacctccaacagaaccataatacatggcactaggggaagcagtagatttattctgtgcttggcgtcctttggaaacatcggcacctagagataaatgaaggcgaaggtcttcaagaccatgtactttatagtcgatatcggcacttcccacaaaggcgcggctgtgggcaacttctgtgttaaaagcaagcatggctaatgggttggcacattctgccgtgctgttatagatgaacggccatgtggagtcgcctaatgatgcggccgatgaccattggaaaaatcccccataattttgtaatgtctgatccaatgcattgccgaattgggctttgtgatattcggatgtgaaattataaggatcttgggtagggtccatctttacagcagcacctacggctccaccgtcggcatatgcagaacgtgcgtacattcctttcgcattgaggttcatagtcaaatgatcgtcaaaaaaagacggattaagattcaatgcagctgtgacacgtttgaaatcagaatttttcaagataccttcttgattggtgaaacctacagatacacgataaggaaggtcttttactgcacccgatacggttatattgtggtcatgactgagagcggtacggtaaataagatcttgccagtcggtgttggctgtacccatggcacgataagcatcgctgttttctccgtataaatcggtgataagttgacggtattggttgctgtcaagtacatcaactgttccttttttctgactcaatgtgacactacctgaataggaaactgaaggcttttgccctttgcgtccctttttagtagtgatgatgataacaccgtttgagccgcgtgaaccgtagatagcagtggctgaagcgtcttttaatacgttgaatgattcgatatcctgcggattaatcatggctagtttgttagagaggccttttactccctcattgtccatagccataccatcaataacaattagagggtcattagatgcgttcagtgaagaaccgccacgtatacgaatctgggcgccactgcctggggcaccatcattacttgttacattgacaccggctattttcccagaaatcatatcctgtgcgtttattactaagcctttgttctttccatccggtttcatggctgttaccgaaccggtcaggtcattctttttagccacaccataaccgataacgactacttcttccaaagtttccgtatcatctttcagtatcacatttagtgaagtagcagccggaagttcctgggtcaggtatccgataaacgaaataacaattatatcacctttattggcgtttaacaggaagttaccgtcaaaatcagtgatagtaccattggttgttccttttaccacaacattggcaccgataattggttcgcctgttgtgtcctttacaagtcctttgacagtcatttgttgggcaaatgcgtctatggacaagaagcatcctactatcagtgtgagtaggatcttgaacatcaagtttcttttcatgtctttaaatttaaagttaaataattatttcaagtttatattctcagctaaaaacacctattgaaaactgttttcccaaacaatcagattatttatggctcctttaatccttatatttctaatggaattgatctttctttaaaaccattgaattttttctgaaaattttgtgatatctgttcaactggatattgagagagttgaaacatgtatttgttttttagatttattgagatagaatgagttctctatatttctgtttattgaaataaatttcaaaaaagtatctgcaaaaaatgatttgtaatgagatacaataggggaaaaattctttttggttttcatgatttaatggtatttagttttaggttaacggttatcctcactttattttgttttggatgttgcaaatgtagctttcttgtaaattgattctttatctaagaataaaaatataaatgatttaaatcaattgtattttataagtgtttgatttatagaatgatgtgtcttttttgtatctgaaaaaatataaatgattgtgaactgtttcgtgtttggacaagaatgatttatggttcttttatattaattctttgtcaaaactttagtttatattgcatcagctaagagttttctataaaaaacttttaaccgatgcaatataaaggaataaacttaaaagtagttttatttgttttttacaacaatgattttgggagttaccttgttgaaataccacttgatggtatagttaccggcttctgaaactttaaaattaccatcaccggcatcttcaaactctccttctacagctccgggagctatatcgtcttcccatttctcttcagggcgtattttccatttattaccggcggacatatctagggtagcttttaaataatattgaaatttgttgttttcatccgtttcagtttccagtgtcatcattgtgtcaccgcttccccagctattgtggtctcctacaattccccatgagttgtgaggtttggaaactttcaattctcctgtggtattattgaattctaaataataactgtttttgctgtatgctttaatgtcccctccattaccggatactaaagtaacgagggattgttcgggtgtcatactttccggagctccccaattgtccgtaccccagtcttccgtaccgcagaatttccaaccatcggctgctttgccgtcgaagtacaccatagcggtgtatatattatcagaatttaccgaatatactttttggcttttggtgaaatcccaaccattataacttccacggagtgtgattgccggatattccggctcaccttcatatggagtgatggtggttgagacaatgttggaatacaatgtatcggcagctgctgagatagaagacgatatccgaaattcgattcctatcggcgctgtctccatttcatagactttcagcagggtcatgattttgctgttcaggtcactgacagtgatagtatgtgataaatctgttttggatgaggctaaaattactttattggcaaaatttttgtctttaacatccatttccaacgcattgataacgcttgcttgatagcctaaatccggatagctccaggtaagggtgaatgcctcttgggaagcattttttgattccagtatataactgtcattcaaggatgacagggtagacgggatggcattttccgaactatatgtcacttgttccaaatcactttcacaagcagtacaaagtaatagggtaaaaatagaagttgatatgctttttatgaatttcatgatgatgtacttattgattaataaccttcattttgttgtaagttaccgtttacggtcaggtcggtaacaggtataggatacacgttatatctcttgttcactcctactccggtattgattcctcctttgaaatcccatgtataggagccggaagtaagcagatcgaaacgtactaaatctgtacggcggataccttcccaatataattcacgcccgcgttcatctaacaaattacggaaattattttcctctaaccaattttcggaaatgttgtgtttttcatctccataggcacgcttgcgaagggcgttgatatattcaacagcactagccttacttccttctccaccgcgtgctacggcttctgcatacatcaggtaaatatctcccaaacggaacatcggaaaatcagtatctacccataatgtattttttcccggttgtccgttgctgtctaaattgctgaatttgaatacactccatccttcagtttcaaaagttccggatacactggaagtaatgtcgatagagcgtcctttatcataaaaaataccacgtttatcttgaatctcagaagctttgggttcttcatcattttgaaaatcaaagagatgaaccagattgcttgttgcgcggaatcctgcccagccttggtctaccccactgtgtgctagtaaaacatctttgtcttcagctcctctggctccgatgataatggcagccataccccatgattgggtcttgtccccatcaaagatgataggatagattatttcttttttggtatccggattctcgccattgtctgctttgaataaatcagcatagttgtctgccagttgataccctgctttgatcacttcgttgcatgcattaatacattcgctatatcgtgccttaccggtgtaaacttctgcattaagatacatgcgtgctaataaagaactggcaacagcttgatctgctactccgtattcggagcgtggagagggcagattgggtttgatttcgtttagttctgcttctatccaattgaacaggtcttctctagacagcggggcaggttctatggaataattcttttcagtgatgaatggaggcaatgcaaacatatccatcaagatataataggcaaaagcacggttaaagcgggcttgtgcaatataactttctttgtcaatgctttcgggcgcgttgggaatgttctttaagaactcatttaccagtgccactatatacatgcagcgttgataaaccccttcaatgggttccactttattggtagtccatgtcatatagtttacttctgtgcaccatgcatcattccatgcgttcttcatttcatcggttggctgttcttgtaaagtccaccaacagcgtaatagtgcagtatttcctgcatcaaggcctgaaatatctgaactgctgctgccgtcttgtccggataacgcccaaactgagtatattttatgaagtcctttagtgtagctttccgcatcggtataagctttgtctgctgtttccactgtgggatccaaaggtaagacatccaaatcattgagacaacttgaaaaaacaaacaggcaagttgccagagttgtatagatatattttcttgttttcatacgtaattctcattaaaagttaagattcaaacctatagtgtatgtgcggggacgtggccagatgttagaatctatcgctccacattccgggtctaatccgctatattttgagatagtaaatacattttggacagatgcgctgatacgtcctgatagtttggctgcaaacagattttggaaagaatagcctaatgtaaggttgtccatcttcaagaatgaagcattttccagaaaatagtcgctggccatttgttcgctggtattcagcaaggtaaagcctgtatcttgaaaaccgttataaagatttgtaataaatccttttccaccataattgttggaagtgctattgcctgatgccacgccattgtatacataattgccaaagttagcacggagattaaagcccagatcccattttttgtagctgaactgagaactgaaacccatatatactttagccatcggacttttgtgggttagataacggtcggcttcggtaatttgtccgtcattgtttcggtctacaaatgcattttggataggcttgccgttttcatcgtatacttgttggtataaatagaatgttccaggcatttcacctacttggtgtttttggtttgtgccggcatcaataccttggtagtcgggattgaaagtggtagtcagcttggtaatcttgctatcattccaagtgatattatagcctacctcccatgtgaagtctttgctttggatagctatggcatttacattggcttccacacctttatttttcattttacctacattagcggtaatcaagttgataaaattcgttcccgctgcggcactgatggtgtttaacaagtcttttgtatgtttctgataatattcaatactaccgttgatacggttatttaagaatccgaagtcgatggctacattgtatgtagttgtttgttcccattttaaatcaggactgtaaccgtttggcttcaaaagcgtagttcctaaataggttgtattaggattagtgctgaatgaataggatgtgatatattgataatctccaatttcctgttgtccggtcacaccatatcctaaacgtaattttaatttggaaagcacattttctgtagctttcataaagggttcattactgatggtccaagctaaggcggctgaagggaaaagtccccaacgattgttttcactgaatcgtgaagaaccgtcacgacgtaaagtggcagtcagcaaatagcggtccatgaaattgtaatttaaacgcccgaagaatgaaataagatagttttcatacggaatgcgacggtggtcatcacggatgtaatgccgttcgttttcgtcataggtatatccttcttttgcacctaagtcctctgtagggtttgaataggtgatatcatgattggcataatagaaatgttgccaggaataacctgccattatatcgaaattacttttgatggattctatgttttttgcatagttcatgtagaagtccagcaggtggttacgacgcagattgttccaagtattgccttgtcctaaaccggtgaatgttttatctagtgagctttgaaccgaattggaatttacaaaattacgaccggttgtttttgccacgtcatagcctaaattcaagttggcatgtaagtcttccagaccatgtattttatagtccaattgaatattacccaaactacgtttggttgtaccgtgattgtttctatcgtataataaagacaatggattctgagtcgccagatcggcttgtgctccttgtactattccccagttccaatagccattatatcggttttcttcatcgtaaatgggtttggtggggtcaaagaaagcagcggcacctacagcaccggaatctgcaaatcggtttttattgatggtgccttttacattgatgtctacactcaggtggttgtcgaaaaatttaggacttagattgacagcaccggtataacgttcatatttagaagtctttagtgtacctttttctgtattataacctaaagagatacggaaaggcataaatcctgcttttcctgcaattccgatgttttggtctgtacttaatcctgtctggtaaatagcatcttgccaatcggtgctttggttagggtatacgttcagaatccgttggatgtccgccgactgtgcggttccttccggatattgagcctgcattacttcgcggaatgattgtgcgtccaatgtctctatacgtttataagggtcttttgccgtgaaagttcctgagtagctaacttttattttgtcttgtgtcccttttttagtttggatgataataactccattcgaagcgcgtgaaccgtaaatggctgtcgccgaagcatctttcaaaacagtgaaagtttcaatatcattgggattaatggtggcaagtgcattgggagtgcctggagcggcatcatttgaaacaggaattccatcgataacaataagtggatcattgctggcatttagtgatgcaccgccacggatacgaattgtcgaaccggcaccaggggcaccgtcaccttgactaacagaaagtcccggaactttacccataatcagttcttgaggagaagtaacagcacctttgttcatctcttcagctttgatagctaccacagaaccgcttaggtcatcttttttcacagaaccgtatccaatgacaaccacttcatccagaagttctgtatcatcttttaatataatattcatagaagcggctgcctgtgcttcttgagaccgatatccgataaacgaaatgatgataatgtcacctttattggcgtttaacaggaagttgccatcaaaatcggtgatggtaccattagtcgttccttttactataacattagccccgataattggttcacctgtagtatctttgacaattcctttgacaactatttgttgggcaaatgtgttgacggacaagaataatcccacaatgaacatcagtaggactttaaacgtggcgtttcttttcatgtctttgtatataaatgctttaatattattcattttatttggaaaaatacctattgaaaactattcaacctttttacttgcttttctataacctcttaataccttttaattctgatttatcttttacctctttaatgctgattgcataaccaccaccgcttgctgcgtgtaagttcagtttgcttttgttggtcacaatgcctttacggatggtatatgcctgcggattatctttccagtcggcatcttttgcgtctgcatatacagttgcgatgtattttttgtccggatcaaggaaatcaaatatcagttttgaagaatgaccgttctcatctgccgtacagccgatataccagtcgttggttcctttagctttgcgggcgatggtaatatagtctcccggttcggcttccagatatttggtttcatcccagtcaatggctacatcttttatgaattggaaggcatccatgaagcgttcatagttttcaggtatgtcagcagccatttgtaatgggctgtacattgttacatacagggccagttgacgtgccaaagtagaacgtacctgtgaattgttggtaggattcattttgttacaacgggtttcaaagatacccggagtgtagtccatcggaccacctattaatcgtgtgaaaggcaagatggtagtatggtttacgttgttaccgccaaatgactcatattcagttccgcgtgctgattcgttaccgatcaggttgggataggtgcggcatattccggtagggcgtacagcttcgtgggcgtttaccatgattttgtagtccgctgcttttttcaccgcatatagataatggttatccatccattgtccatagtggtgctcaccacgtggaataatgttgcctacatagccactttttacagaattatatccgttgtctgccatgaattggtatgcctggtccatgtggcgttcatagttacgtacagaagccgaagtttcatgatgcatcatcagttttacacctttgcttgcagcgtaactttgaagttctttaacattaaagtcgggatagggagttacaaaatcaaaaacataatctttgctttttccgaaccagtcttcccaaccttcgttccagccttctaccaatacttggtcgaatccatgctccgctgcaaaatcaatgtaacgttttacgttggcggtgttggcagagtgtttgccgttaggttttgttttgttgtaatctgtttcacctagttttacactggataagtcatctgtgtaagcccatgagccttttcccgtaatcatatcccaccacacgccgatgtatttcacaggcttgatccaggaagtgtctgctattttgcaaggttcgttcaggtttaacgtaatgcgtgaggcaagaatgttgcgggcatcatcactaacgatgacggtacgccatggtgaagtgcagggagtctgcatatatcctttgtcaccttgtgcgtccggagtcagccatgattcgaaaatcatgttcttgtcatccagattgaggtgcatacaggcatagtctatcaaagcagcttcgtgcagattgatgtacagaccatcgtctgttttcatcatcagggcagtttgtacaccggtggggctgaatgctgtttgcgaggagttctccgtataagcctttgaaaacaatcctctgatttccgacaggcgggaaacggtatagtcatattcctgtgtatcgtaatctcccggaatccagtaagcagtgtggtcacctgccatggcaaattgtgaatgttcttctttgatcacgaaatagtttaagttcttctgctgcggaaattcatagcggaaacccagaccgtcgttgaataggcggaaacggatgattataaatctgtcattggcaggctggttcaatgtgaccgccaattcattataatggttacggatttccttttcttctccccataccggttgccatgtttcatcgttggtagatgtctggacatcctttagctcgaaaccgttataaaggtttgtcttgatgtccagtttgtctatgtcttttttatcagtccattcgaagtcggttttggcgtttgcgtcttccttctttaattccaatcccaatttactgggtttgataacttccttctgtttataggtcagttcatacgtaggagtgccctgaccatctagggtaaatgtcatctccagattgccatccggagagctcagtttctgttgtgcattcgcaatgaatgagatacagagaaatgcgataagtgaaagattcttttttaatttcataatatgtactggtattaaattataagcttttactgattgttttaaaattctagaactagcattccacgccccgggagtgttaagtttttactcaagtcgatacttttatccgttaaaacatcatgggctgatgttgttggaagtacttctttgtatggagtcaggttaatggtttgcgttttgtctgttccattcatgagaaccgttatcgatttgtttccatattttcgttcataaacgtaaatccctttgttgggagcgaagtgtttcaatctgcctttggctatgatttcattaccttttctccattggagtagtttctgcatataagtaaaggcttcattttgctgcggagtacggttagcctcattgaaacagttgcgtgagtcatttttccaacctccggggaaatcacaacgtaacagaccgtcgccattggctttatctgcagccatcagaatttctgtcccataataaatctggggaatgccacgtgtagtcagcaggaatacaagtgcttgtttgtagcggtcaatattttgcgtggctttttcatttaaataaaagcgtgaagtatcatggttatcaaggaaaacgagcagattcattggatctgcatataccaaatcctgagtaagataatcgtaaagacgatataatccgccattccagtcagttgtttcttcgtcaaaggctttgttcatttgttccatcagcgggaaatccatcacggtacggagattggaatttctgggagcagccagtctgctgtctttctgccagaaagaaactagcacattactgttcaaccaagtttcacctactatgttgaaatcagggtactcatcggtcacggctttacaccattctgacatcatgtcgaaatctgcgtaagggtgtgtgtcttgacggatgccgttaatccctgcatattctatccaccagatactgctttggatcaaatagcgggctacatggcggttgcgttggtttaagtcgggcattgattctgtaaaccatccgtctacggctatcttgcgttcataatcagaagcgtggatatcctgtacgctcgctgttttataagaagtttgtgtgtagtttcctttaaaattgaaccagtctttggaaggcatatctttgaaaagatagttttcgctgccacaatggttgaaaatcatatccataacaactttcattcctttactgtgtgcttgttctaccagcttgcagaattcttcattgctgcctaatctgcggtctacttgataataatcggtaatggcatagccatgataggatccttctttcatgtcattttcctgtatggggttcagccagattgccgtaactcccaagttggagagataatccagattattttcaatacctgcgaggtcgcccccgtgacgggcgaacggatcgttgcggtctacctttgcttccaacatttccggtacgacatcgttcgagggatttccgttggcgaagcggtctggcataatcagatataatacgtcacccgagttgaagccttccacgttggaagcatctgccttacgctgttttatttcatatggcacaacagtttgctttttaccttgtttcaatgtaatatgaaaagtctgcggagtagcttccgataaatccatatataagattaggtaattgggattttcttgtttcacaacatctttcagaagaatgtctttagaagagatgcttacatcactggaagaaatattgtcgccatacagtaggatctgtagttcgggattcttcatatccgcccaccagaaggttggggctacttttttaattatggctgcggacactgtgtgttgcaaaccgaataacgcgagtaatgccataagtgcgaatgttcttttcataatatatagaaattagtgtttatatcttcatttcatttggatgttgcaaatgtaggagtggaatagatgagatttgagtactagaataaaaatataaatgttttatagactcaacttattgataactaggtgtatttatctctgctgtattgctgaaaatataaacgtcaatgaaaatattttcgttgaaaaactttattctaattacttatatttatatatttgtgaatctataataagtatataagatgaagaatgtaacctatttctttatattgtttttgttgattttgacacctcctttgtttgctgataaaaacagcaatgaagaagtgttgaaaaggttggatcggatcattgataataagaccgcttatcatgtgcagaaggaaaaagagattgtggatttaaagcaacgtcttcaccgttctaaagataatagggagaaatatgaactttgcggttctttgtttaacgcttatctgcattatcaagctgattccgcattgtattatattaatggaaaaatgaatttgttgcctctgttgaatcatccggagttaaagaatgagattgtcattaaccgtgccgaggtgatgggggtgatgggaatgtataacgaggctttggaacaattggagcgggtagacccgttggaattggaacgggaaactttggcttattattaccggacctatcgggcttattatggttgggtggccgattataccaccaatgatgccgaaaaagtgaaatatttgaaaaagaccgatgcttacagggattctattcttattgctactgatccttgtgtagacaggagcattgtatgggccgagaaaaagattattaatggcagggtggattctgctttggttatattgtcggacctattgaaagaaacgccggatgaacggcaaaaagggtatatttactatactttatccgaggcttacgatatgcggggagatattcagaaagaaatttattatctggccttgaccgctattacagatttgaaatcgtctattcgtgaatatgcatccttacagaaattggctcaactgatgtatgaggtaggtgatttggaccgtgcctataagtatttgaattgttcaatggaggatgcggtagcttgtaatgcccgtttgcggtttattgaggtaacgcagttctttcctattattgataaagcatataaattgaaagaagaaaaagagaggcagatttcccgtactcttttaatcagtgttagtttgctttctttatttttgcttgctgctattttttatctgtaccgatggatgaagaaattatcagtgatgcgccgtaatctgagtctggctaatcaacagatgcaggaagtaaatgctgagttggcacagacggggaagatcaaggaagtatacattgcccgttatttggacagatgtgtgatttatctggacaagttggagttttatcgtcgttctttggcgaaactggcaatggcctcccgtatagacgatttgtttaaagcgattaaatccgagcagttcatacgagatgaacggaaggatttttataatgagtttgataagtctttcctggagttatttcctcatttcattacttcttttaatgagttattggtagaggaaggaagaatatatccaaaatcgggcgagtcgctgactacggaattgcgtatatttgctttgatccgtctgggagtgactgatagtaatcggattgcccatttcttggggtattctttggcaacgatttataattatcgcagcaagatgcgtaataaggcgataggaaacaaggaaacttttgaacaggaagtgatgaacttgtagagatagagatatgattacaataataccagcaaatgtaatataagtgtattcattgttattccgtgcttcagtaagtattagctctaaccttgggcgtttggtcgtatttattctaaatgtggcaagttccccaaacggatagcattacttgtccaataacacaactgattttagaagatgaataagtcccgccttgggcattgaggataggcaagtcgaatatcttttcagttaacttggtctcgaaaccttctaattgttgaaattggaaagcacctattttgtcctcgttattattattttctattttgttcaggtacttgtcattttcttcataagcagcaatggcaacttcataaatttcaaaccatgcctttgaatcttcgaccattaaatccataaaacagagagtgcagcacctatgtgagagataaaaatagcaccacaactagtaagcttccaataagtgttcagcgtatcttcggagatgtctttggtagaaaatagtaacattgatagcatatctatacaggtagataaccataggctgaaagacaaaatactataaatgtaataggagagatagagtattgccataggtggtttatttcaatattgcggtaatgtcggtaggtgtgataagtatctttgtaaatcaatggaatggattctgtaaatacgacctcatttgtcattttgatttctttaggaacggtttttgtcatcgaatcgctgatgctattgaatgcctgataaaaattattggacatagtactgattgtttggcataaataaaaaagcagagagagaatgagagttgaataactcaaaataattctctctctgcttgggagtagttctacagagaggaggatattaaatccttatctctgtgtgtttagactttgattactgtgccggatagggagtcaggtttacagtaatggtgtcttctactttttcatttgttgaagtagtgatagtcaatttcactttgactggggttgctacagatactttgtttgcatcaccagcatttgctgtaagtttaatatctttaccgtttatatttgctgtcaaatattgggtatatttagcttcgacttcgcaaactacattttgaatatcatcttgtgttccagaaatgttatctacacggtaatagatgttcttgtcattcttatcagcagctttaccatatttcacagttactatgttaccactaccagagatgatagaaataccagcaggcataactgttgtatagtttttgctttcagcaaacataactttgaagtcagcaatcgggaactgtacgcctgcataggtaaccttaccacctgttaacgtataagccttgttagtttcccctttttcagttaatgtgatagtaccgttgtcactaacagcaatcttgtcagcatcatcttcaatagctttgtatccacttacagttccagcagagaaaatgttggctttagtgatttcactagcataaactgttacaatcttattcaaatagtatgacgggttaaatgtataagctgctgccaatgttgcatcgcttggcttttcaatagtgaacggcaagttaataacagcaattgttctgaaataattgactgttccaattttaacagctgcaacaacatttaccttagctgtaaactcaccaccattttcaatgattttggctaattgactaccgtaatttgtgttgaagttaactttgatacctgctatttgggctgcttcagttgttgttttaccttcagagtcaacagtagcgatatcctttacaagatcggttagattttcagtttctatcttgcctgtttcagcattttcatatacccattctacttgggggtcaagtaccatttctcgatattcagcattccaaacgacacgtttgtctgcacccatggcatcgaagtagggctttaagtcagagataaatgcttgttcagcagtttcagtcacttctgttacaacatgcttcttgcttacgatagaagtaatttcttctgcatcaggagttttttcattaaagttcaaggttacatcgtgagatttaaccttaccgaaaacattcatataatgaactgtaaagttaacatatcctgcagccttgtcattaagattgatagtcatgccatcgaatgatacgccataacggatagagtctgcttttgcttgagcatcatcatccattgtgatgtatgaatcgaatagttgacctgccaattcttttttagggacaattgttacagattcacctggcttagcatccacgtatgatgtgagataagtatcaccttgctcattaatctggtatttaccgaattgaatattaacatcttgggcatccaccaaactaaatttaaaatcaccattgaatggagagtaaacattttcgttaacaaccaatgacgctacagcattgctattgccgtatgattcaactatttcatcattaacagtaataccttctacaggaatttcatacaatccggttgtagaagctgctctgctgcttaatactccagtaaaaggaactacttttcctaatttgataggcagttcttcacctttagagtttacagccttaacggtttttcctgataaatcgtaagaaaccggagatatctgaactataatagaactggtggattgtcctaccatatattcacctttggcaggtttttctttagaaccaccttcccatttcggccatgctgttccttctttagcaatgctataagcaatattgaaattgttttccaatacagtaatctgagccaatccttcgttcaagggcagacgaacagatttttcattcttaccgtctttgtcacaaacaaccatgataacgtagttgttaggatcagtaggatcagcgtagtagtaaggaacatttgttgcaggagtagcaccggcaaattcttcaaattctgtaccgttccacaaataccacttgccgttttcctttttcacttcaggctgagcatccttgcctggttcaccctgtgcgccgtcctggcctacagctttaacggtagtcttctcaccgttgcatacccaaaaaccatcttccgagatagtccattctgtacctgcagcacctgcttcaccgtccttaccgttggtaatggtgtagctgctaccgtcattgaaagcaacagtgaaaccgcctgtggcaggagttacagaagtaatccagttggcagcattgatttttgcttccaggtctttgatttgaccttcaacgccatccacgcgcgaagtcagctcgtcaatgtcatcatcgtagtctttacaagacacaaatgttcctgttgacgaaaccattaaggctccgaacaggattgcacttaaaaactttttgttcataatagaaaaactttaaatttataaatttaaaaaactaaaattggttatacataccatttattataaaaggacttaattgttttcctcctgtttcagcggattcctctcgtgtgccacatactgccggggcgtcatgcccgtcacttttccgaacgccacatagaaagggcttttcgaaccgaagccgctgcgtacgggaatttcctctatggggcatcgtccgctgcggagcagctctttggcgtattccactcggtaagtgtttactagttctttcaggttgcagccgaaatagcgattcaccacattacttaaataagtctggtttgtctccagcatcgcactcagtgttttcagcgaaagagaggaatcgaggaatacttgacgcacttccatcaggtataatatacctttatatataagagcgtctatccggcggacgtccgtccgcaacgcaaactccttctcccatcggcgagaggcggcacgatagagcaaagtcttttggcgcaccgaagtgtagcgggtctttttacgtcgcagaaacaggtattccattcaattcttttttcgttttttatttgcttattttgtcgatctcttagtaagagatcgacaaaatagatgtaatatgcataaaatcaaataattaaatcaatgagaagtgggctgttgatagaaagattaaataagaaaaaaggcttttttttgctttagatcgtatttttttaatgaaaagtgtattagttatcaaaactttccttatttttgcacgagaattatatatctcttactaagagatcgacaaaaacctatcttgtattttgtagtctaaacaggtaaaaatcaattatttatctcttcgttttattatatacttgggcgcagaatataactcatgtgtcagaaatgagtaccgctttgtactttattatatggcgtctgattttttctatcggcatccagaattcatggagaagttggaataatgctggacggaatgaagatgaatgtgtcaaaaccaaaatgacagctttgaaaagttacagatagtaattataacgcgtaaaagggtcgtatcaaactctgtattgagtaatgatacgatcctttctttagtcttttaggatgctcaaatttcagattataagttcatgttttcaaaaacagagttttgacaccgcggagtgaatttcagcttcaggaaacagaacattgaacggtggtgatggaatgagcatatattactttcgggaaacgctttacctctctttgataatacttacacagccggcaccgataatcaggaacactcccgccaataccagcatgtttacttccggagcgacactacccggactggtaaacattttcagtacgatacctcctaaagaagctgcgacaatctgtggaacacaaatagttccattgaataatcccagataggttcccatatgtcctcctgttaatgcattggtcagaatggtaaagggaagggccagcatggctgcccatgcgcaacctatcaggatgaaggatgcaaataaagcatattgattatggataaagaaaatagagataaatccaatgcctcctaataccagactgagtacgtaggcaaatttgcggttctgaatcatcgggatgatcgttgcccaaataacggaaccgatggcttggacagcaaataagatcccgacccaatctcccgctgtctggtattgtgcggattgtgtatccagtaccactctggaaacaccgtttgtcatggttgttatgaccggtgtgtcgaacacattcaaagcaacagttccattggtgtaagtccacatgaacatgaaggctgcccagcagaaaaattgtaccagtcctactgtccaaaaggctttgggagccttgaccagcaatttgaacatatttgtcttttcttttttgctttcatgggtgatgccatgatatgctgcatattcttcgggaggaaattcctttactttgaccgaagtatagatcacacatagaatcagtatcaatgcgccgatatagaaagaatagatgacagagtcgggaataacacctttgggagcaatattactgatgccgatggcggcaaaaataaacgggaaaagatatcctgccagactgccggcattacagagaaaactctgaatggagtaagccaatcctttttgtttctcattcaccatatcgcccaccatcatcttgaaaggctgcatggtcatattgatagaggtatcaaggaacatcagtgatatcagaccgaataccatagctgcactgactgtcattccgaaactacctgcattagggagcaggcacatgacgcaaacagcaaccagagctcctgcaaacagataggggatacgccgtccgaaacgcgtccaagtgcggtcactcagtgcgcctatgatgggttggacgatgattcctgccagcggaggtaatatccaaaaatagcttaaactgtgtgggtctgctcccaaagtggaaaaaatacggctgatattcgcgctttgcaaagcgtaggctatctgcacgccaaagaatccgaaactaatattccatagtttccagaaacctaaatcgggaatttttttcatggtatgtgtgttattgattatcgttggggtagagattcaccacagacggccccaggctgtctgtggcggatgtttagaatctgccggcagtgtcaatcatctctaccagcttttcattgaacttcttgttctttatcagttcttccaaagtgagatgcatgcgatatctccagtaatgtcttggattggcaggtatgttgatacgttccgcgttcacatcgggatagcggatttcttcgtctattgacagccagtcctgaaaggaaaggatacacagcaatgaaggacattccagatggtggcgtactatttcctcgcaaacccatcctggggctgaaaccggaacttctccccagtgtcccattacatggttgtagtagcggcaggtctgttcataatcttcttcccaccatccccgcagagtagacatatcatgagtggaaatagtacaaactgagcggtacggatattcccacacgtgaccgaactcatgtttgggattcttgggcatacgttggatttccagactgagtatttgcaactgatccattacccaaggcacacagtcgggtaccattcctaaatcctctccgcacaccagcatagaagtggcttgtgtcaggataggcagctttttcatcgcttcctgataccagaactggttatggcgttggtaataataatgattatacagacggttgaaagcgtctttctccttccagttgaggcgcccgaagatgaaatcattctgaacggcaattcttggatgatacatggatgggtgtttgcggtcgggaacaaataatacattgcttatcaaggcatatactccctcgcgtatatggatactttcttcatctttcttatcggagaagtaagtctccactttgcgttgggtatcatattccggacgcatttcataaatgtcatcgtgaacatgctgtacgaatgtttcttttacaaaagcagctttgtcaccaaacatcttgtttagcatctcttcgttgatgaacggtttggtcatgaagtccttttggaacggcagcccgtaactttgaatttcgtccacactcataggcaatgccggtacaaactgtcccagcaaaccatgtaccgaatgagatggaatttcccagatacggaagaaaccaagaatatggtctatgcggtaagctgtgaaatactctgccattttgcggaaacgcttctgccaccattggtagttgtcttgttccattacctcccaattataggtgggaaagccccagttttgtccgttcacggagaatgcgtcgggtggtgcgcctgcctgaccgttcatgttgaaataatacggctcaatccatgcctccacgctgttgcggctgatgccgatagggatatcacctttaaagataatacctttttcgcgggcatagtttcctgcatcaagtaattggatatgtaaatggtactgtgtgtagtagtaaaaggcgatttcttcataacaagagctgtccggtgcgcataaggctgctatttcttctgccttgtactctgtatgctcaggccattggctgaaatccggagtaccatacagatctcttagatagctgaatgcagcgtatggcagcagccaatgttcattctcttcaaagaatcttttgaattcatccgaagccagcactttccttccggtttgttggaacatcactttcaagtaggcacgtttggcattgttcactgcttcataatctatttgaggaagagcgttcaattcttgccggcgggcttcaaaaacagccagcgcttccttatccttcatcttacccagctggttcaagtcaatatacatcgggtggaatgcataaatggaaatgctgttgtagggataagaatccatccaggtatgggtaatggtcgtatcgttgatagggaggatttgtacagcttgctggtgggtctttgccgcccagtctatcagtttcttcaaatctccgaaatctcctactccaaaacttttctcactacggagagaaaatacagggatagccgttcccgccactttacgggccgatgaagtgaaatgaacttctgtttccggtgtcaggtagatttctcctttttttaattccggattattaagcatccggttgtcgtggttctcccattcctctacctgcttgctgtcggcgttgcaggttacgaacttataacttagcggaaattccaaagtagaaacattcagtgtgatggtccactcgttaggctgtatttcttccatcaggacagtcttttgaatatcccaattgcctaaagccgggcaatccccgctgatagccagcacttgatgcttatgatgcaggcaagggcataaggcccggaaagtaatgcttccatcggcgcttgctgtgacttttatagctgcttcagactgataatcaccactgaaggcggaactgtataagtaagattcagccggaaggtctttccagaaatcatttaatatgtagtggcagtttttctttttcccgggacaaaacaaatgagccatggttccgctttcacggcggatgcactgtccgtcacgatatactccatagcggtaggaaacaggtacgcatgcagggagatccggcatttcagcttcaccttcccaatgttccccgtttggagtgcgaaggatgataggttcactattgtttccgtccagtatcacccccagttcttctccccaggctgtacggtattcaattcgaaatgtgagtttcatgttattatttgagttaaatggtttaatgtcccaaaattaagactttctgtcagaatatcgtctttcatccaattaatttataagaaaaatgaatgaggttatgtttgttaccggcggtgaactattacaatttctgcccatttcatcgaaaaaaagagtcggtatgagtatctgtttcttcgggcatttaaaagaggaaaaatataaatgggggcagattgattttcattgataaaaaagccccgatccagagaaaagcaggatcggggctacctcaaattgtaagatgtgaggatggattttgattaaaaaataatgaatgaaaaattacgcgtctatattcgcatatgtcgcgtttttctctatgaactcgcggcgtggagctacatcgtctcccatcagcatggagaagatataatctacgttggcggcattgtcgattgttacctgtttcagaatacgcgtttcagggttcattgttgtttcccacagttgttcgggattcatctcacccaaacctttgtatcgctgtgtatggattccgttttcttgtccgtcaccatatttttgaatgaatgcctggcgcgcttcttcggtgtagcagtattcactgatttttcctttgctgcatttatacaatggcggattggcaatgtacaaatgtccgttttctataatttccggcatatagcggtagaacaatgtcatgataagggtgtcgatgtgagaaccatcgacgtcggcatcggtcatgatcaccactttgtgataacgcagcttgtcgatgttcgcttttttgctgtcatcatttccgtccacaccgaaacggacacccaaggcggtgatgatattattgacctcatcgctttcaaaagccttgtgccacatcgctttttctacattcaggattttacccctcaaaggtagaattgcttggaaggcacggctacgtccttgcttggcagaaccacctgccgagtcaccttcgaccaggaatagttcacattcctccggattacggcttgagcagtcggccagtttacccggcagtccgccaccgcccatcggactctttctttgaacagattcacgtgccttgcgtgcggcgatacgcgctgttgcagccaggatcactttgtcaacaatctgttttgcttctttcggatgttcttccagataatatgtaagcgcttcgcctacagcttggttcacggcaccactcacttcgctgttacccagcttggtcttggtttgtccttcgaactgcggctcggctactttcactgaaatgacggcaatcaagccttcgcggaagtcttctcccgaaatctcgacttttgctttttccagtgctttggtatcttccgcatatttcttcagtacacgggttaatgcgctgcggaaaccggcctcgtgtgtgccgccttctattgtattgatattgtttacatacgaatgcagactttcacgatagcctgtattgtacatgatggcacattcaatgggggtattgtttttttcggtattcagataaatgacatcatcaatcagcgcttcgttgttacggttcaagaaacgtacaaactctttcactccttcgtccgaatggaatatttctttcttgaagctgccatcttcttctttgatccggcggtcggtcagtgagatggtgatacctttgttcaagtaggccaactcacgcatacgtgcctgcagaatatcaaacttatattcggtaacagtgaagatggtatcatccggccagaaagtctgttttgttccggtaatatcagctgttcctacttcttttacagaatacaaaggatgtccgcagctgtattcttgctggtagatcttgccgccgcggaatacctgtgtggtcatgtgagtagacaaggcattcacacaagaaacacctacaccatgcagaccacctgaaaccttgtaagaacctttgtcgaacttacctcccgcgtgcagcacggtcattactacttccaatgcagatttcttttctttttcgtgaaagtctaccgggataccacggccattatcctgtacggtaatggaattgtcttcattgatggtgacttctatatgatcacagtagccggccaatgcctcgtcgatagagttgtccacaacctcataaaccaagtggtgcaatcccttttcgctgatgtctccgatatacatggcgggacgtttacgtacagcctccaaaccttccaatacctggatgttactggccgagtaattgttttcgccgtttatcttttcttcttcactcatgtttgattcaattatcttaaatattagctttcaaagatacgaaaaattgctgagacaggcagcttttatggactaaaaaacgtaaaaaagaggggattggacaggtttggaatgaggtctgtccgtgaacgccgggaaaagtatgggagtgatgtatttatttcgagggtaagtcttctggaaattaatgggtctttttttccttcaaatccttcatcgacgcttaacaggctttttatcagtactttatcatgtacgatcctcttctaaatccttcatgaatgcttcggattcttcagactctgtttttcgcggagcgaggatttgcgcttcttttagatgttacgtttgcaatatgtattgcttgtgttttatgaagcgcataaaagacaaaaggccggattaaaaaatcctgcctattttatcttttagtttaagactttgcttaagcaagtttgctaatgtaagcagccaattttgacttcaagttagcagccttgttcttgtgtatgatattggtcttagcaagtttgtccaacatcttctgaacgcccggatacattgcaacagcttctgccttgtcagtagttgcacgaagttttttaacagtgttacgcattgtttttgcataatatctgttatgaagtcttctcttctcttcctgtctgattctctttaatgatgatttgtgatttgccatctcgactaatctttaattttgttcttttattatttttatttgtagcccgtgggggaatcgaacccccctttcaagaatgaaaatcttgcgtcctaaccgatagacgaacgggccgagccttgattctgccgagccttagcttggcttgctttcggagagtgtttttctcttttgcggttgcaaaggtaggaactctttttgaattgacaaaacattcggcatattttttttataaatacgtgcattttcatctaaaaaccttatttttgtatgttccaaagatacatatatttgtgtggaaaagcaaaaaacgtattccggacaacgattatctagtatataaaagagagaaagagtatgcttcaaaagacggtgggaattgtacttcataccttaaaatataatgatacttcgaatatcgttgatatttatacgcgcgagaatggccgtgcttcttttcttgtgtctgttccccgttcacggaaatcggcggtgaagacggtattgttccagccgctttccatgatagagtttgaagcggattatcgtcctatgtccaatttgtatcgtataaaagaagcgaagtcgtggcatcctttccgcacgttgccatacgatccttataaatcttccattgccatgttcttggcggaatttctgtatcgtgctttgcgtgaagaagcggagaacgggccgttgtttgcttatttggagcattctatccggtggctggacgaatgcgacagaagtttctccaattttcatttggtttttctgatgcgtttttcacgtttcctcggtctgtatcctaatacggaggattatagggaaggatgtttttttgatatgctgaatgcctgtttcgtgtctgtccagccattacatggtgcttttttgaaaccggaggaggcttcacgtatcaaccttttaatgcgtatgaattatgaaacaatgcatctttttactatgagccgtctggagcgtaaccgctgtctggttattatgaatgattattatcgtttgcatctgccggattttccggtgctgaaatcgctggatgtgctgaaagagttgttctcgtgaaatcctttcttatcaggatgtgttcatgtttcgcgccttttttatctatcgtttcactttagtgatgaagttgtttcactggaatgatgaaatctcatcactagcgtgctaaagcttcatcactaaagtgaaacgataaatgaagcgggaagcaaatgggtattcttcctgtcttgaaagttaagacggaaagcaggtgcaatcttttgaccacgatattgtatgactcatctttgtcctttagcatgatggtcaaagacatcggtccggtgcgggtgttgtggcggctgaaggtgctgacagcgtactgaaggagctactgtcagccttatgcgctgtatatcagctttttattgtggctgaatacactgaaggatactttgaattccagggcattggtgaagtgagaatgataaacggaaaaagtttaaaatgataaactagccttttatttgcttgggaagctggatagggtactgcatacgtttgcttctcactgattttataaaaaacgaaacttctgtccgtaaagatgaatcggggcagaagcttcgtttcttgaatatggattgccggagtattatcccagtaattctttcactttagccgagatggcacgtccttcggctttgcctgccaactttttggtggcgacgcccatgactttacccatatcctgaggaccggcggcactcacttctgcaataatttcttttaaagccgcttccagttcttcgttactcatttgtttgggcagataggcttcaagcactgccacttgggccagttcggcttctgccaagtcggcgcggccctgaccttggtaaatggcggctgaatctttcccttgttttaccagtttctgcatgattttcaatgcagcgtcatccgtcaaagtgtcgttggcgcccggtgctgtctttgcttcaaggaagaattttttcacattacgcaaagtttccagtttcactttgtccttggctttcatagcctctttgatatcgttgctgattacgtcaaataaatccatagttcttttctattttagttgttaaaatgtgatcgttattccgccgttttcggtatcgttattgaacgtttcctcttcttcggctattgctttggactggatactttccaacacagttttggtacgttggaaagtaggggttgtttccaccatactgataatatcatcattgtccagatcctccagactgaagatgtaaatgttgtggcgtttcttcttgttgctgttcttgaaggtgtctttgccgtagtaatctccacgacgttcatctttgcgctgttcctcttcctccagctcttccagtttcttttgttcctcaatggtgcgtttgttcatcatgttgtccatgcccggtacatccttgatgccgaaaccggtggcaagtacggtgaacttcacctgctcttccagcgactcgtcaatatagagcccccatttggtttccacgtctttgccgaatttactcatgaagtcatgaacctcattcatttcttccatcatcaactcgctcttggtgctgaaagagatgttgaacaggatcttcttcgagttgaagatatcgttgttgttcagcaacggggaatggagcgcatcattgatagcctggctcacacggctttcccctttgccgtatcccgtactcataatggctacaccaccgtcttttaataccgttttcacatcattgaagtccaggttgatggtaccgcggatggtgataatctcggcaatactcttggctgcgatagataaagtgtcatccgctttgccgaaagcgttcatcacgctgaagtccgaataaatatcacgcagacgttcattgttaatcaccagcagggcatctacatgctggctcattttctccacgccgtccagtgcctggtcaatcttccggtttccttcaaaaaggaacggaatggtgacaatacctacggtgaggatatccatatctttggctgtcttggcaatgatcggagccgcaccggttccggtacctcctcccattccggcagtgataaataccattttacagccgtcgttcaacattccttttacatcttctatgctttcttcggctgcttcacgtgcacgctccgggcggtttccggcccctaatccttcttttcccagttgcaacttcacgggaacgggggattcggccaacgcctggttatctgtgttgcacacaacaaatgttacatcgtgtataccttctttatacatgtgatttacggcattgccgccgccacctcccacaccgattactttaatgatagtcgggttttctgccgggaaatcgaatggcattatagtttcatcagacataatcttctatattatattaaggtgatgtaattcgttattattcttccagaatctttccaaacaagtcggtcagccgtttgatcggactgttggcttctttcaaactcttgatttctttttccaggtcgcgtatttggttcaaagcttctgttactcccaaatcgcgtgctttggccagttgcgacagggcatttttgtatttgcctgcctctttcagttcttttgcgtttcttatcaggttctcgcaagtggcttttcgcagcttctcctcttcctctgctttcttggctgccgctgctgctctggctgcttcttctttctctcttttccttttgtcttccacattctcgccgctttcatcgaagagaggtacttgtacgggtttcataggacgttccggacggtaacagttttcttttccagctcctagtaaagcgatgatcgtattgcatgtaccatcttttttcagttccaccataccgcctttcagacttagctgactttctttggccattctaaccttttctattttggtacggttactgaatgcttcctccatattctttagattggcggcaccaccggtaatgatagctcctgccagcagtttgtcttcatatcccgaaagaacaatctggttccatacattggccagtatctcattgatacgtgcttctacgatgtcttccagtaagtgtgactcaatactgcatttcccgtccagcgagtaggtagggttgtcatctccgtcctccgacttgtcggcataagcattgccgtatttctttttcagttcttcggcatcttcctcttcaatttgctggctgcaaatatctttggtgatgttgctgcctcccaatgggatgactgccaaatggcggagtatgttgtttttgtaaacagatacagtagtcgtatctgcgccaaagtcgatgaacatgcagcccgagcgtttttcactgttggtcagtacggcattggccagggccaacggtgagatgatgtagtcggctatttcgattcctgcctgtttgaaacatttgtcaatgttctgcttcacgctgctgcgggcgatgatattaaggaaacgcccttctatatgatcgctgggaactcctacaggatcggccagcaggttgatgcccactttatattcctgaggtgctacttccagtatttcctggtctatgatggggacttcgcggttgctgtccataatggagtcaatcagttcctgtgaaatcttggtttcttcttccagatgacgcacctccgtattacggatggtgcgtagagattgtcctccgatgcctacatagacctttccgatagaagcctttaatgtcgattccagtttcttgataatcgaagtaaggctttgtgcggttttatccagattgtaaatcactcccttacggataaaatccgaagagttttcgctggcgagggccagcacttgtatgcttccgtccgcatgtttctttcctgcaatacctgtgatcttggaggatcccagttctattgctactataaaatctgttgctgccatatcttacttctcttttttagtacaaataatctgattattaaattccagactgatgcggctgtacttgttccagcctacttggttcagtcctttctcataaaaagtttttagtttctcgaacttttcctcataattcccgggcttgcctaagaatatgatatgttcaccaactcgtggaaccagttccagttctttggcctgtgtcacattgatctgctctatctgggcatcccatagcggatgggcttgtagaaaggctcctaacgtatatagttccttgacggcaaaatcacgatccacgtatcctgtaacaacagctacgtgtgccgaactgttgggtatcggcataatttttcctttattgtcaatataatagttgtctccattgtttgccatcactctgaggatggggaggcgctgtgtcacttcgatacctattttgcatcccggtgtacggtaacattccacattttcaatcaagggatgttggctgagttcttcttccagcaggcgggtgttgatgtcgcccatcttcttgcccacgggggagagtttcttaccgttcagtaagcggagtacttctttctggctgatgaagccatggtctatactgtccttgataatcaattccatacccttgcaaacctgatcggcaggcttggtgttgaaagcggtaacggctacaataaggtaggcggttatcagcaacagaaacaggagtatgagaattttctttatcatcttttattcagtaatccgcagatttggggtacatagttatctatgtcgcccgcacccagggtgattaatacttctatatctttcttgctcagtacgtctagaatttcttctttcttgcacatgctcttctcgatgcccggacgcagatggtcgtaaatcagtttgctggtgacgccggggatgggttgctcgcgtgccggatagatatctaccaggatgacttcgtccaacaaggaaaggctgtcggcaaaatctttgtagaaatcacgggtacgtgtgtagaggtgtggctggaaaatagccgtcagcttcttgtcccggtagagggcacgcatggagagtatgctttgctttatctcggaaggatggtgcgcatagtcgctcaggaaaactaccttgtcgttctttatcttgaaatcgaaacgacggtctactccgcggaaacttgccatacctctctttatttcttcatcggtcaatccgctcatctgcgctaaagccatggcagctactccattctctatgttgatgctgacggggacacctaactgtatattggggatatttcccagtggtgatacgtaatcaaagaaaatctcaccgtttccaatacggatattctctgcatgaaagtcaccctcttctttagaataggtgtacagcttcacgccattctgcaaggccggttgcagttcgatgcctttgcgtacaatcaatgcacctcccggctggatgagtgaggtgtatttgcggaagctttccagataagcctctttggttccgtagatatccaggtgatcgggatctgttgcggtaatcaccgatatgtagggagagagccaatggaaagaacggtcgaactcatcggcttcaataaccatgtattcactactgtcagacaacagcaggttggtgccgtaattctttgagatgcctcccaaaaaggcgttgcatcctacatgggattggtgtaacagatgggctgtcatggtggaagtggtggtcttaccgtgagtgccggctacacaaagtccttttcctgcatgggtaagcattcccaatacctgcgaacgtttatgtatctcgaaaccgttttcccggaaataggtaaactctttatgtgtgtcggggacagccggagtatagacaactaatgtagttgccgggttgcggaatgcatccgttatcagtcccgtgttttcttcgtaatggatggctgctccttcttctatcagcttttctgtcagttcactgggcgtacggtcatatccgcctaccttcttgccttttgacaggaagtagcgtaccaatgcgctcatgccgatgcctccggcgccgatgaaataaactgattttaatgtgttaacgtccattttcttttctgtatttatcagccagtttgaatacctcccgggcaataacgttggctgagtcggtaaaggctaatttagcaatatttgtacttaaacttttcagtgtttccggctgtttcacggtttcaactgctttgtccagcagagcttctttggcagcggcgtccttgatatagagcgctgcgtttttattgaccagcgccagtgcgttcttggtctgatgatcttcggccacattaggcgacggaaccagaatgacgggtttctgcaacaaacagaactcagagatagaacctgcacctgcacggctgattattaaatcggcagcactgtatgcggcggccatatcactgataaaatcggttacatggagcattggtaactcaccggcttgggctactgcggcgcgtgcttcgtcgatatatatttttccggtttgccagataaactgcgcgccggatgttttaatcttgtccaaaccttccatcacgcagttgttgatggtgcgtgctcccaagcttcctcctacaatcaggattgttttcttggatgggtccagcccgaaagagcggatagcatcttcacggctgatgtgatggttgcgcagtccttggcggacggggttgccggtcaggataatcttgtctttttcaaagaaacgttccatgccgtcgtatgccacacatattttgcgggctttctttgccaatagtttgttggttactccggcataagagttctgctcttgtatcagtgtcggaatacccatcatcccggccattttcaaagtgggaccgctggcatatccgcctacacctactgctgcatgtggcttgaagtccttgatgattttacgtgccaatagctgacttttgaccaatttaaaaagaaccgaaatattttttaataagttcttacggtcgaatccggcaacaggtaatccttttatagggtatccggcagcaggaacgcgttgcatctccattctgccttcagcacctacgaacagaatttccgcttcgggatgttgttccttgatggcgttggcaatagagactgcggggaaaatgtgtcccccggttcctcctccgctgatgatgattcttaaattttcttccataattcctttttagtcgaattattcgcaaaagtataaataatacttttaaaatgaatggtttatattatatttcttcttccggctcccgcttcccggccgcattcagtaatgccttcaagtcatcggacagcgagttttcctccgacgggagggaagtggcggctgtgtcacctgacggaagtgtagtaatggcttcctgcatggcggctactatttcctggcgccgttcggccttggctgccagttcggcttcttccaacgcctgttgctcggcagctttcttctcttcttgctcagctacgtagcggctgacacttaatatcataccgatgtaggcgcagttgatgagtgtagaggttcctcctttgctgataagcggcaggggttgtccggtgacggggaacagacctacggccaccatcatgttaagcatcgcctgagataccagtagcagggcgatgcccatcaccagaaaggcaggaaaacttttttcacttcttcgggctattttacccgcccgcatcaacagccagatgtagaggatcactacaaaggcgcctcccagtaatcctaattcttctatgacgatggcgaagatgaagtctgagaacgcttgtgacaggaaatcccgttgtacactgttacccggcatctttcctatgatattgctggaggctatagcaatattggcgtgtgctatctgggcatccttgtctatatcatatttggcagcaggaacggcttctttatcctcgaagaaacctttaatgcggttctgccaggtttctacacggtgcatcatgggaactttgttcagtttatgtgtaggcataaccatcactatgcctacgaaaagtatcaccacgactccgacagttcccattaacttggccaactgtttccaaggtacccggccgatcaccatcattaaaaagactactccgaacagcaatgctgcggtagaaccgttttcgggagcaatcagaatgaaaacaactccggtgatccacattatatatttgaatgctttcggattggcgttgtcttcttcctgaaacttggatagaataaaggcggtgacaataatcacagccatttttgccagttcggaaggctggaactggatgccgaaaaaggtcatccaacgggctgcgccattgacacggtctccggtaatcaatcccatacccattacaaatatcagcaaaacagccgatataggcagcaggaagaagggaagtacacggaaatatttgcaggggatgttatgtaccagcaccacaatgcacacacctaccatcaggatgacactgtgctgggtgataggcccccaatgatccccacttttgtaggtaagtgtgctggcggcactaaatacctcgacgatagagatcaggcaaagaaacaggaaaataatccagattactttgtcgcccttgaacaagtcttttatcagatccattatctatataccttaatattatattacaggtttcttacacattccttgaactgctcgccacggtcttcgtaacttttaaaaaggtcgaagctggcgcagcaaggacttaataatacggtttcacctttcttggccatccggtaagcagcatctacggcatccttcatgctttgtacatcggctacaggcaggccgaacttgtcaaagaaagcatgcaatttctcattgtgtaatcccatgtagatcaatccggtacatttttcttttaccaagtcggcaatttcgttataatcgttgcctttgtcttttccacctaatatcaggatggttttggttttcatgctttgcaaagcataccagcaggaattcacattggtagctttggagtcattgatgtaatctactcctcttacccggcagactttttcaaggcggtgttccactcccttgaaatcacccaaggcctcgcggatgcattctttgcggatacccgccaggttggcagagataccggccgccatggagttaaagagattatgggttccggtcagtgccagttcttcctgttccatgttgaaagcgattggttctgtaaaataaactttgtcctgttccacgtatgcggcggttccttcttctttcctttcggcaaaagggtagtaatggccatgaatgccatatttatgtaattcacgctggatgatggggtcatcgttccagaagatgaaggcatcgtccggagtctggttctggataatgcggaattttgcatccacatagttttgcatctggtgatcgtaacggtccagatgatccggcgtgatgttcatcaatacggcaatgttggcatggaacttgtacatgttgtctaattggaagctgcttaactcgattacataataatcatagttgtattctgctacctgatatgccagactttgaccgatatttccggctagtcccacattcatacctgctttcttgaagatatgataaatcagcgaagtcgttgttgtttttccattacttcctgtaatgcaaatcattttggcattggtataacgtcccgcaaattctatttcggagatgataggggtaccttgtgcctttaatttaagaatcatcggggcatcattcggaatacctggacttttgatcacttcatccgcattcagaatgagagattcggtatgtttgccttcttcccattcgatgcctcgctcgttcagcatgtttttgtatgagtccttaatcgtggacatgtctgaaacgaaggtgtcgaaaccttgtttctttgccagaacggctgctcccgcaccgctttctccagctcctagtatgacaattcttttagccataatcttcgtttatcttatctttaatgtaataatcgtaattgcagcgagtacgatggtgacaatccaaaagcgtaccgtgatttttgattcatggaatacgctgttgggtttcatgaacagataactgcaattggggtctaactgtgctaatgtagtacggaaatggtcgtggataggtgcacgtttgaatacgcgttgcaaatgccctttcttttttccgcttttgaaatatctcacctgtagaataaccgaaaggttttctaccaagaagattccacagagaataggtataagcaactctttatgaatgatgattgcaaataccgctatgataccaccaatggtcaagctgccggtatcgcccataaatacttgggcgggaaaagcattgtaccaaaggaaaccgatcagcgcgccgataaaggcgcagataaagattaccagttcttcactgccgggaatatacatgatattaaggtatcctgcatattcgatgtggctggatacgtatgccaatatgcctaaggtaagaccgatgatagcagaatttccggctgccatcccgtccatcccgtcattcaggttggcgccgttagatacggcagtaactacgaaaatggtaactaatacgaaaataatccaacctacagtttgggcattatctcccaggaagcctacgaaatcagcataatccaaattattattcttgaagaaaggaatcgtagttttagtggatttctgatcttgttctttgtgcaccacttctacaatttctccccctctttgtatttctacgttctcacggataacaacgctcggacttaaatataaggtgagtcccacaatgagtcctaaacctacttggccgatgatcttgaatttgccgtgcaacccttctttgtctttacggaaaaccttgatatagtcatccaaaaagcctaatgtgcctagccaaatggtggtaattaacattaatatcatgtaaatattatgcagtttccccaataaaaggcaaggtatgagaattgcgacaataataattatacctcccatcgtcggcacaccaacttttttcacattaaaagggtctatagatgcgtcacgttgggtttcggttatttgtttacgtttgagcaggttgatgaaatattcaccgaagatagccgagatcaacaatgataaaatgattgccatcaatgaacggaatgaaacgtaaccgaacataccggctccgggaaaatcaaacttttctaaatattgaaataaataatatagcatcttttggttggtttattcattagcaaaaatatctcttaatacttctttatcgtcgaaatggtgctttatacctttgatttcctgataattctcgtgtcctttcccggcaactaaaatgacatctttagcttgggctagcatacaagctgtacggattgcttctttacggtcggctatgcttatcactttacgcatatcctctttagtcagtcctgccagcatatcattgatgatttcctgcggctcttcaaaacggggattgtcagaggtgataatgaccttatcgctttgctttaccgcttcttgtgccatcaaggggcgtttgcctttatcgcggttgccgccggcgcctactaccgtaattacattacctttgccattcagaacctcgtgaatggcattcagcacattttccaaggcatccggagtatgggcatagtccacaatggcggtgtatcccttgggtgagcgcagtgagtcaaaacgcccggcaacggggcgaagagtactcaatgccagcagtacctcttctgtttttttcccaagcaggcaggctgttccatagactgccagcagattggaagcattgaagcgtccgatgaactgtacattgacttccacattatttatatcaagcagcattccttcgaatccatcttccagcacttttcctttaaaatcactcaaactgcgcagcgaataggcgtgtacctttgctttggtattttgagtcatgaccaatccgtttttgtcatccagattggttaaggcaaaggctgttttaggcagactgtcaaagaatgcttttttggctttcagatagttctctacagttttatggtagtccagatggtcacgggtaaggttggtaaatataccgcctgcaaattttaaaccaccaattcgtttttgtgcgactgaatgtgagcttacttccataaaggcatatttgcatccttcatctgccatgcgtcccagcagtttgtttagtgtaatagggtcaggggtggtatggtcagttggaatggcttcctcatctatataattgcatacagtggaaatgagtcctgttttatatccgaatttacggaacatattatataataaggtagcaatagtagtttttccgttggtgcctgtaacaccgaccagttccaatttcgaggtggggtcaccgtaaaacgtagttgctagtttcccgacaacgtcttccgtgtcgttcacttttatgtaggtaacattttcaattaatgtctcaggaaggttttcacataccactgtacgggctcctttttctattgctttttgaatataagtatgtccgtcagtctgcgtcccttttacagcaatgaaaatatgaccaggctctatcaggcgtgagtccatgtttattcccgaaatctcttgggccatatcacctatgatttcattgactgttattcctttaataatcttttccagtttcatattcttcctgttacactgttaatttaatcgtaattgtatggtctgtcctttgcgcaaagtgttgccggccgggatactttgtgacttcactttaccgatgccggtaatgcgggctttcaatcccatgctttcaagtagatagacagcatcctttgcgcccataccaataacacttggtacaagtttattgttaatgtcttttttgttgaataatacattgtccggattactagtcacatttccccataccggtttgccttcggttgattgttccgaaactccggatgaatttacatttatccggttcagtacataatgcgccgcacttatatccccgtttttcacatccggaataaggatagaagttgagtcttttgcttctttcaaatcttgtgccagatgtttggcaaatacgcgttcggcaattttactgaacacgctgccggccatcaaaccacccgaggcggggagtccaggtttctggatggctacaatgcaactgtatttaggcgcttctgaaggaaaatatccacagaaacttaccaaataacggcgtgtgccattagtgtatccggctttcccttgtgaaacctgtgcagtaccggttttcccggatacatggaattgcttggatcctgctttctttcccagcccttcgctgacaactttttccaaaattgtttgtatctcgctgatagccttgggggaagcgatggccgggttgagtatttcaggagcaatatcttccaccacctgcccgtctttgactattgatttcacaaaacgaggcttgaccattactccgttattggctatagcattataaaatgccagtgtattgatggggggaatttgggtttcatagccaatagacatccatgccagtgcagtacgtgaccaattgctcaagtctttgttggggatgcggatgttcggcttgccggcaccgggaatatcgagatctaacggagtggcaatgcctactcgatgcagtccgcgtacaaacttttccggattatcatgataatgatcatcgatcaaccgtgatacaccgatgtttgaggacaccatcaatgattttgttgtgttgatagtgccgtagcctccacgatgccagttgtggtctttcatatagcgaccgtgcatcatatagactccgttaccggtttctaccaccgtttccggagtgatgactccgtcgtccagtgctaccagtatggatgcggttttgaaagtagagcctggctccatcatgtctgagatggcgttattgcgtatttctctgtaaatgccgtcattacatttggtcatgttgacgatagctttgatgtctcccgtctgcacttccatcagaatagcgacgcctacagtggcgttgatttctttcaattcatctaccaatgctttttctgcgatgtcttgcatacctacatcaatggttgtaatgatatcatagccatctacaggagggatgtctacaatgttcaggtatttgttcattaccttttgacgatgagtgataccgtttctgccttttaatatggaatcgtatgaaagttccagcccgttctttgcaccttgttctatatcaggaaacatatctcccaatgtacgcatagccagtgagccgaaaggctttttccgctgattgaatgcctgttcatggaatccgcctttgtatttgttcagattaaatacgggcagacgttttgcttctttatattgtatataagaaatgcgtttggggtagagtagccaactgcggctctctttttttcttccgtttttgatgtgctgcttgaaaaaggcggcacttttatcagggaatatttcatgtaatcctttgcagattgtgtcaagatttgcataaagaactgagtctttgatatgttgtagcttcagccgtgtcttttcctcttcttcggtttcgcccttcctcttatttatcatgaagtccatgtaaatcttatattcgggaaggctgcttgccatcagctggccgtcggatgagatgatgttgccacgggtaggacgtacggtgacgttttcttttacaaaacggtcggctacgtctttccagtattgacgctcggcaaacatgatgacgccggctttgcagataatggcaatgcctatcaacaccatgaccaggatgatgaaggagaagcggagcattatgtttttttggttgggcatcatgggcttagtctttctttattaaataaggacggttggtagccgtttgtaaggggctgtcttccgtcgaaatatattcttcaatacgtgattggcggctcttttccatcagttcggaagaacgtgtcaatgcatcgtatttgatatcgatcaaatcttttttcaacttatcaatttcaatgagttcctgttgactgctataacggttgtctatgtatagtacagtcaggatcatgatgagaatcagcaaacgggtttgtcttttgaagaagtcgtttgcaaggatatctcctcccaatatgctgcggatagacatgtgcttgggcgaagcagattgtccgtctttaggttgttgtacattttgtttcagttcttcttccatctcgttatctcttttctgcaattctcaacttggcgcttcgggagcgcggattgcatgtcacttcttcgttgccggcaacaataactttgctgttgactaatttgaaaggtgtctgtacattaccaaagaaatcctgttcggccttgccttctatgttcccggttttcatgatattttttaccatgcggtcctctaaggaatgataggtgattactaccagtctgcctcccggtttcagtgctttggttgctgcataaagcatttctttcaatgcttccatttcctgatttacctctatacgtaaagcttggaacacctttgcgagttcttttttttcacgttcccgcccaaaaagcggtttgatgacttcaagaaaatcaccgatggtgacaatttgttttacccctcgtgctttaacgatggttgatgccagtttgcggctgttctttaattcaccatataaatagaaaatattagccaaacgttcttcgtcataggtattcaccacatctgctgctgtcatgcctgcacgtttgttcatccgcatgtccaatttgccctcgaaacggaatgagaatccgcgttcggagtcgtcaaagtgatgtgaggaaactcctagatcggccaaaatggcatctacctcttccacgtcataataacgcagaaagttggaaaggtagcggaagttactacgcacaaaagtgaagcggctgtcgcttacaatatttttctcggcatcttcatcttggtcaaaactatatagatgcgcggtgctatccagtcggcttagaatttccttggaatgtcctccgccaccgaaagtggcgtctacataaatacctccgggttgaatgttcattccgtctacgctctcgtttaataataccggtacatgatatatctgttttgcttcactcattctatttctacgttgttattagttcccataatttcttccaattcttttccaaagtcctccggcgtgatgaagggtttgtctgctagttctttagaccagatttctatagtgtcgtccaatccgataaagcgtacatcttgctgtattttagctaatttcaaatatcgttttggaatcagaaagcgcccgtttccatccaatgtgataacttctacatccgaaacgaactgacggaaaatcatttggtgtttggaattccaacgattgagcttacaacgtagttcattcatttgttcgttccacacattttcggggtaaagaaccagacagtcttggtaggtgtctttgcgtaaaatcaagcattcttgggaggcagcttgtaactgcttcctaaatacggcaggcaggaacactctgccttttgcgtccgtctttgcttcagaattcccaagaaatcgcatatctacaccttattatattgttcaaggtgtaaaattacacaattccccacaattccccacaatattttaagaaaatatttcgagaagttttcaacaggctgttaatgtagctagtagcttggtaaacagtacgtttaaatttaatgattttatgataaaaaataatggaaagagttggctgtcggaggttgaaaaacgaaaccaaactattgcacattcgtttttattttgcgcaaaaataaaagaatttgtatagtttcatatacaaaaactcttaatttctttagagattaagagttttttctgtcataaattgccaatataaaaaaagataagttacttttgcatggaaaagaacgtttgcaaaatgactgacgactctatatttttaatcgacatagaaaagatattgaaaacgaaagccgggaaaaaatataaatatattccccgttttgtcgtttcgtacctgaagcgtattgtgcatcaggatgaactgaatgtctttttaaaagactccaaaaataaagtcggagttgactttctggaagcttgtatggagttcctagatgcaaaagtggagataaaaggtttggaaaacttgcctgaaaacggtaaatgtacttttgttagcaatcacccgctgggaggacaggatggagttgctttggggtatatattgggaaaacattacaatggtaatgtacgctatttggtcaatgatttgttgatgaatttgcatggtttggctcctttgtgtattcctatcaataaaacaggttcgcaatccagggatttcccaaagatggtagaggcagggtttgcctcggataatcatatcattatgtttcctgcggggttatgttcccgtagacagggtggggaaatcaaggatttggaatggaaaaagacatttgtcactaaaagtattgaaacgcatcgtgatgtggtacctttgcactttgagggccggaattcagactttttctataatttggcaaatatatgtaaggcccttggcattaagtttaatattgctatgctttacttggcagatgaaatgttgaaaaatcgtcataaaacctttaccttgaccattggaaaacccattccttggcaaactttcgacaagacaaagaccccggctcagtgggcgcagtttgtaaaagatgtagtctacaagctataatggacaaaagagagaataaaagatatggaagaaattattgcaccgattagcaaagagattctcaaggcggaactttccgaggataaacgcctgaggtttacgaataaaagtcataatgaaatttatgtcattacgcatcaggattcgccaaatgtgatgaaggagattggccggttaagggaaatagcctttcgtgctgcaggtggcggaacaggaaaggcgatggatatcgatgaatatgacgtgatggaaaatccctataagcaattagttgtatggaatcctgaagcggaggagattttgggaggctatcgttatctcttgggggatgaggtgcaatttgatgaacatggaaagcctttgctggctactgctcacatgtttaatttctcggaagtttttttgaaaaaatatttgccttatacggtggagttggggcgttcgttcgttacattagagtaccagtcaacccgtgccggttccaagggattgtttgctttggataatttgtgggatggtttgggtgcattaaccgtgattaagcctaatgtgaaatatttttttggtaagatgactatgtatcctagttatcatcgtcaggggcgtgatatgatattatacttcctgaataaacattttggtgataaagataagttgataactccgatgaaaccgctggaaatagaaacagataagaaaatgttggaaaatcttttctgttatgattcttttaaagaagactacaagattttgaatacggaagtgcgtaagctgggatataatattcctcctttggtcaacgcatacatgagtctgtctcctacgatgcgtatgtttggaacagcgattaattatggattcggagatgtggaggaaaccggaattctgattgcggtaaatgaaatcctggaagacaaacgggtgcgccatatcgaatcgtttgtaaagcaacatcctgaagctttgaaaataacttcaggcgctcatcccatactgaccaaataatcggactaatagtaatattgggggaaacattgtcaggtgcagataaaatttacaggattcatcttgctcgcatctgacaatgtttttattatactgctggcagactgttgcctttgatcttccggtagaggtcgagcgcatatacgtctgtcatgcccgatatgtaatccagcacagcttgaatttttccatataaagtaggtgcgttgacattgtactgtccggatacgcgattgatcagtagttgtgaatacgctttttccggagagcgcactgcattgatcatcaggtcaatcaaggtactgataactctgaaccctgccaattctatgtccagtacatcactggaacgatagattctttgcaaggcaattgcagaacaattctcataggcctctttcaatggactgcaaatgtgctttatcagtgcgccttcaaactccccggctaatatctttttttcattttcagtaaatactcttgtgcattcctttattagtgcaccgatgaccgaagaacgtaaataagctatctgttcattgacgtctgttacaatccggcaaacttcttcaatgcgtttttttcttttctcatcaaagaacagcatatacagtcctttggtttcatcatgtgtcagaagttttaatttatgcgcgtcttctatgtccatcatctgataacaaatatcatccgcggcttctaccaggtagactaacggatggcgtgcgtagcgtaaaggctcatccggcttgctgagctggatgatgcctaattctctggctattttctgataatcagcctcttcgcttaagaagaaaccgaattttgatttctttcctgccaattgtgaggaaaaaggatattttacgatggacgccaatgtggagtaggtcattacgaatcctcctttccgtcttccttcaaattggtgggtaaggatgcggaatgcattggcatttccttcgaagtgggttaaatcatcccattccatcggtgaaagttcttttttcaatgccattccttgtccttccgagaagtaagttgaaatggctttttctcccgaatggccgaaaggtgggtttcccagatcgtgtgccagacatgcggctgaaacgatagaacctatttccgatatatgggagtcgaccaagtctgggtgctttttcagaagctggttggcgacatcgtttcctaaagaacgtcctacacaagacacctcaaggctgtgagtcaaccggttgtgtacgaatacgctacccggtaaaggaaatacttgagttttgttttgcaaacggcgaaaaggtgctgagaagatgagacggtcataatcgcgttggaattcggaacggtcatctttacgggcctcgtgcagttcttccatgccgaagcgtttatttgatattaattgtttccagttcataattcaggctttatctgtttgcaaaagtaagaaacttccgtttaaaaaactgtaaacgcttagataaatccatctaaatgtgtaaattcgcactttattaatcatgtggtaatgtgctgatttgttaatatgccaattggctgcgccaggtctggactgtgcttgttgtctgcaaattattagcattgccacataagcatattgataaattgttaaaattatgaaaatacaggtaatcaataaatcaaaacatgctttacccgagtatgctaccgggcaatcggcagggatggatatccgtgctaatcttgacgaaccgattgtgctgaaacccttgcaacgttgtttggttcctacgggactttatatcgcattgcctgaaggttttgaagcgcaaatccgtccacgtagcgggctggctattaagaaaggcatcggagtcctgaattctccgggcacaattgatgccgattatcgtggtgaaatttgtattatcctggtcaatttgtcatctgaggattttatgatagaagatggggagcgcattgcgcaaatggttgtagcccgtcacgaacatgccgaatggcaggaagtggaggtgttggacgaaacggaacgtggtgcaggtggctttggacataccggaaaaaagtaaaaggaaacaatgaatagaagattgaaatatgtgcccatgctatgtgtatgtctgataggcatgcttgtttcatgcggtacggtgaagagaacttccggagtgtccggaaataaagctgttgtggaggaaaaggatccgcttactccggagcaacgtcgtaaatacgactatttctttttggaagcgctccggatgaaagaaaaaggtgacttggatgcggctttcgaaatgtatagtcactgtttggacatttatccacaaggagctgctactttgttcgagatttcccggttccatatgtttctcaatcagccggaaaaaggggaggaggctttgaagaaggcagtggatgccgaccctaaaagtttttggtacaagcaaactttggcagcctattatcaaggtaagggaaattacccgaaagccatttatgtttatgaggatatggcgagtcagttcccctcacgtctggaaccgttgatggctttgattgatctctatacccgtaccaaggattatcagcaggtagttaatacattgaaccgccttgaagccttggatgggaagtctgaacaaatcagcatggagaaattccgcatgtatctggccatgaacaatgatcagcaggcatttacggagattgagaatttggcgaaagaatatccatatgacatgcgttatcttaccattttgggagatgtctatctgaacaacggtaaggaagaagaagcatacgaaacttatcagaaagtattgaaggaagaaccgggctatgcgccggcgttgctttctatggcttcttattacgagaaaaaagggcaggatagtttgtatcaggtacagttggatactattttgctgaatgataatgtggatagcgatacaaagatgaacattatgcgccagcttattctgcgttctgagcaaacaaacaaggacagtacgaaaatagcaggcctgtttacttctatattgaaggaaaaacaagagaatgcagatatcgctatgttggcggcccaatatcttctgacgaaaaagatggataaagaggcaacccctgttttgcaccaagtgcttgaaattgatccggaaaatacgccggcacgcttgcagctgttgagctttgccattcgtgagcagaatatggatgaagtaatcaaattatgtgctcctgctttggaatatactccggatgtattggaattctactattatatgggattggcctatcatcagaaggagaaaacagacgaggcattggaggtttttaaaaaaggagtgaatcaagtaacagataaaagcaataaggatatcgtttctgatttctatgccattatgggggatctttatcatataaagaagatgaatgtggaggcatatgccgcatacgattccgctttggtttataaggaaaacaatataggggccttgaataattatgcctattacctgtctgtagagcgtaaaaacctggataaagcggaagaaatgagttaccgtaccgtaaaggccgaacctaccaatggtacgtatctggatacctatgcctggatactttttgagaaaggtaaatatgtagaagcaaaaatttacattgaccaggctatgcagaatgatggaagtaaaagttccgttgttgtagagcattgtggagatatttactacatgaatggagatcgtgaaaaggctttggaatattggcaacaagcggaaaaattatccaaggagcctcctcaagaaggtagtgaagaacgtagtgaaaaggaattgaacttattgagaaagaagattgtacaaaagaaatactttgcagaatgatgaaacgtgtctgtttttatttgtttagtgctttgctgattatatttatttcttcatgttcatctacccggagtatgaagaaaggggtatctattggcaatttatccgagtcggaatatatggaagagctgattagccgttctccaggatgggatgcaattactgcgaaaatgtcattggccgttgacttgaacggtaaaggaccgactaaagtaaatggtacgttgcgcatgaaacgtgatgaagtaatccagctttctatcgctccatttttgggtattgaagtggcacgtgctgaaatatctccggacggagttttagtgatggatcgtatgaacaaacgttatgtacaagtcccttttgatgaattgaaaaatctggcaaaggctgatttggattttcatactttgcaggccttgtttatgaatgaaatttttcttccgggaaaaaaggtgctgactgtctgtgatatttcgtcctttgctgtgcgtcctgaaaacgaaaatgcattaatagaagtaaaaaacggcaaacatttcgcctaccgttttcgtaccaatacaaatgatgggctgctgaaagaaagtcatatcggcttgtccggtacccggtacgggataaattggcgttatgataagtttcgtccgttggagcagaaacaatttccggcgtctatgacagtgtcttttgaaggagcgaagcaaccggttacggcagtgttcgaactttcccgactttctacaaacaaagattgggaaagtcacactgaagtgcctcaaaaatacgaaaagatagaattgcaagatttgctaaaacagcttattaaataatgaaacgtatcttcttattactcatagcctgctgctttttaagtactcttttagcgcaaagtactcggaaaataagggagcttgaagccaaacggaaggaacttcatcagcagattgccgagtctgaaactctgttgcaatctaccaaaaaggatgtgaaaagccagttggataaccttgctttactgacaggtcagattgaggagagaagaaaatatatcaataccatagagagtgatgttcatatattaacaagtgagatcgcctctttgcagaagcaactgaataaacttcagcgtgatttgaaagacaagaagcagaagtatgagatttcggtgcaatatatgtatcgtaacaagtctgttcaagagaaattaatgtttattttttctgccgagaacttgagccagacttaccgtcgtatgcgttatgtgcaggaatatgcaaacttccagcgtcttcagggaatggagatagaacgtaagcagaagcaaattgccgctaaaaaaagagaagtggaacaaactaagaatgccaaacagaatcttttaaaacaaggtgaggccgaaaagatcaaactggaaattcaggaaaaggaacggcagactcttttagcgaatctgcaaaagaagcagaaaggtatacaaaacgaaataaggaagaaaaaacgttcagcagagcaattgaatgcccaaattgatcgtttgattgagattgaaatagagaaagctagaaaacgtgcggaggaagaagcccgtaggaaagccgctgctgaggctgccgcaaaggctgctgcagctaagaaagcggaaaataaaactacgggaggggtaacccgctctaaatctacggaaaaaaatgaggacacaaggaaggccgctccggtggagaagttcagtctgaacaatgaggaccgtcaactgtcgggtagttttgaacgtaatcgaggtattttgccggttcccattaccggcccatacgtgattgtcagccattacggacagtatgccgtagatggtttgcgtaatgtgaagctggataataaagggattgatatcaaaggtaaaccgggagcacaggcacgcgccgtttttgatggagaagtttcggctattttccaatataatggcttgaacaatatattggtgcgtcatggtaattatatctccgtctattgcaacctttcttccgtatcggtttctaaaggcagcaaagtcaatacacgtactgttcttggaactatccatacagatagttcgggtaatacggtcttgcattttcaacttcgtaaggaaacggctaaacttaatccggaattatggttgggaagatgaaaaagataagttttctttttgtatttctgtactttattactttgttgtttgtcgtagcttgttcagaaactggagagcttcctgtagctcctgttcctgaaattccttccattactatcccttccacggaaaatacccggcttgttttcacttcggacggaggggaggatacccttgcttttattgcaacaacaggatggtctgttgctataaagactgctgatttggctggagattggttagctgtgtcaccgttaaccggtaataagggggataatgaacttattattacattggcttccaatccctctgccgaggatagagaaggtgaagtgataattcagtgtggagaagttgcggatactgttatcgttcgtcaaaatttcaattatctggcaactctttctaaagatggtgatgtaagaacttggcaagaacatacgaaagggtggggaattaatcttgtaatgatgggagacgggtttgtggaaatggatatggggagaggtggaaaatacgaggtaatgatgcaaaaggcgatggattcctatttttctgtggagccgatgcattctttacgggagtattttgatgtttatagtgtcactgttgtttcagtatccgacagcattgacggtggaacagctctaggaactacttttacaggaggcacttccataaaaggcgataatgaaaaatgtaagcaatatgctactaaagtgcctctgttgggtaattctgttagaaatacaccgatgattgtagtcatgaatagtcctcgctatgccggtaccacctatatgcattctttgggctattccatagcattctgtccttatgtggataatgatgatgaacgttttgcacagattattcatcatgaagcagtggggcatggcttcggatatttgggagatgaatatgatgatgtgtatgacggtgaaatcccgccaaatgttatggcggaactaaaagaaattgcagaccggtatggatggtattctaacattgatttcactccggatataacgaaagtgaaatggaattattttatctctgacaaacgttatgttaatgaaagactgggagcatgggaaggagcatacggataccggtcaggtgtctggcgtccgacgaatatcagtatcatgctctataatgtcggcggttttaatgctccttgccgggaggctatttatcgtcgtgtcatgaaactggctggtgaaagctatagtcgtgataagttccttgaatatgatgcagtaaaccggaagtctgcattaaagcgtatgaatgctggaagtgtagatcggaatcactttattcctttagcatctcctgttattatagattgattctctttctctgtatctttttgatatgtagtactgggtaactttctgtataatagctattaaagtataaatatgtatttgaggaacggttattttccgttttaaaacttgtctgccctttcgaagagaatgaaaaaaacatttattattaaaaataaatctccaattagttttgagttcaagtctaattgcgtacatttgtcccctgcattaagtatcctcatagaagtacattaatacttttccaacttattctttagtgatgatggtagaatcgtttgtctctctgtaagattcctaatagcaaaacgtacttatttttttattaaaacatttattttaaaatgaacatttttattgcagggcttaactataatatgagtgaagccgaacttggagaattatttgcagagtatggtgaagttgtttctgttaagattataatggacagagagaccggtcgttctaagggatatggttttgttgaaatggctgatgatgaagctggagataaagcgattgcagctcttaatgaagttgacatggatggaaaaactctttctgtgtcaatagcgcgtcctagagaagaacgtccgcgtcgtagttatggcaacaatggtggtggttatcgtggtggtaacaacagtcgtggtggtggctacggtggtggtcgcggagacaatggctatggaggtggcagaaacagatattaatctgtatctctataaaatataaagaaacctgccttggacatttgaaatgctgaggcaggtttttatagtgccttttcaggatataaaattaattttctcaattttttcttcagatttttatggttgtctaaaaatcttgtttccaattgtttgttatgaaatctttccattttaatatcttcgttcggatataaatcctttagtttccaaggtagagactatatccgactgtttgtttttgttctggtatttcatttcggtggtattcggatttccctatccggattatcttgttcatttatttccacatacattccagggacttctttttatctttataaaaaggctataagtattatgcgtgttatattcaactttattctggattatttcaacaggaaagaaaattatttagtatagagagattgttagcttttctagaaaatagactcctgtgtttgtgttgtcaatagttctagtgccttgattcccataacggaatttcctttttgattcaatctcgggctccacactgcaactgaatatcgtagtgggtaaactgcggctataccgcctcccacaccacttttccccggaaggcctaccagataagaaaattctcctgcttcgtcatagaacccacatgtttgcatgatggcattgatacgtttcacttgagaggcggtcagtgtgattccttcgaatgtaaaagcttgtttatggttggcaaacggcaaaaaggctttggataaatcataacaactcatttctatggagcattgaaggaaatagaaatgaagtacacgttctatgtcattgtcgatgttatgatgatatttcaacaggttggtgattgccgcattcagataaccgttttcacgttcggacagggctacttcttcattataatggatctggttattcccgctgattgagtggacgaaacgaagatattcttcttcggggtatttcaaatggttcagcaggatatcagtcattacaatggctccggcgttaataaagggattccgaggaattcctttttctacctccagttgtactaatgagttgaaagctgttcccgaaggttctttacctactcttttccatagattatctccttcaagactcaaacacatggcaagtgaaaagactttcgaaatactttggatggaaaagccggtggtggcttctccatgcatgaaagttttgttttgtatcgtatggatgcacattccgaattgatctgggttgattttggcaagtgccggaatgtaatcagcctgtttgccaatagaggcgtagggctggatttcttgatagatgtcttttagaatctgttgataatccatgatttggacgtttttatttttctgtatagtcaccattggctttgatgagttcgatcaacttctcaacagcctggtcttcgggaatgtttttttctatacattctttctttttatagaggctgatttttccacgaccggcacctacatagccatagtcggcatccgccatttcgccgggaccattgacaatacagcccataatgccgattttcagacctttcaaatgcgaggtggctgctttgatgcgggcaatcgtagactctaaatcatataaggtacgaccacagcccggacatgaaatgtattccgttttgctggttcggattctgccggcttgcaggatactaaatgcagtggtgtctaccgctatatgactcaaagaaccttggttgtacaagaagatgccgtcacagagtccgtcaaaaattagtgcacccatatcagctgccgctttgatttgcagatcttcagttttcgtttcctgatagtattggaagaatacgaccggattttctaaaccttcattcatcagttcgtgtgtcatggcacgatattcgccgaggcggttgggatgattgctttgggcgatgattaccacctcgggatgcagtttgagggctgcgattacttcgtcattcatagccatatagggcaggaacaggaattttagatcggaaaccgtgtgatgtaattctatcatctgctggtagttgaatgccggatagacatttttgtcttctggattccatgcattggcatccactagataggctatattgttatctcgtgaattgggtacacttccaccgcaataaatatagtcaggtttgaattgaggattggtttcgaaagacccttccagacgttcggctattactacaggaggattatcccctccaatattccggacggccttagtcttccggcggcccggagataggtagttgaattgcggagctttttttccaggaataaaaggatgtccttcccgagttagtatataatcaaccagtttgcgggctaccggaatttcattttcaggagcctcgctcaatgagacacgaatggtatctcccaagccatcggcaaggagtgcacctattcctaatgaggattttattcttccgtcctcgccatcccctgcttcggtaacacccagatgaagcgggaaagccatattttccttttccatttcctctaccagtagacggaccgtcctgaccattactacggtattggatgccttgatggaaataaccacatcgttgaaatgttccgcaacacagatacgcaggaattccatgcacgattctaccataccttcgggggtgtcgccataatgagacatgatgcggtctgacagagaaccgtggtttaccccgatgcggatggcggtgtggttttccttgcagatatttagaaaaggaacgaagcgtgcacgtatcttttctatttcttgcgcatactcttcgtcagtgtattccagtttccggaaagtacgtcccgggtctacatagtttcccggattgatgcgcaccttctccgcatattgtgccgctacatcagccactttgggattgaaatgcacatcggctaccagcggggtgtcatatccttgagagcgtaatccgatattgatatttttcaggttttcggcttcacgtacaccttgtgtggtaagacgtacatattcaccgcccacatctataatgcgtttggcttgttccacacatgcttcagtatccatagtaatggtgttggtcatactttggatgcggatggggttgtttccacccaaaggagtgcctccgatatggacttcggaagatttgcggcgggagtaattaaataaatccatgtttagtgattagtggtgagtggtgagtgattagtgagctgcgctggaatgctgcatgggtattaatcactcaccactagttaattcgttttatattcaaacttgatttctttcaattcttcattggcttttacaattttcttttttaaaccggttttgtagtctgcaaatttagcagccagttctgtatcactcaatgctagcatttgtacggccagaatggcagcattcatggctccattgattgctacggtagctacaggaattccgggaggcatttggataatagaataaagtgcgtctacgccatcaagaactgaaccttttacgggtacaccgataacaggtagtgtggtatttgcagcaatgacaccgggaagtgcggcagccatgccggcagcggcaatgatgactttaattccacggcctgcagcatttttcgcaaattcctccacagcttcgggagtgcggtgtgccgaaagggcgttcatttcgaaaggtacgtgcatctcgtccagtaatttggcagctttttccattacgggaaggtcggaagtgctacccatgataatacttacgataggtttcattgtttttttgttattgtttggtttatatatttacttcaagcacgggttatacggatgaacgcggatagaaaaatccgtgagatccgcgtaatccgcgcctgaacaattccctaacgggaatttatattattcgttgactaatgctttatatccttcagcatccagcaaatcgttaacgtcattagtgtcattgggcttaatcttaatcagccaccctttaccatacgggtcttggtttactaattcgggattgtcggccaatgcttcgttctgttccagaacttctcctgaaacgggaaggaacaagtccgaaatagtctttactacttcaatagtaccgaaaacttcgtctttttctaaagtttctccttcagtagtgatatctacgaatacgatgtcacctagttgctcttgtgcataatcagtgatgcctacataagctatatcaccttctactcgtatccattcgtgttctttggtatactttacattgcttggaaattccataatgttttcaatttataaggttaatactaatttttttcaaataaacaaaattccaatgacaccacaaaacaatccgacaataaatccggctaaaacttctaataaggtatgctgttttacaatgatacgggctgtgccaagcattccggatagcaaaatgaaaaaacagagccaccatacaggattgaaattgaatataaagctgtaggataataatccgcctaccatcatgccgctgcttgccacgtgtgtgctgattttccacttgaaattgatcagtgtgcaaaggatcatgcagatgagggcggctacgataatacccgacatatagcggggcagatgtatcttgtacatagtgatgagacaggtgacatagctgatgatagtcagcgcgtatggtacgaaacgtttttcgcggtgtcccaattcatgaatcccccaaccgtttattttttgaaataggtagatggcgagcattggcatcagaatggtgaaacagtagactatgcccaatactatcagtttgtactggatgggcatgatacgaagataagtgaagaaaaaaagtaggaaaaatgccacaaaaggaatcataaaaggcgtgaatatgcctgatatgatacgtgagctgacttcaagcggactatttttcttggctactcttattgcttcggttgtttcgttagctttcataatattaccttcttaatcgtgcgacgggtatgttaagctgttggcggtatttggctacagtacggcgggctatgggatagcctttcgtctttagtgtttcggccagttcatcatcagtgtaaggtttttctttgtcttcggtatctacacattctttcagaatgcgcttgatttcgcggacagagagttcttcaccgtcttcggtggtgtaaccgtcgctgaaaaagaatttcaacgaatagataccatagtttgtttgtacatatttgctgttgcttacccgtgatatggtggaaatatccaatcccgcgcgttcggctacatctttcaagatcatgggcttcagcaaggattcgtctccttctaaaaagaagaggcgttgaatatctataatggcttgcatggtggtgagtaacgtgtgttgtcgctgttttacggcattgataaaaccttgtgcggcatctactttttgttttaggaacatcagtgcgtcctttgaggccttgctctgattgtctttgttgcgagtgtgttcatccagcaattcggtgaactgacggctcagacgcaactcaggaacattacgattgtttaaacttagagtaatggtgccgtcttcatacgtttctacgatgaaatcgggaataatctgctgcatatttttacccattgcttcacccagtgaactgcccggacgaggattcagcttggtgagatcgctcaccgcctcattatattgttcttcggtaatacctagtttttggataatcctttctttatttttgcgggtaaattcatcacaacatttaccgatgatgtccagttctatttgtttcaacggcgaatcggcttttctttgtatttgtaacagaagacattcctgtaaactgcgggcaccgatacctgccggatcaaagtcttggattatttctaatattttattcaattcttcttcagtggtatagatgccccgatagatggcaagttcatccatgatagactccatatttttgcgtaacaggccgtcatcgtccaatgaaccgatcaagtactcggctatatctcgttgttctggggtaagttcctgcatctgcaactggtctttcaatatttcataaaaagatacggcatccgagaaagggatttcttcggctactccttctttggaacgattatgttcctgtagtttataatcgggaatatcatcttcgttactgtaatcgcctaatgaaaaatcctcgttcgactccgtattttcgtcttcgttttcttcgtattctgtgttgtcatcttcattatcgggcatttctttcccttcctccagggccggattatccagtatttcggaatggatacgttcttccaactccacagtgggcagttccagcaatttcactaccagtatttgttgtggagataaagtctgtatttgttgctgggcttgtgtttgtacttgacgtgagccttgtgccataatatttttatttccttgtttattgcgacaaaaataggaaattgtattgtaataatcttccttttttttgggattattttaaggggatggttatctttgcctgtcatccatacaaaaaacacaagattatgtttgcaaaagaaacttatacaacccgccgtaacagcttgaaaaaaagcctgggaacaggtctcttgctatttctaggcaacgaggagagtggcatgaactatgaggataatacttatcatttccgccaggattctacttttctttattttttcggcttgccctatgctgggttggctgccattatcgatgtggatgaggataaggaaattatcttcggggatgagctgactatggatcatattgtatggatgggaatccagcctgccttgtgtgagaaagcgcagagggtgggagtgacggaaactcgtcctgccgcggatttgaagaagtatttggaaaaagctgttgctaaaagacaggtgattcattatctgcctgtttatcgtgcggagcacagattgaagctgttggactggttggatataaagcttggcatggaacagccgtctgttccgtttattcgtggagtcgtgaatatgaggaattataagactgctgaggagttggttgaaattgaacgtgcttgtaatgtgacggctgatatgcacattacagctatgaaagtgttacgtataggaatgaaggaatgggaagtggtggctgcattggaagcggtggcacaggccaatggttgtggattttcgtttcctactattgccacggtatgcggacagactttgcataaccattatcatgggcatacggtgaaatcgggggatatgctgttggtggatgctggtgcggaaactgaaatgggatatgctggtgatatgtcgtctacaatttgtgcggataaaacgtttactatccgtcagaaagaagtgtatgacattcaggttgccgcacacacggcagcggttcgtgcattgaagcccggagtgccttttaaggaggtgtatgaactttcctgtagagtgatttgtgaagggctgaaaggactgggcattatgaaaggtgatcctgctgaagcggtggccgttggggcgcatgctatgttttttccgtgcggactaggacacatgatgggattggatgtgcacgatatggagaatttgggagaggtatgggtcggctatgacggacaaccgaaaagcactcagttcggccgtaagtcattaaggctggccagacctttagaaccgggatttgtgcttactatagaaccgggtatctattttattcccgaactgattgattattggaaagcggaaaaacgctttaaggactttatcaattatgataagctggagagttatcgtgactttacaggtttgcgtaatgaggaagattatttgataacggaggacggggcacgtcttttaggtaagaaggttccttttactacagaagaggtggaggctttgcgataaaattattgggggtagatagaaatacttttatctacccccgatgatatataattatccacctatggttacctttaaaccgtaatcagtcaagatttgtatgcactgctgttgtacttcttcggatggcgtttgcattttatatcctttaggattatagatactgcctagctttgtatgctttccctttcctatatcatggtaaggtaataggttaattatctcaggatgccgtggaagactggccaaaaattcggcagactgctttatgttcttttcatctgcattcactccttcaatcaatggaatgcggatataataagggaaaccggcttctgctactctgcggatgttttccaaaattaattcattgggaacatcacaaaatgtttggtgtacggtactgtccattgattttaagtcgataagtaataattcacaattccgcatcacttcatccaccgtttctttgcgggcaagtagggtggtatctaccgcccgatgaattccctgttgtccgcaacgtttcagcatatcaatcaagaatttgggatgaagcaacggttctccaccacaaaaagtgaccccaccgcccgattgatccataaatgggatttccttttctatttcatgtatcaggtattcggcggtatattccgttcctgatatctcgatagccattgccggacattcttcggcacagcgtccgcataacacgcatttttgtttgtcggtgacaataccctcgggagtcagtgtcagtgcaccgttggggcatactttcagacaagttccacagccaaggcatttcttggctgtgtatagtttgtcttttccgttacgaatgccttcgggattatggcaccatacgcacgagagcgggcatcctttcatgaaaagtgtgatacggatgcccggtccgtcattgatagcatagcgtttgatgtcgaaaatcagattcattttgtcagaaggtttcttgtgccgtgcgggctattacgtcatattgtaaatctgcgttcatatcattgaaataatcgctatacccagctacgcgtaccaacaggtcccgatattcttcaggatgcttttgggcggcatgtaaggtggcggtatctactatattgaactgaatgtgatgtcctcctaaggcgaaatagctgcggatgaggcttgctagtttggccaggtcttcatcacgtttcagcagtgagggcaggaaacgttgattcaacagagtacctccgcttttcacctggtctagtttgcctaatgattttacgacggcggatggcccgtgggtatctgctccgtgtgagggtgaggtaccgtcactgatggcacgtccggccagacggccgttgggggtggcattcatcattttgccgaagtaaacgtgacaggtagtagacagcatgttcaaatggaagcattcgcctttggtgttcggctttccttcgatggcgtcgtaaaggtcgttaaagacctggatggcgatacggtctgcatattcgtcatcgttaccgaagaaaggtgtgcggttcagaatgaattgtcgcatggcttcctgtccttcgaagttggtgtcggtagcatggatgatttgctccatattgaatttacgttcttcgaatacatgttttttcagaacggagagactgtcggtaatagtacctaaaccggtgcattgaatataggttgtgttataacgcggtccgcagttataataatcttttcctttggcaatacagtcatcaatgaacaaagacaggaaagtggcgggagcgtatttggcgaacatacggtcaatgtagttgctgacacgtactttcatatctacaaaataatggatttgtttaaggaatgcgtcataaagttcttcataagtccggaaggtacggggatctcctgtttctaagcttactttcttgcctgacacaggatcagttccgttgtgcaaggtgacttccaatatcttggggacgttaaggtaaccggtcagtacgtaagcttcttttccgaaagcgcctacttctatgcatccgctacatccgccttcgcgagcgtcttccggtgtctttccctgtcgcattagttccatgacgtatgtgtcgggattgaatacggatgggtagccgtagcccttacggattactttgcagccttcgcgcaggaaacgctctggggtgcatacactgatgtgcagggcgcttccgggttgtaacaggtgaagatcatctactgtttcgagcatgatataggatacttcactgaccccgttgctaccatcgcgtttgatgccaccgatattcagattggtaaagtcattgtaggtaccgctttctttggcggtgatgccaactttgggtggggctgtctgattatttattttgataaaaaaacatgacattagttctttggcttctgcacgagtcagtattccttcttttaggtcattttcatagaaaggagtgagatgctggtcaaaatgtcctggattcatggcgtcccatccgttcagctctgtaatggtgccgagatggacaaaccagtacatctgtatggcctcccaataagtacgtggggcatgtgcaggaacccatcggcagatttccgctatttttttcagttcctttttgcgtttcggatcggtttctcgtccagccatcttttcggccagttcagcatggcgttcggcaaaaatgatagcggcatcacaggagatggacatggcggtcagttcttcttgtttgtcggttgcttctggatcattcatgaaatccagatttctcagctcatgggcaatacgttctttcagatccagcatgccatattgataaacttttccgtccaaggaagtatgaccgggggctcgttgttccataaattcagtgaacattcctgcttcgtaagcttctttccattctttgggaacgtgattgaagatgcgttcgcgttgggtgcgccctttccaataaggaataacctcgcgttcataggtgtctatatcttcttggctgatggtatagcgctgtaattcgcgggtgttcaacacatgaaggtcttccacgctgtgacaggtcagttcagggaaagtagatacggctttgggatgtggtccacgttcacctacaatcagttcgtctttacctatgtatatagttttccgtttacagatttcaagaaagttcagtgctcttagaatgggaattggatatttcccttcgttttctttgtaaaattcggtctctatcagagcacgttctatggacagagaaggttgtgcgttaaaagattcttgacgcaggcgttggatacggtctgtcattccgttggttgttgttatcataagagttataataaggtttatttgttcataaataggaattcccataaggacggattgaaggagccgaccgattgatatgcagaagaagatatcaatagaatgaaacgtatgccaaaagtaagatacgctgtcattcaatccatctttatggtggctaatgaatgtacagtctgctggcttttggcataccctcctgaagaagaaatgttcttagcagtagaacatcaggcagttgaacagttttctatagcctttggagtgcattcgcttatacttgtttaatagtggtcgaaattactgtttgtttcgcacataaacaaaccttatatactgtttaataacaggttaataccggaaactgcttcctcctaaaaattctctcagtaaagaggtaggaggcaattctttatcttgtaccgaagcgaaatattccaagaatttgcgtaaacgatatgcttctgaatattccggtttgttattggggacattccttagaatgggaatagcataatctttcataatggccagttcaaacaatagggcagaattgaacatggcatctgcattttcttgatatggaaagatccatttttcttctccggcacgtacgctgggccatcttctgatcgtttcttctgcggaatagccacggtatttgtggtcgcggataatacggcgcaacaaacggttgtcggtagtcggaatataattatgattgtccagcagaatagtggttaatgccgatacatatattttatatttattttcggtgggaatatgaggagttaactcggggttaagtgcatggatcccttcgagaatcaatatcatgttatcgtcaatcttaagtttgtcacctttaaattcccttcttcctgtggtgaagttgaaacgtggtaattccacttcctttccatgaagcagatcttgtaattgcttgttgaagaactctaaatctaatgcatacaatgattcgtaatcataatcacctttttcatcttttggtgtcttttctcggtcaacaaaataattgtccagggagatggggtaaggcttcagaccgtttgccatcaactgaatactgagccgtttgctgaaagtcgttttaccagaagaggatggaccggagataagaaccagttttactctttgaccgttttttcctctgtggtatatctcatcggcaatattggaaatctttttttcctgcaaggcttcggacacattaatcagatcggtggcatagccttcattacaggccacattgaaatctcctacagtccctacgcctaaaatctgattccaacgacgatgttctttgaatacttccagcattttttcttgttttaccacttcctctagtacttccggattctgacggttggggacacgcagcaacaagccgtcatagtatttcactatgtcgaatttgcggatatatccggtgctgggcagcaggctgccatagtagtagtcaatggtattttccaaagtataataataggagtaaagttctcctgaagtttcaagtagttttactttgtccatcattcctttccggcagaatagttctactactttagttgtatgacattcaaaacgatggaaagggatgttggcttccacaatctctttcattcgctgcttaatacgggaaacatcatccagtccggtctcgtgccctatctgcaagtcgcaataatatcctttggatacgggatgttcaagcatgatttttccatcagggtataggtcctccaccgctttgcacaagatgaagcaaagtgaacggacataagtgcgcattcccgaaggatttagcatattcaggaattccacatccttattattataggcccggtaattgagcccttctactttgttattgactttggcactgactggtccatatgggatatctagattaaaaccattataaatatccaaaagtgagcttccgattgggaagttctttgaaatattgttatttttgcaacagatttgtaacataatcgtaataattattactaacgtagtgaaacggcttgaaatttactgaataaaagggagattagccaattcctaccaaattaattaaagatggagtattctttttatgatttcttaaagctgctaggttcactggcgctattcctttatggaatgaaaatcatgagtgaggggctgcaaaagtttgctggtgacagactgcgtaaaatcctcacagcgatgaccaccaaccgggtaaccggagtgttaaccggtgttcttatcactgcgttaattcaatcctcttctgctactactgttatggtagtaagttttgttaatgccggactccttacgctttcacaatcaattggggtcattatgggggcgaatatcggtaccactgttactgcatggattatatctgcattggggttcaaagtagatattgctgctatggcgcttccgttattggctgttggcgtacctttattattttcaggaaagagtaaccgtaaatccattggagaatttatattcggtttctcttttttgtttatgggcctctctctcttgaagacgaatgctcctgacttaagtagaaaccccgaaatgttgtcttttgttcagaactataccgatatgggatttggttctgttatcttatttgttgtcatcggtacagttctgactatgattgtacaggcatcggcggcaacgatggctattactttaattatgtgtgccaatggttggattagttttgagttgggggctgcattggtgcttggcgagaatattggtactaccataacagccaaccttgctgcactgactgctaatacgcaggctaggagggctgcgctggctcatttggtgtttaatgtttttggggttatttgggtattatgtcttttcaagcctgtaactatgggggtttcatggtttgtagaagatataatgaaaacagcagatccggctgttgccgtatcttttaaactgtctgcttttcatactacttttaatatatgcaatgtgttgattcttatttggtttgttaagttgatagagaaaacagtctgtaaaatcattcctcagagagagcaggatgaagaatatcgtttgcgctttattacaggtggtatgctttctactgcggagctttctatattgcaggcacgcaaggaaatcaatctctttgcagagcgtactcatcgtatgtttggcatggtgcgggatctgcttcataccacaaatgacaatgactttaacaaattgttcagccgtattgagaaatatgagaatataagtgataatatggaggtggagattgctaattatctgaatcaggtatccgacgggcgtttgagttctgagagtaagttgcagattcgtgctatgcttcgtgaggtgactgaaatagagagtattggtgacagctgttataatttggcacgtacaattaatcgtaagcatcggagtgatatggatttcactccgaaacagtatgatcatattcatcagatgttccagttgacagatgatgctttgtcccaaatggtttcgttggtggaagatgaacatcatgtggtggatgtgaataaatcgtttaatatagagaatgaaataaataactatcgtaatcagctaaagaatcaaaatgtactggatgtgaataataaggagtatgattatcagatgggtgtacactatatggatatcattggagaatgtgaaaaactgggcgattatgtagttaatgtggtggaagccagtagcaatgtgaaggaaaagaaatcctaacctgaaatggctatggtgaacagaacaatgatatagatgcagaggtgcaaggtttaactcatgacggattaaatactttgtacctctgtgtcttttttaataaagtgtaataaagaagagggtataaataaaagagaatctacatgtcaatatttgtttttttgaaactgataggctcactggcacttctgatgtatgggatgaaaaccatgagtgaggccttgcaaaaactgacaggcggacatttacgtcatattctgggggcaatgaccacgaaccgttttaccgggctgttaactggtacatttgtgacagcttctgtacagtcttctactgcgacaacggtaatgacagttagtttcgtaaatgcgggattgctgactttggggcaggctatttctgtaattatgggagctaacattggtactacggtgaccgcttggattatgtctattttcggtttccagatcgatatgaataatcttatttttcctctctttgcattggctgttcctttaatcttttctaataaaagtcagaaaaaatcttttggggaatttatttttggattttcgttcatgtttttgggattgactacgttacgtgagaatgccatgcatatggatttggagcataatgcagctatcatcagttttattacctcttgcaaggaatggggatttttttccattttatcattcttgttgataggtggaataataacaatgtgcgcacagtcttctgctgcggttatggccattacattgattctttgttccagtggtgtgcttgatttgtatttgggcattgcactggtgatgggcgagaatattggtactactgtaacttctaatattgcagctttgacggcgaatacgcaagcaaggcgggcagcgttggctcattttatttttaatatatttggggtggtatggattttatgtattttccatccgtttgtagatatggtgagtggaatgattaaccgcttatttccaggagtatcgcctgaagtggcaattacttataaactttcggctttccacacagcttttaatatctgtaatgtgttgatattgatttggtttattggaccgattgaaaaggtggtctgttgggtaatcagaccaaaagaggatgaggaggaattccgtttgcgttttatctctggtggtatgctatctactgctgaattgtctattgtccaggcaaggaaagaaattaatttgtttgctgagcgtactcgccgtatgtttggtatggtgcgtgatctattgcatactacgaatgagaatgatttcaacaaattatttagccggatagagaaatatgaaaatatcagtgataatatggagctggagatagccaattatctgaatgaagtttctgaagggcggctgagttcagaaagtaaattgaaaatacgtaccatgttgcgtgaagtgactgagttggaaagtattggtgacagctgttatcatttggcgcgtactatcaatcataaattcagagggaatgaagattttacggaaaaacaatatgaccatattcatcagatgcttcaattgacggataatgcactacaacaaatggtatctttggaagaagacgaatattatttggttgatcctaacaaatcatttaatatagagaatgagataaacaattaccgtaaccagttgaaggatcagaatgtattggatgtgaataataaggaatataattatcagatgggggttcattatatggatattatcagtgaatgcgaaaaattaggcgattatgtagttaatgttgttgaggcgcgtacagatataaaggaaaagaaaatttgatttgtaaatcgtggtagtatccatattttgtgtaaatagaaacgggattcagttataagtctcttatatctgaatcccgttttcaaaaataagcataaattggttcataatcaatccccagttagtaatcggcattgtccatttcttctcaatctccatcagagcgaggtataccattttcttcaccgcatcatccgacgggaatgaaagttttgatttagtgtactttctgatttttccattcagattttcaatgaggtttgtagtgtagattattttcctgatttccaatgggaactggaagaaaacagtcaggtcatcccagttattcctccatgagaggatggcataagggtacttccctccccatttcttttccaaattatccagttccacggcagcagcctcctgttgggcgcgttatagatgctcttcatatcggctgtaaactctttcttgtccttgtaaacgacatatttacaggagttcctgatctgatatacaacacgtatttgcgtggaagacagaggaaatacggcacgtatgatgtcggtaaacccgttcaggttgtcagtgcaggtaatcaatatgtcctgcactccgcgggccttcaaatctgtcaggacacccatccagaatgaagaactttctgattttcccacccacatgccaaggacttctttcaagccgttctgtttcaaaccgacacagagatagacagtcttgttgatgatttttccgttgtcacgaaccttgaatacaataccatccatccaaacgatgagatagaccggatccaaagggcggttctgttattcctgagcagccctggttgactttgttcgtgatgatggaaatggctgatgtggacagttctatttcatagatttcacgcatttcctcttcaatgtcggacacgctcattcctttggcatatagggagataacaagtttttctatggaaaacccacgaccctcgtgtttgggaacaactatggactcgaattcaccgttacggtcatggagaataggtatgatcgcttcaccgtgttcagtttggattttcttggggtagctgccgttacgggaattaccgctgttatgaccggaaaccgaattcttctcataacccagatgcgcatccatctcaccttcaagcattttctccaatacctgcgcgtgtagttgtttcagaaacttgctgacatcagcttctgtcttgaactggttaaggaacttcttacttaatacctcatcaggcactgcatgattcttctctttcataatcttcttcattttgcaaagctattaaataaaaaatacggaacccaatactgaatcccgtattttacatttacacaaaatattttatagtgcctaaatcgtattaaatgaggttatttttcgatgccaactagttctacttcgaaaatcaaagtagagaaaggtttaatctgaccggcttcacgtgcaccataagctagctcttgagggatgtaaagttcccatttagatcctactggcatcattgttagcgcttcagtccatcctttgattacctgattagcacggaaagtagtcggttctttacgatcatatgaactgtcgaactgagttccatcaatcaaagtacctttatagtttacttttactttagaagaatcggtaggaatagcgccgttaccttctttaattatcttatattgtaagccgcttgatgtagttttaacaccctctttctttgcattttcagctaggaatttttcaccggcagctttattttcagcgaactgggcttcagtagcttttgctttgattgcttctgccttagactgaacgtaagcgttggcttcttccatagtaacattcatgccttttttctgcaaagcagccatgaaacctgccagaaagttttctttacttaaactttgagtagagtcatttccgaaaatacgttggctcatcatatcgaacatacgtccaccaacttgttgaccaatctgaagacctgccatataagcaacgtctttagggctagtcttgctggtaccttctttaacacctctgatgaagtcggacatataggctgtatcaacgcctaattgttggctcatatacatatccagaccttgcgtgttggtgatacccatcatgtaagaaagtgagtctacgtcattcttcatgtttgctttcggtgcttgagctgtacaagaagccaagctggctgcagcagcgattgctacaaaaaaactaatttttttcatttgccttaaatgctttaataattataatacttcgattaattctacttcaaaaatcaatgtgctgtgaggaggaatcatttctcctgcttgttgtgctccataggctagttctgaaggaatgaaaagtttccatttagcaccttcagtcatcagttggagtgcttccacccatcctttgattacttggttcacaccaaagatagccggctcgccgcgtttgatagagctgtcaaacaaagtcccatcaatcaaggtaccttcataatggcattttacacggtcggttgcactcggtttttttccgttaccttctgtaatcacttcgtactgtaagccactgggaagtgtcacgactcccggtctttttgcgttttcctccaaaaatgattttcccttttcaatattctctgcattcaatttggtttccagctcttcaaagtacttgtttacgatttcacgtgcttcgttgtggctgatagccgtttcttttctatctaatacgtctttgattgcttgagcaaagtcttcaacattaatactttgagcacccatgctcaataaattctggccaataccaaggccgatggcgtaactgaatttatccataactatttattttataagatgttttatacaaaacgcacaaaggtaggtgttttatttgaatgaatctgtttttaacaatttaatttttcttatttttgtgtgtttagttaaaagaggaggactagaaatgaagaatttagtagttttaacaggtgctggaatgagtgctgaaagcggtatcagtacatttcgtgatgcaggtggtttatgggatcagtatccggtggagcaagtggctactccagaagggtatgcggcaaaccctaaattggtgattgatttttataatgagcgtcgtaaacagttgtttgctgtaaagcctaaccaggggcatgaactggtctctgagatggaaaaattctttaatgtgactgtaatcactcaaaatattgataatttgcatgagcgtgctggaagttcgcatattattcatttacatggcgaactgaccaaagtgacatctagttgggaacctaataatccagcttatattaaagaattaaagccggaagaatatgagatacatttgggagacttggccggagacggttctcagtttcgtccattcattgtatggtttggtgaatctgttcctatgattgaaactgcaattgaatatgctgaaacagctgatatctttttaattatagggacttcgcttaatgtatatcccgctgccggtttgttgaattatgtgcctgccaacactcctgtttatttaatagatcctaagcaggtgcccattgcatcggggcgtaaagtgcatgtaattcagaaaggtgcgtccgaaggaatggaagagttaaaaaaaatattagtgagatagtttgcaagtaaacaatttcattgtatatttgttatgtatttaaagaacatttaaaacataaaacagagacaattatgaaaaagtacgtttgcacagtatgtggttgggtttatgacccggcagaaggagatcctgaaggtggaatagctccgggaacagcatttgaagatattccagatgattgggtttgccctctttgcggagtaggtaaagatgatttcgaagttcaagaagattgatcccatcttataaccggatatcatataaagcggaggagtttcttctgtatgatatatcagatagcgcgattaattatttagttgcgctatttattttacattattataaatggttaatcttttaaaaaaagagcgtaacctataacaggttgcgctctttatggtataaataaagaatgttcttatttcttttcttgtttttcaggacgaggcagtaatactttgtgagagagtttaaatttacctgttttggggtcaatatcaagtaatttcacttctatttcgtccccttcttttaaaccggcctcttctattgtttcaagacgtttccagtcaatttcagagatatgcaacaatccgtcttttccaggcaagaattctacgaacacaccatatggcattactgaacggactttacctacatagacttcaccgacttcgggaacagcaacgatacccttgataatgcgcatagcatcgtcaatacatttcttgtttgttcccgcaatttcaatacggcctaccccatcagtttcttcaatcgtgatggttgctccagtctcttcctgcataccttggataatctttccgcccggaccgatgatagccccaatgaactctttaggaatagtcatcgtttcaatacgaggagcatgcggtttcaaatctttacgaggctcggcgatacattcggttaacttgttaagaatatgttcgcgtccttcttttgcttgcagtaacgctttttccaagatttcgaatgacaggccatctaccttgatgtccatctgtgtagcagtgataccatcacgagtacctgtaaccttaaagtccatatcacccaagtgatcctcatcgccaagaatatcagataatacggcatatttttcttcacctgcattcttaatcaagcccatggcaatacctgaaactggttttttcatggcaacaccggcatccattaatgcaagggttcctgcacagacagtagccattgaagaagaaccatttgattccatgatatcagatactacacgtactgtgtacgggtatcctgcaggaatttgtccttttaaagcacgccatgccaagtgcccgtgcccgatttcacgacgacctacaccacgttgtgcttttgcttcaccagtagaataaggagggaagttgtagtgtaacaagaatcgttctctgtgttgatccagaacatcgtctacaattttctcatctagtttggtacctaatgtgacagaagttaaagactgagtttcaccacgggtgaagatggcagaaccatgaggaccgggcagataacctacttcgcaccagatagggcgaatttcagtcgtcttacgtccgtccagacgcttgccttcatcaagaatacaacgacgcatagcttccttttccacatcgtggtagtaacggtcgattaatgtacctttttcttccagttcttcttctgtatattgagttttgaattcatcgcggatggcgtcaaaagcatcctgacgttcatgcttgtttctgtttcctgaagcagcgatggcgtatgctttatcgtaacaagtttcgcgtacagctttgcgcaaatcttcatcgttttcttcgtggcaatattcacgttttactgtagaaccgacctcttccatcagctccatctgcgctttgcaatgaactttgattgcttcgtgagcagccttcatagcagccagtaagtcttgttcgctgacttcctgcatttcgccttctaccatcatgatgttgtcatatgtggcagcaaccatcagatccatatcagctttcccaagttgttcgaaagtggggttgataacgaactgaccatcgatacgtgctacacgtacttcagaaatcggtccgccgaaaggaatgtcggaaacggctaatgctgctgaagcggccaatcctgccaatgcatcaggcatatctattccatcagctgagaaaagaacaatgtttacgtaaacctctgcatggaaattatcgggaaataaaggacgcaatgcgcggtctaccagtcggcaagtcaggatttcataatccgaagctttgccttctcttttggtaaagccaccgggaaaacgtccgaatgctgaatatttttctttgtactctacctggaggggcataaaatctgtaccgggaactgcatcttttgctgcacaaacagtagctagcaacatggtgttacccatgcggagcattacagaaccgtctgcctgttttgccagctttcccgtttcgagtgtgatggttctaccatcaggaagctcgatcgtcttaacaataggattgatcataaaaaatgttttaatatatttttcgtctaaaattcgtgcaaagataggcatttattcttctaatttggtgagaatgagataaaaagttactatgattactgttttttttcattttaatgtgtaagaaggtggataaatgctttgacaaaccacgaaaagacgtatctttgcattcaaaattattaagagaacacacatttatattaattttagcgatgaaaaagaatgtatattttttgctcgcacttctgttgatagggttgagcgcctgcgacaatgaaccgaagttcaaagttcaaggtgaaattaatggtgctgaagataagatgctttatttggaagcgtcgggattggatggcatagtagcgcttgattcgacaaaattgggcagtagcggaagttttagttttgcgcagaagcgtccggaatctcctgaattctatcgtttgcgtttggataataaagtgataaactttgctgtagactctacggaaactgtatcagttaaggctgagataaatgattttgcgactgcctatcgtattgaaggttcggaaaacaatttgaaaattaaggaattggtgttgctacaagctgatttgcagaagaatgtggacaaactcggccagaatcgtaatatccctgcgggtatcgcacaagacagtcttttggctatggtaaacaattacaagaataaagtgaaacgagaatatatctttgcggctccaaatatgccatacgcttatttcgctttattccagtcgttgaatgggtatatgatttttgatcctttgacaaataaggaggatgtgaagtgtttcgctgcggtggctacgagtctgaataatgcttatccacatgcagaccgttcacgtaacctgtataatatggttataaaaggaatgaagaatacccgtactccccgtcagcaaaccatggaaatccctgaagataaaatcaaagaagctagcattattgatattcagctgaaggatttgaaaggcaatacacgcagtctgaccgatttgaagggtaaagtggtgctgatcgattttactgtatataacaatgcaatgtctgctgcgcataatttggcgttacgtgaactttataataagtatgcttctcaagggttcgagatttaccagatttcactggatggtgatgaacacttttggaaaacatctgcagataatctgccttgggtctgtgtacgtgatgctaatggtgtttattcttcatacatttcattatataacgtaactaatctgccttcgatatttttggtaaatcgtaataatgaattgagtgctcgtggtgagaatattaaagatttggatgaagccattaaaaaactcttgtaaaaagctaattatgagttgaatttgtttaaacatgttacatagcatccttataaacttgactcgtattagataaaagtctatctttgcagtacttgaaataccaaagagggttccgacatttccatgtcggaattctttttgtttttataggtataactggaacaataaataattatataatttaaaaggaggaaaacattatggcttatatgtcagaagaaggttacaagcaactgattgaggaactgaaatatctggaatcagtagaacgtcccaaaattgtgtcggctattgccgaagcgcgtgataagggggacttgtcagaaaatgccgaatatgatgctgccaaagaggcgcaaggtctgttggagatgaagatcagccagctgaaatcaactattggtgatgctaaaattattgatacttcaaaaatgaacgcagatacagtgcaaattttgacgaaagtagaattgaagaatgtcaagactggaatgaagatggtttatactatcgtagccgaaagcgaggcgaatttaaaattgggcaagatttcggtaaatactccgatagcacagggtttgttaggaaaaaaagtgggtgatgtggctgaaatcactattccgcagggtaaaatcagcttagaagttgtgaatatttcattttaatattataaggcaggtccgctatgcggggctgccttatttaatacttatagatatggcaacaatatttagtagaattattacaggtgagattcctagctacaaagtggctgaaaatgatcagttctatgcttttttggatatcaatccgttaaccaaagggcatacgttggttgttccgaaatgtgaggtggactatatctttgatttggaggacaatgaactggctgctatgcatgtttttgcaaagagcgtggcacttgccattcaaaaagtttttccgtgtaagaaagtaggtgaggcggtaatcggattagaggtccctcatgcacatattcatctgattcctattcagaaagagtcggatatgattttttctaatccgaagttgaaactgacaaatgaagaatttgtggaggtggcgacagcaatcaatcaagcctgggaaggtggtgacaagtaatctttttctttcttagtaaatataaagagcgggaaacggatattctgtttcccgctttcctttatgattaaattccggtcacctgtctttatacaaactgatctcctagcttgatttgtacgtcattcacgaattttcggatagcgctttcgtcatcttttttgcaaatgagtaatacattgtctcttgcggctactaaataaccttctagatcctgtattacggctaatttcccttctggcactactattacattattatagctgttatataataaggagtttccgtttactacaacgttaccttcttggtccttggatgatatatcatacagggagccccatgtacctaaatctgcccatccgaagtcgcacaattggacgaaaacattgttggccttctccatgattccatagtcaatggagatattgggacaggaagcgaaatcttcttctccgttagtcagtttggtacaaacttcgggcataatctcattgaaggcttctaaaattgtattgatattccataagaagatccctgagttccaatagaattctccactttctacgaatactttggcaaattccagttggggcttttcaatgaatgtttttactttaaagaagtctccttgtttttcttcctcaatctgaatatagccataaccggtttccggtctgttaggtttgatgcctaatgttagtaattgaggagagtttgaaacaaattccagtcctttcaaaattgcagctttaaattcatcttcttttaaaatcagatggtcggacggtgcgacaatgacattggcatttggattgaatttttttatgtgataggaagcccaagctatacatggagcagtgcttctgcgagtgggttccaataaaatttgtgatttgtccaattctgggagttgttcttggaccagttctttatacagcacgttggttgtaataaagatgttttctatagggactatttttttataacgatcaaacgtttgttgtattagagaacgtccagtcccgaagaaatcaaggaattgtttaggaaggtttttgcggctatatggccaaaaccgactacctatacctccccccatgatgacacaataattattgctgtttgtcatgatataaaatcgttttaaagtttccgctaatatagggcttatttttagaaaaccattgtccgttatcccataaatcgtagtatatttatctttttttgaaaaaaagtgccgaaaagtttgcagatatgaaaaaaagcagtacctttgcaaccgcaatcgagaaacaaataaggttttaaaagatgcccagatggcggaatcggtagacgcgctggtctcaaacaccagtggattcacttccatcccggttcgaccccgggtctgggtactgaagcggagaaagttgaaaaactctctccgtttttcttttctactcctcgtaactcgttggtttgctgatagattaaatcaagcactttgttataagaattggttcgatatgtttttccgtcaaattcgattttttcaggaaacatcgaacttatcagcttaattttcacccctacagacgcatctcttatatagctatctatattgtttatcagattgatagagtagtttagttttggttcgatattactacggttagggttctcacgcatttcaatctgttgttgcatggctgaggcttcttttgtatatctctccaacattctgttatattcttctttggttaaatctccgtccagatatttatcttcaatgctgttgatgcgtttttggacggtagaaagttcattttgcagtgctgctacttcttttttactttctcctttgcgttcactttgcaaatcctttagaatttcgttatacaagtccaataccgttttattgggctttaattgggctgtgtatcgagcgaactcttcgtttacgttctctgctctcattcttatatgtttttgattgttacaacaaaagtagtaggtgtatttgccgccattgcccgaacttgtcgcaccagttagggcacaaccacatacgggacagattaaaaacttccgcaaatacaaatcggggtttatagctttggatagtttgggtgttttctttcttttaccgtccaaagtctcttgaactttatagaatgtttcttcgtctataattgcttcatgttcaccgtttacataatattcgggttctcctttgtatgctggcacacgtattttgccaatgtagaatttattacgcaacatttcaagaaatgaactttcaggtatattatatccttttcttgcaaatttcctacggatatagcaaggtgtttcaatatctttagccacttctttaaacatggcttgtataaatggtgctgtattggtatctatttctacatgggtttcatgtttgctaatacgtacattcttatatccttcttggtgttttattagcacattttccttttgccaatgttccatgaataccgtccattgtgtcttttgaccttttgatgttgtcgcattgtgcctgtattccaataataggggccaggtgtctgaattgaagtctaaaggtgcttcaattgcatttggttcaactcccgatttaagtaattcttttaggttctcactggcactgataatgtctcgtgaatatctatcccactgcaagaatagtaatttgtttactctacttttgtttttacgtatataattcattattccttgtatgacaggacgcttttcaaatgttttagcactctcatcctctctgtatgggatattgtcaatgatattatatcccatttggttacaatacttccgtagacgttcttcttgtacgtctaagctggctcctaatgtttgttcatttgaacttactctataatatattattacatttgcattaatatattattacatttgcattcataattcttgttttttagttaatgctattttttcattctctatctgcaattttgctaattgtaccttgcagatttacatacctcatttttatgtaatttgacatattctacttttagcaagatattactttacagttgttaactcttttaaagtgtccgtatcttcattccgattgctaaaaattgttttcctattttccatccgataactgtttcccgacagctgtataatctcacaacagtagagcagtctgtcaagcaatgccgctgcgacagcttcctctcccggtgttaccagtcattctgtaagggagtagttggctgtaacgataagcgatgtcttttcctgaaactcattcaccagtttgaacagcaacatgacattttctcttttcaagggaaagagtgtggcattgtcaatagccagcagctgtgccttcgtgatccgtttgtaagttttcatcgcatgccgggaaacatcccttgtcttcaggcaggtcagaagatc

SEQ ID NO: 14440 - DNA, 6755 bp, Unknown
  gut microbiota DNA sequence
aatacttctactttctgctcttctacttctaccagaattccgatgcgttattatggatttaatattagttggcgctttggggagttgaaggctcaggtaaaaaaagcagcgcgaagcattaataatgatgatttgaaaagtggaggaggtaatgctgggaccggtggagggataccggctaattaaaagttaaaacgaaaccacctgttaactgttaatttagggggtaaaaactgttatttgatagtttataccccctttgttgttagtttttctgtcgtgacttttataagaagtcgttaatattgcaacagaaaacaaaaacagaaaataacaacttaaaaatagattaatatgaagacagtcgactttacacagcatttactaagtatacaaaccgaattatttcgctttgcatttaaattgacagctgacagagaagaggctaatgatttgttgcaggaaacttcacttaaagctttggacaacgaagagaagtttactccagatacgaattttaaaggatggatgtacaccatcatgcgtaatatatttataaataattatcgtaaaacagtgcgtgatcagactttcgtcgatcagacggataacttgttccatttgaatcttccacaggaatcaggattcgattctacagaaggtgcttatgatttgaaagagatacatcgtatcgtgaatgcgttgcctaaagattaccgcgtgccgtttgctatgtatgtatcaggatttaaatatagggaaattgccgagaaactgggacttccgttgggaacagtgaaaagccgtatctttttcactcgtcagaggttgcagaatgatctgaaagatttccgttaagttgactctctatctttattatataactttgacttttatcatcacgccgactgttcgcgaagaatcgtcggcgtttctttttaggatttacgccatataagggggcgaagtaagtaatatcctattaaggcagctagtccaactccaatgctgtttgccagaaaatccagccagtcaccgctgcgggtatctgtgcaataagcttgcatcagttcgatacacccgctcatagctacaggagctatgatgcctccccatattacatgattccaattgacagtcttatgattcctcagatattctatccataaaatgagacagagtcccccatacatgcatatatgcactactttgtctatgtaggggatttcttccatatctgttttgggaggagtgaaaaaggaaagataaaagatgatagctacaatgatcaaggataccggatattttctaaaataatatagcatactttaatttttttgtgattcatcgcaaaagtacgattaattttatacttttgcaggctaattagtgttgatttataataatttgatagttttttatgcaaaaaagcgaaagagtaaatttcggaagtaagattggggctgttctggcagcggcaggttcggctgtaggacttggtaatatatggaggtttccctatgagacgggaaatcatggaggtgcggcatttattttggtatacttggcgtgtgttcttatgttgggaatgcctattatgattgccgaattcacagtaggtcgtcattcaaaagcaagtacgggacgtgcttataaggttttggctcccggaactcattggaagtggttgggatatttgggagttttggccggttttcttattctaggatattattcggtagtggcaggatggactttggagtatatattggaagcgggagttaatggttttgcagataagaagccggaagattttgtggttgctttccagagtttttcgaaggatcctgttcgtccacttatttggctggtcatctttttattggttacccattttgttatagtaaagggagtgaaagatggaatagaaaaatcttcgaaggtgctgatgcctgttttgtttatactgatagtagttttggtagggtgttcattgtcgcttcccaatgcggaaaaaggtttggagtttctgctgaagcctgattttagtaaagtgaacggagatgttttcttaggggctatggggcaggcgttcttttccttaagtttgggaatgggatgtctttcaacctatgcttcttattttgggaaagaaaccaaactgggaaatacggctctgagtgtcggtgtgattgatacttttgtggctgtcttagccggattgattatttttccggcagccttttctgtaggtatccagccggatgcgggaccatcattaatttttattacattgcctaatgtttttcaacaagcttttagcggtgtgccgatattagcttatattttctcggtgatgttctatgtcttgctggctttggctgcattgacttctactatttctttacatgaagtggtgacggcttttctgcacgaggaattcaatttaactcgtggccgtgctgctagattggtcaccttcgggtgtattataattggggtcatttcttccttgtcattggggggtatgcagaaatatacgctgtttgataagggattctttgacttgcttgattttgtcactgcaaaaataatgcttcctttgggtggtttgctggtatgtatttttgtaggatggtatttgaaacgttccgtttcttatgaggaattgaccaatggaggaaagctgaaagcaggtcttttcaatctgtatatctttttgttgagatacgtggcacctgtggctatcattttgatttttatcaatgaattagggctaatttagaattgtaatgtggaaagactttttctatttctcgaaaagcgaacgcagagctatactttttttgttgactttgcttttcatatttatgtgtatatgggttctttttccagtaaaggaagagtctttggaacaggatcaagagggaatagaagaaataaaaaactttctggccggagtacatgaaatggaggagaaggaatctctgcaatattcctatgataagcctaagagaatagaggtggtattggctgcctttgatccaaattcagctgattccatcgaatttttgcaatgtggattgcctccttttattgcacatactattttgcaataccggagagccggcggtaaattcaggacagcggatgatttctctcgtgtttatggcttgtcgtccgagaaatttaatatcttaaaaccctatatccagatttcagaggcttttcggcggaaacaggatacattgcactttatcaaaaaggtggagaaagatacgttggcagcttataaatatccggaaggaactttagtcgatttgagtgaagcggacactaccgagttgaaaaagattccgggaataggcagtggcattgcacgcatgattgtggcttaccggaaacgtttgggaggtttttatgacacggttcagttaaaggaagtgaactatgtagatgaggatatgttgaagtggtttaaactcggaaatacaccaattcatcggataaatgccaataaggctgggcttgacaaacttcgctctcatccttatatgaatttttatcaggcaaaggtgattatagaatataggaggaaaaagggaaaattaaaaagtctttcccagttatccttgtatgaggaattcactgagaaagacttggaacgtttgtcgcactatcttgctttcgattaattgttgggataaccagcagcttctgctatttttaccggaatttcggtattgtcgatgcggccttggaatagttgggcgccggctccgatagcgaatacggggacataacctcctgagtgccctccactggtccaacctactagagcgatgtcatccagaattctcttggcctcagctgccaaaggttcgtcttgttgatattcactttgggttaaatctatctctttaccgctaaatgattcatcatatactttcttcagggatgcttcttgcttttcattcagttgaatactatcccaaaatccgaaattatccttcaatgattgcttgataacttcccaaggtacttgattcttgtatttttttcttaattcgtttacaattttggtatatccgctttcacttactttttgtgattttaaagcttgtaggttcaaagtatacggaccttttcctaaaacgattcctccggtttcgtggtcggctgttactacaatcagggtttcatcaggatgttgttcgtagaattcgtaagcaacttttatggcattatccatatccatcacttcgtggaatgcagtagcggcgtcgttgctgtggcaagcccagtctattttacctccttcaaccataaggaaaaacccttttgatagatctttagataggaaattgattccggcacgggtgatttcagttaaagtcatatcgcctttttttcgatcgatagcataggggatagcactattgtctgttgctgtcgcaggttgtaagagaatcagtttatccgatttttttgcttttttctgatagtctttgtagccacgggctatggtatatccggctttgtccactagtgtatacaaactttctgaatttgaaccggcggcttttttgttggtgggatctaaaaagtctgatcctgcatagaaatcgaagttggcatcaatcaaatccagacccacgttgtaatagctgcttctttgtccttggtgtgcgtaaaaagcagccggtgtggcatggtctacgctgacactggtactgatacctacacggcaacctttttcttttgcccaagaagcaatactgttaactttggtttccagatcctttttcacacctaatgcgccattttttgttttgtttcccgtagcaagtgctgttcctgcagcggctgaatctgtcactccgttggttgccgagaaagtagtggctatggttgcataaggaaattgggtgaataataacggagtcacaccaattttgccttccaactccccacgatacatctctgttcctaaaacttggttaacacccattccatctccgatgaaataaaatacatactttgcttgctgtgcctgtacaaaaagaatggacaggaatacaaatacggtaataaatgatagttttttcatattaattgagttaatgacatttttctttttttagtctagcaaatatagggaaaaaagactttttatcggtatttcttttttgaataattgagatttaatgaccaaatactttttttgcaataagtttgtaaatgaaatgttcttgaggtgtaatataaaaaatctgtttgggagtagggaaatccgttttttgtactatgtatctgtttgctttcgacatgaatattgcatacagataattgctttaatattagtgattattaattataaatcttatatttgtctaatctagagtcagtaaggtaaagtatgggagaatttataaacgtattagtgtcaaaagggaaaagcaatttgataccggaaaaagacaacctgtatggacagtttgtcggtgaatgggattttgaatgggttgataaccaaggtacaacaggcgaaagacatgttcagggagagtggatattcgcttgggtactggaagggactgcaattcaagatgtgtttatttgtccttcgcgtaaggcgcggattaaagattatcaaccggatgcagcttatgcgactacggtacgtatgtataatcctaatacagaagcatgggatattttatatacggaattaggaggggctacacaactggaaggaaaaagagaaggaaacaggattgttcagacggaaattaatgagaagaatatacagtgggtgttttcggaaattacagcgacctcattccgttggcaacgtatggtaaagtgtccggatgatacttgggaaactgaagctgaactttttgcagttcgtcgatgattaagatttatatgcatattatataagtttgagatattgcagtctaaaatagacttgttgtagtagaagctcagaggtgatttgacgagtttataaaaaaagaatgtgtgaatgataaacaatctcagaaccgttttcttgcatttggcggagaaactgtattcaaactaaatcctgccagctatacgcaggaaaagatgtggggcaggtatatggaatctttgcgtaagaatctttctgcttatactcttgatgatgctcccgaagatgttcgggaactctacaaagatgaattcatccagctttatgcttcaagtataaggtgtttttttaatatgcatcaaattgggatttatatcgggaaggagtagttttgctccaagacttaatcaaatatggaggcaggtcagaagtggagaaagttataatcgagctgaaagctcgtatacctcgtcatccagtctatattgccgtattttgtgttttgtgagaaaataaaaaatcctgatttccgaaatcaggattttactgtctttttttcttcaaggtggtgccaccagcaaccgaaaatcagtttgtatagcactatttctcaataagttatatctttatcacgatgttagtcccttgaataaggttttcacagctttgcaccgttcgacatcagtttgtatcttgggtacgatttctgaatacaaagatagagattttttgttatagttactatatttgtataaaatagtttttgcaacactagtgggcactttaaattaaacatcgttctttgaaatctttgataatcgcatagttatgtgtctttttggggcgtgacgat

SEQ ID NO: 14441 - DNA, 22103 bp, Unknown
  gut microbiota DNA sequence
gtcagcgaactttatttgaaaaaagaaaatcctctgaacaactgggcatacgccatgctaagccaaatgtacatcgctctgccatttgctttgttgaatgtattggctttccactcggacgaaacagcgagtatttcacaatacaatgctattctcccactatctatttttatttttaactgggtgaatgatacgggggcttattgcacggggatgctgtttggcaaacacaaactgttcgagcgtatttcccctaaaaaatcgtgggaaggttctatcggtggcagtgtattctgcatcatatcctccttcatactggctcatttctttcccttcatgtccaccggggtatggattggactagcattaacagtagtaatattcggtacctggggtgatttgacggaatctttattgaagcgccgtttaggtatcaaagattcgggtaatattttgccaggacatggtggaatgctcgatcgtttcgacagcgcaatcctcgctatccctgcagcagtagtctatttgtatgtagtttctttattttaattccgccagatccaaaagattaaaatcaggcgtactcttgtcagtaagcgggtaagagaagatatatgttttttcttcaccgcctacaggacgtaccagcacctttaatccttttaattcactgttttccggtgagtaacttcctaatttgaaagaaaccagaccaggtaccaaccgtccttggctgccattattgttatagcggagttccaaatgcgcatacccgtcatttaccaaaggaatcatctcattgacaaccagattgagaataggcctttggggattgggaaaattcagcataaaacgcacattcatatactcattggaaaaccatatatctttaatctgcactttcatatttcctatactatccatattatcaggattcagtccgataatatcttgaacaggtaccatggcatagtcattcaaacggatatcataggcaaaaccactctcaccagcttccagaaaggtataacttccaaagatacgctctcccgtcttcaaatcccggtaaggtacagcattctgtaccacccacaatttctctccattatccaatataaaataaggagcgtcatactgaggttgcttttctactgtagccatagctatagttactgtactatcgggataactttcgtcattgccacaagctgaaaaggcgaatactccgctaaaaagaagtaccgcccctaacatcgatgaaaaagaatatttcatattttccggggtttaggttatttacccgaaagaacaaaaaaacagcgtgaaaagtttatttcttcagtaaggccaccatcttgcgtgccgctgcctccgaagctcctgccggacctaaaatttgaattatacgatcatactcttccaacatcttattcctatataccttattatatagaagagcttccaactccgaacgtacattatctaccgtcatcgtatcggctaccagttcacgcaccacttccttatcggctaccagattaaccaacgaaatatatttcacttttagaatatgccggcgaagaaaagcgataaacgtccctaccggagtatagtaacacaccacttgaggaacacggaaaagagctgtttccaaagttgcagtacccgaagtcaccaatgccgcctgcgcgtgctgcaacagcctgtaagtctgtccgaaaatgattttaaccggtacattcggatttatataacccgcataataggcagggtccatccccggagcccctgccaacaccaattgataatctttggtaaacggagcagcagcctccagcatcatcggtaggttgtctttgatttcctgtttccggctgcccgccaacaatgcgataacaggcttttcggacaaaccattatccgccacaaattccggaaacccatccggatgtttcttacaataagcatccactgcatctacacaaggattacccacataatgaacagggtactgatgtccggcaaaaaactcaatctcaaaaggcaggatagaaaacaattcgtccacatcccgcttgatatttttaatcctatactctttccaagcccatattttaggagaaatataatagtagacaggtatttgcgtctgcttctttataaactcggctattttcaggttaaagccaggataatccaccagaatcactacatcaggagcccaacgaacaatgtcctgcttacattctttcatattccgaaagatagtacgcaaatgcaacaacaccgggataaaacccatataagccagttctttgtaatgcttcacccgcgttccaccaacagccgtcatcaagtccccgccaaagaaacggaattctgcttccggatcttcctgtatcaaggcacacatcaaattagatgcgtgcaaatcgcctgatgcctcgcctactatcaaatagtatttcatacttccagattccagtttttcaactcattcatcatcccataagcggtcacatcaatttgggtaggagttaccgccacatacccatgccctaatgcccagtggtccgaatcttccgcttccggttcatagttatcaaactctccggtcagccagaaatactctccaccccgaggatgcagactacgcttccattcattaatccaagccccattcgtctgacggcagatgcgtacccctttcaaagaagccgtatccggaaagttcacattcaagcaaatacccaaaggcaagccatgctccaggacctgctcagtaatacggcgtatataaggcagcgatgaagagaaatcagcatccgcaaaatgattacataatgaatatccgatagaagaaatccccttcaggcacccttcaatcactacccccatcgtaccggaataatgcacattcactgaagaattatcaccgtggtttattccacctatcaccacatcgggacgacggggaacaactgtatgcaatgccagtttcacacaatctaccggtgtacccgtacatttatacacagtcaagtcctcctcttcacgtaccttgtaataccgcacaggatgttcggaagtgatcgcccccgaagctcccgaacgaggaccatccggcgccattacgatcatttcacccactccacgcaacccacgtatcaactcattcaatcccttagcttccacgccgtcatcatttgacagcaatatcaacggtttttctctcttcatatttttccactctttttctcggagcgtaaagatacaactctttgccggaactacccctcgccagaaaagaaaattatcttaatgttctacaacccagtgctaaaaatagaatagaattgaatgaaaatttctatctttgccgccgttgagttattaacaaaaccaatgagttatcaacagttttgctaatgtctgccgttttttataggtacaatcacctattatttgttacttcgcagcgagaaaaactgattaatatgggaaaaattattgctttagccaatcaaaaaggtggcgtaggtaaaactaccacaacgattaacctcgcagcttctctggcaacgctggagaaaaaagtgctggttattgatgcagaccctcaggccaacgcatcatcaggattgggtgtgaacatcaaagaggtagaatgctctatctatgaatgtattatcaacgaagccgatatacgggaagcaatttataccaccgacattgacggactcgacattgtatcttcacacatcgacctggttggcgcagaaatagaaatgttgaacctggaagaccgcgagaagatcatgaaaaaagtattagcccccatgcgggacgaatatgactatatcctgatagactgctccccgtcattaggcttgataacgatcaatgcgctgacagcagccgattcagtaattatccctgttcaatgcgaatattttgcattagagggcatcagcaaattgctgaataccattaagattattaaatcgaaactgaatccttcactggaaatagaaggcttcctgctgacaatgttcgattcacgtctgcgtctggccaaccagatttatgatgaagtgaaacgccattttcaagaattggtattcaagacaattgtacagcgtaacgtcaaactgagcgaagctcccagccacggcattcctgcaatattgtatgatgccgactctaccggagccaagaatcatttggcattggcacaagaaattataacacgtaacagtaagtaaacaatggcagtacagaaaaaatttgctttaggacgcgggcttgacgcactgatctcgaccgaagaagtaaagacagccggctcatcttctatcaatgagatagaactgagcaaaatatccgtcaaccctaaccaaccgcgccgtgaatttgatccggtggcgttacaggagttggctgactctattgccgaaattggtatcatccaacccattacgttgcgtcaactgagtgaagactcttaccagatcatagccggagaacgtcgttaccgcgcctccatacaggcaggacttaaatctattccggcatacatccgcacagccgatgacgagaatgtaatggaaatggcgttgattgaaaatattcagcgtgaagatttgaattcattggagattgcactggcttatcaacatttattggaacaatatgcattgacacaggaacggctgagcgaacgtgtcggaaaaaaacgtaccactatcgccaattatctgcgtctgctgaaacttccggctcagattcaagtagcattgaaaaaccgcgaaatagacatgggacacgcccgtgccttattgtccttagatgatcctaagacccaaatacgtatctttaatgaaatacagtcacaaggctattctgtccgcaaagtggaagaaattgtcaaggcactgagcagtggcgagacagtggacagcggtgggaagaagatcaaaccaaaaggttccaaactatccgaggaatacactttgctgcaaagccatctctgcggattcttcggttcaaaagtacagctttcatgcacagccaaaggaaaaggcaagatcagtattccgttcaacaacgaagaggacttggaacgaatcatggaaatactggattcactgaaaaagaaagaataaagcgttattactacattgaaaagaaaaacatccacatataaagtgtttacattcatgcttttatgccttatgatggctggaagcctgaatgttcacgcccaaaaggcacgcaaccgccgtatgggtataaaggcagattctatcatacaagtcaaagattcacttgtcattgacagcctaaaattgttggaagaacgacaaaagatagaaaatatggaagcacctgttgatactgccgctttagtccgtaaaaatgattccatacagaaagcaatggctgccgaaacaaaaccccgatttattccgaactccaaccgtgccatctggctggcgttggtaattcccggcggaggacagatatacaaccgtaaatattggaaactgccgatagtatatggaggatttgtgggatgtgcatatgcgctgacctggaacaacagaatgtacaaggactattcgcaagcctatctggatattatggacgatgaccctaataccaaaagctacgaagacttcctgcctcatggcgtgagtgcggaaggtatggaggatacctttaaaaaacgaaaagatttttatcgccgatatcgggatttaagcatattctgttttatcggtgtatatatactatctgtcatagacgcatacgtggatgctgaactatctgattttgatatatccaaagacttaggtcttcaaatacaacctgttatttttaatgatggccggagcaggatacctaatacaataggcctgcaatgcagcttcaaattttaatcgcatgaaaaactttttaattggtttatttacatttataggaacaacgggaatcaacgcacaaacccaaagtattaccgttcactcgcaaactacaggaaaagaagaaattattgatgttcctgaaagtatgcagtcagaaatggacagtctttactgggactggcaatctaagaattacatcacattgggagagaactgcacaatggcctctaccaaccctgttgtaagtgattccatctatatggatcgtctgtcacgtatcccctctatcatagaaatgccttacaacgaggctgtacgcaaattcattgatatgtatgccgtccgtctgcgcaataaagtatcctttatgcttgcggcaaccaatttttatatgcctatctttgaagaagcacttgatttatacgaccttcctcaagaactgaaatatctgccggttatagaatctgccttaaatcctgttgcagtttcccgccagggagctaccggtttgtggcagtttatgctgggtacaggaaaaatatacgggctgaaaagcaatagtctgatagacgaaaggcgggacccggtcaaatcaacttgggcggcggcacgttatctgaaagacttatatgacatctatcaagactggaacctggtattggcagcttacaactgcgggccaggcactatcaacaaagccatacgccgtgccggaggagccacagattattggacaatctacaactacctgcccaaagaaacccgtgggtacgttcctgctttcattgcagcaaactacatcatgacttattattgcgaacatgacatctgtcccatggaaacacagctccccaacgctacagacaccattcacataaacaaagacctccacttacaacaagtggcagaagtatgcaacatcaacctcgaccagcttcgcagcctgaatccccaatacaaaaaggatattattcccggtaacagcgagttgtgtgtacttcgtttgcccaataactttgtcagtactttcattgaccgccaagacagtgtattcgcttataaacccaatgaatatctgaccaaaagaaaaacggtagctatcaaagaaacaaccagtagcagaaaccgctcatccaagggaactctttatcataaaatcaaacaaggagacacattgggaggaattgccgccaaataccacgtatccatcagtcaattacgtaatctaaacggtataaagggcaataatatcagagccggaaaaagtttgcggatcagatgattgataaaaaatacagatttaacactatacattttctgaaaatacttgcttgaatatgttttttgtatatttttgcagtatagattataggaggcaaagatatgacggatgaaaagcagactcaggaacaggcggatgaggaaatgataaaccaagggtttcaggaacttttggacagttatctagcgaccaaacaccgtaaaaaagtagaaatcatcacaaaggcattcaattttgccaaacaagcacacaaaggagtaaaacgacgctcgggtgaaccatacatcatgcatcccatagccgttgctaaaattgtatgtaccgaaataggactgggatcaacttccatttgttcggctttactgcatgatgtagttgaagatacagactacactgtggaagacatcgaaaatttgtttggtcctaaaattgcacagattgtagatggcctgactaaaatatccggcggtatattcggagaccgggcttccgcacaagccgagaatttcaagaaattgctactgaccatgagtgatgatatccgggttatcctcatcaaaatagccgaccgtctgcataatatgcgtacgcttggctccatgcttcccaacaagcaatacaaaattgccggagaaaccttatacatctatgcgccattggctaaccgcttggggttaaacaaaataaagacagaactggaagatctcagtttcaaatatgagcatccggaagaatatgcacagatagaatccaagctacaagaaacacaagcggaacgcgaagaagtattccgtgaatttacagcacctatccgcgcacaactggacaaaatgggtatcagttatcaattgatagcacgagtaaaatccccttattccatttggaacaagatgcagaccaagcatatcacatttgaagaaatatatgatatcctggctgtccgtatcattttctgtcccaaaaatccggaagaagaacttaatgagtgctttaacatatacgtatccatatctaagatttataaaccgcacccagaccgcttgcgcgactgggtaagccaccctaaagccaacggctatcaggcacttcacgtaaccctgatgagtaacaaaggccaatggatagaagtgcagatacgcagtgagcggatgaatgacgtagccgaacaaggctttgccgcacactggaaatataaagaaggcggaggcagtgaggacgagggtgaactggaaaaatggctgcgtaccatcaaggagattctggacgatccgcaaccggatgccatggactttctggataccatcaaactgaacctgttcgcttctgaaatatttgtcttcactccgaaaggtgaaatcaaaacaatgccgcaaaactgtacggcactggattttgcattctccatccatacattcttgggcagccattgcatcggagctaaagtcaaccacaagctggtgcccttgagccacaaactgcaaagtggcgaccaggtggagattcttacttccaaatcacagcatgtacagccttcgtggataaactttgccaccaccgcaaaggccaaagccaagattttggccatactgaaacgcgaacagcgaggcatgcagcaggccggtgaggaaatgttacgggaattcttttccagagaaggagtagagtacactcccgaaaatatacgaaagatctgtaatctgcataccatcaaaacacaggaagaattgtttgccgccatcggattaaaaacaatcattctaggagaaaacgacaagaacgaactgaaagacaaaccgacttccagtaactggaaaaagtatatctctttcgccttcggaggcagcaagacaaacaaggaaaaaccgacagaagagaaggaacccttacaaaagatagacagcaagaaaatattgaaactgactcccgaagctatccaaaagaactatgtgatagctgaatgctgcaagcctattccgggagatgacgttttgggatatataggcgacaataatcgtatcatcatccacaaacgccaatgcccgttggctaccaaactgaagagcagttacggcaaccgcctgttggctgtccaatgggagactggaaaatccttgtactttcctgtaaatatctacataaaaggtattgaccacatcggtctgttaaataaggtaacagaagtcatttcacaacaattgaatgtaaatatccacaagttgaatattgaaagtaacgacggtatctttgaaggaagaatacagctatttgtacacgatgtggatgatgtaaaatccatcactaccaatctaagaaagatagatgagataaaaaccgtcacccgtatcgagaagttcgaagaccagccgaattaaccaataccaatttcaccgcagactacactgattgttcataacgattatccgcaactcgtttttaatccgtgcaatctgtggtgaatattcttaagtcagataatccagttctttacgcatactaaccaattcctcacgtatcagtttcaatctgtccaaaatctccgcagtacggatagtggtttctctgttcatcttcagtttctgcttggccccctgtaaagtcatccctttctctttcaccagatgatagaccagccggatattctcaatatcctctttacgatactgacggacattccctcccgccttcttgggagaaataataggaaattccttttcccaataacgcaacaaggattcatttacatcaaacatctttgccacttcccctatggaatagtaaagtttcagttctttattaggattataggccatggtaaattaaaattgagaattaaaaattcacggctagtcaaatactttaccgtggttggctgcaatctgtatcatcttatcataatcttccgcgctcaaatccatgaaataataattcacaggattctgcacttttcctttcacgtgcacttcatagtgcaagtgaggtccggtacttttacctgtacttcccacagctccaatcacttcacccctgaccaccttctgtcccggtcttaccttgtaagcactcagatgtgcatagcgcgtaagataaccaaagccatgattcacttcgatggtattcccataacctgtctcccatccggccttcaccacaacaccatcaccggtggcatacaccggcgtgcccggactagcagaaaagtccatccccgcatgaaacttggttgtcttataaataggatctatacggacaccgtaaccggaagccgtcttcttcaaatccttattggaaacaggctggatggccggaatacatttcagcatctcgtcatggctcttacacaaatccaccacctcgtcaaaagacttggactggatataaagctgccggttcaacatatccagtttctgagtggtattgataaccagatcggcattcgccatatcccgtaactgttcatagcggtttgtccccccataaccggccttacggacagcatccgaaacaggatcggcctgcaacaccacccgatacaaattatcatcacgctgctggatatcctgcatcacccccatagcctcatccagacgatgagacaacacattatactgggccagtaagcgagcattctctatacggagctctttctcggacggagaaccaaagatcaataataaaataatgaaactgcctgcccccaagcccattcctacaaacaaacggcgcaagatgcttaaggcgcgctgcctcactgtggggtaaatgcggtcataagttcgggtcttaggattataaatatagtagactttacgcatctaattctgctttttgaagtttttaatgcacaacacatcaatattttgcacaattcttgtcgacaaaaataataaaaccaattatctttgcaaatcctttttgagaatattaactagaagacaatatattaagcgacatgatgacagctaaagaaattagagattctttcaaaagctttttcgagtcgaaaggacaccagattgtcccatcggctccgatggtcattaaagatgaccccacattgatgttcaccaatgcaggaatgaaccagttcaaagacattattctgggcaatcacccggccaaatacaaaagagttgcggactcacaaaaatgtttgcgtgtaagcggcaagcacaatgacctggaagaagtgggacatgatacctaccaccatactatgttcgagatgctgggcaactggtctttcggagattacttcaagaaagaagctatcggctgggcatgggaatatctggtagatgtactgaaaatagatccgaaagatctgtatgccaccgtattcgaaggaagtcccgaagaaggactggaacgggacaatgaagccgcctcttactgggaacagttcctgccgaaagaccatatcctcaatggcaacaaacatgacaatttctgggaaatgggtgatacaggtccctgcggcccgtgttctgaaatccatatcgactcacgttcggaagaagaaaaagctcaaatccccggcaaccaactggtaaataaggatcatccgcaagtaatcgagatctggaatcttgtattcatgcagttcaaccgcaaagcagacggttcactggaaggtcttcccgccaaagtaatcgataccggtatgggattcgaacgtttggtgcgcacactgcaaggcaagacatccaactatgacactgacgtgttccaaccgatgctgaaagccatcgccgaaatggcaggaaccacctatggccaagacaaccagaaagatatcgccatgcgcgttatagccgaccatatccgtaccatcgcattctcaatcaccgacggtcagttgcccagtaacgcaaaagccggctatgtaatccgccgtatcctccgccgtgccgtccgttacggatatactttcctgggacagaaacaagcattcatgtacaagctgctgcctgtattaattgagaatatgggcgaggcctatccagagttgaacgcacaaaaaatactgatcgagaaagtgatcaaagaagaagaagaatctttcctgcgcacactggaaacaggtatccgtctgttggacaagactatgaacgatgccaaagctgccgggaaaaaagagatcagcggtgtggatgcctttacattatatgacactttcggtttccccctcgacctgacagaactgattctccgcgaaaacggcatgactgtaaacgaagaagagttcaacgccgaaatgcagaaacaaaaagaacgcgcccgtaacgcggcagccgttgaaactggcgactggatcaccataaaggaaggtgacacccactttgtaggttatgactttaccgaatatgaaaccagcatcctgcgctatcgccagatcaagcagaaaaaccagacactgtatcaaattgtactgagcgatactcctttctatgccgaaagtggtggtcaggtaggtgatacaggggtgatcgtaagcgaattcgaaaccatcgaaatcattgataccaagaaggaaaacaaccttcctatccatatcaccaaaaaactgcccgaacaccttgacgttccgatgatggcttgtgtagatacagaaaaacgtgccgcctgtgccgccaaccactcttgtactcacttgctggacgaagcgttgcgccaggtattaggaactcacgtagaacaaaaaggttctttggtgactcctgagtcattacgtttcgatttctctcacttccagaaagtgactgacgagcaacttcgtgaagtggaacatttggtaaatgccaaaatccgtgagaatatccctttgacggaataccgcaatcttcctatcgaaaaggcaaaagaactgggtgccattgctttgttcggtgaaaaatacggtgatgaggtacgtgttgtccaattcggcaactctattgaattctgcggaggtacccacgtttcggctacaggcaagatcggtatggttcgtattatcagcgaaagctctgttgctgccggtgtgcgccgtatcgaagctatcacgggtgccaaagtagaggaattgatggatacggtccaggatacgctgaatgacttgaaggcattgttcaacaatgctcccgatctgaaagtcgccatccgcaagtatattgacgaaaatgcaggattgaagaagcaggtggaagagttcatgaaagaaaagggcgccgcactgaaagccagactggtagagaatgccaaagaaataaatggtgtgaaagtggtgaaagccatcattccgatgtctgccgacgtagtgaaagatattgccttccagctgaaaggtgaaattcctgccaatttgttcgttgtaataggcagtgtggacaataacaaaccgatgctgactgtcatgattagcgaagacctggtaaaagccggacagaatgcaggcaaactggtccgtgaagcagccaaactgattcaaggcggcggcggtggtcagccccacttcgcaacggcaggcggtaagaatcctgacggtttgaatgcggctgttgataaagtgatagagctggctgcattgtaatctattcgaatttcgtccatatttcgtatatatcaaaactccgccattctggtctgaaagccggtggcggagtttttttcatctggttcactaagccttttctcctctatggataagggaaacagaaaagaagatttctatctcccaagcctttggagttatctccataacctttggagtcaactccataagcttgggagttaactccaaaggttatggagatagaacataaacgttcaaaaaagcttagccataaggaaaaaaaaactaactaaacggctggaagcatataatcagtcattaacacctcactgactgtctgcttattccgtctgctccttcggccagttcactagatacagaatttccgtagcacgggtgaaagccgtatacagccaacggaaataatccggagtcagcatattctccgtcatatagccctgatccaaaaagacccgtttccactggccaccctgcgctttgtgacaagtaacggcatacgcatatttcacctgtaaggcattgtaatgaggatcggctttcattttcttcatccgctcacgtttcacagttatatcagcataatcctccaataccgaataaaataacttgtcattcaattctttaggcaatgcgggtgtttcagtatgcaaggtatccaacaaaagtttcacctccagttccataccatcatagtcggggaacaccagcaccacatcggcaaaacgaaagccgtatgcctcacgcacccgacgaacacggcgaattacagctatatctccattggctataaaatcaatctccttacagccctccgtccaaaaatagttattcttcgccaccatcagcaggtcaccgctgttcagttcatcctcccgaaacaaaatcgtattcctgattcccttattataaatattcgcccgtttattggaacggcagaccacaatcgtttcgtccatacctgcctgaccgtaacaatcattaataacctcaatcagctcactaccagaaaccatccgaatatccggaaacccttccacacggacagaaggcaaagtgagaaaatcttccgcggatatgtagcggcgcaattctgtcgcattccaaagaatccccgaatcgtgcatctgacggaccacctcagtgagctgcgcctcatatacttccatgccatacccgcgtaacttatcggccgaaagagacggactctcctcttctcctaccggaggaagctgcgccgtatcccctatcagcatcaaacggcaacctgttccggcatatacatattgaatcaagtcgtccagcaaacgccctgtaccaaagactgcccccgccaatccgtcattagcgatcatcgacgcctcatccacaataaacaaagtatgctgatgcaagttatcatccaaagaaaagttatccaggtcatttgaaaagttgcgctggcggtaaatcttcttatgaatagtataagccggatgctgtgcataatgtgaaaagactttagccgccctgcccgtcggagcaagtagaacacacttttgctgtaactggtccaaggtcttcaccaatgccccgataagggatgttttacccgtaccggcatatccctttaagagaaaaaccgagtccgattggtgggaaaagagaaaatctgctaaaaatttaacagctttttcttgttctaaagttggtttatatagaaaatttcccttaatttgctgcactaaataactattaatcataattgcgtaataaaaagttccttgaactgtgcgttattagatttatttgttttatttttgcgatgcgaatataaactaaaaaaaacacatatttatcatgaaaacagttattaatattgtattggctgcttgcgttatcggtttgatatacgtttgctacggcagtatcatgggaccgattaacttcgatgacgctaaaaaagctagagagaaacaagttattgcacgcttaattgacatccgtaaggcacagttggaataccgcaacctgcacaacggacaatacactgcaagtttcgacaccttgattgatttcgtcaaaactgcaaaacttccatttgtaaagaaagaaggagttttgtctgatacgcaactggaagctggcatgactgaaaagaaagctatggcaatcatcaacaaagccaaaaaaactggtaactggaaagaagttgaaaaagaaggtttaatgaacttcaaacgtgatactttatgggttgccgtaacagatacaatctatgctccgggattcaatgcagactctttaagatatgttcctttcggaaatggtgcacagtttgaaatggttatccgtaacgatacaacaaaatcaggtgcccctttgcatttattccaagctcaaactccgtatgaaacatatttgggtggtttgaatgctcaagaattggctaaccttaaagaccttcaaaccaaactgggcaaatattgcggtttaagagtgggtgatatcgaacagcctaacaataacgcaggtaactgggaataagaatgactgaacgtatcgattttacaaaatcggaacaatatacattatccatccgcctcagtgcggatggattttctttttctatctataacccactgacagataatgatttctgctttgttccgtatcctgtcaataccggatactctatgacggctaatctaaaggaaatgttaaccgagacagaaactctaagatatccgtataaacgggttaacattctgtatgactccccccgtttcacacctgttcctttagaattattcgaagacgaacaaatggatactgttttctatcataattttcctaaaggaaataacgagattgtactttgcaatgttctgggaaggagtaatgtggtaatactttttgctatagacaaacatacccatttgttactgactgaacattttcctacagctcgttacttctccaccgccagcccgctgactgaatatttcgcccggaaaagccggttgggcaacagccggaaactatacacacacatacgcgagcaacaaatggaagttttttgttttgataagggcaacttattactgattaactcatttccatgcaaacaaaccacagaccgtgtgtattacctattatatatatggcaacaattaaattataatcaggaaaaagacgaactgcacttgacaggaaaattagaggacaaagaagaattattgaaagaattgcgcaactatctgcgtcaggtattcgtcatcaaccccaaagcggaattcaaccgctccgagataagtaaaatagaagagataccttttgacatgcaaaccttattattatgcgagtaatcagcggtatatacaaacggcgccgtttcgacgtgcctcatacattcaaggcacgtccaacaacggattttgccaaagagaaccttttcaatgtattaagtaataattattttgacttcgagaacggagttacagctttggacctttttgccggtacgggcagcatcagtatagaactggtttcacgcggttgtgaccgggttatctcagtggaaaaagatccccagcatctttctttcatctcgcaggtgatgcgtgaagtgaagactgacaaatgttttcctatccgtgctgatgtctttagatttatagacaaatgcagcgagcagtttgatttcatcttcgccgatcctccatacgccttgaaagatctggaaagtatccccacccgtattttcgaaagcgggattttaaaggaagacggattattggtattggaacatggcaaagagaaccatttcgaggataatccccattttattgagcgccgtgtatatggcagtgtgaacttctctttcttcaaagcaatggtgccagcaaccgaacaatagattcttgtgctttttgataccaaggacgcttcatccatgtttttctctgtaacaggatagcgtccttctggtcttgcaggaaaatacccttcaacatcaatgctgaggccggatcatacataaaggcattcacctcaaaattatgctcaaagctacggaagtccatattagtagaacctaccgtagagagagtatcatcactaaccatcaacttggaatgcaaaaaacctttctgataaaggtaaatcctgacacccgcacgcatgatatcatccaaataagataacgaacctaaatgtgttatccacgtatcggcacgtgccggtatcataatgcgaacatccacacctgctaaagctgccgttttcaatgccatcagaataggttcggtaggcaacagataaggggtttgtatataaaaatattttcgggaactactgatagctatcagtaacccttgcataatatcccgccattcgcctacaggatcggaagtaacaatctgtatcagagccttcccaaagattccaacttcggggaaataacgggaggaagtgataagagtacggtctaccacataccaatcggtcaaaaaagcagtctgtaacccatataccgcttttccttctatcttaatgtgagtatcccgccatatcccccatggaaagcctttcatatagcgcaaagcaatgttcattcctcccatataagccacacgaccgtcaattaccactattttacggtgattacgataatttaccttactggtaaataaagggaaacgaactttcaaaaaactacgtgcttcaatacctgctccccgcatttcatcaaaaaaagcatggggaactttccaacagcccacgtcatcgtatagtaaacgcacttctactccctgccgcgctttatctatcaacacatcgcgcagcagcctgcctgccggatcatcctcaaaaatataaaactgtaaatggatgtggtgctttgctttactgatttctttcatcaatgaatacagcatggaataaccatccgtaaaaacttccgtcgcatttccttcaaagggcaaagcattattcactttccggaaaaaacgcatcaactggtactgttcatcaggacacttaaacgccttttgcgcttggtattctgccataggacgttttataagacgggtgaaccctttcttgctgatcaatttctccttacgtgtgcttctgccgaaaaagaaatagaatacaagccccacaatgggcaggaaaaagagtacaagtacccatgccattgttttaacaggattacgattatcaagtatcactataaagatagttccgatgataatcacaaaataaagcacgttaaaagcaacagcaaagatttcattaaagatactccactctaccatataattccaagtaatttacttataagcaaacttataaaaaaaatcccaacctataacaatatagattgggaaaagattaagatatagtttcatttaaaaaggacgccggccatgtcttcctggaccgggaccaaaaccgggaccaccgaatcccctatggctattcatcatcttgtcacgagcggctttacttccaaaaatattcagacgatagataaaatgcaccatacagtaactattgatactgttgtattcggtaaccgaacgtacatctgcagtcaaagaacggctgatattgctctgttgttttaaaatgtcatacatttcaaaactaacagttgctgctcccttcaataaactttgtgctatttgggcattccaaatcagttcattattgttcaaactggcatcatcatatcctctacgggactgattggtaatattagtagacaatgtcatctgccatggtagagtgacattggtactcgctccatatgagaatgtataaggattttggttcttttcaggacgcagcttgctacgttccgctgtatattcaatagaaccattcaatgaaaattcaaaccagtcattccgataggacccattcagattctccgccaaagtcaagccggtagtcgtattcttatcatcatgcaatgtttccttattgtataagaacgctacttgattccggtagttaacacgagaaaaagaatttatagtaaactttttattcttcaaagccgaattaaaaccgaacataccaaacgcattccagtttccattgatattctgaggagttgaagtagtaccacccgtattctcatcatatatcgtactattactgatactattctgagtagcagtgaaatttacatgggtcattatcccacgctgtttctcggcattataagtgttataaaacaaacgcatggtatgggcaaacgaaggcttcaaaccaggattacccacacggatattcaacggattggaattatcgacaatcggcagcaggttttccatactaggctgactactacgcccacgataagtgatacgcagctgacttaccttagagaagcgataacgaaaatccagattcggagcaaaattgaataccgttcttgtggtatcagtcatgtaatctcccttcttataggacaatttcgtattttgaggctgtaaggacatgccggcactcaactgatatttctcccggataaatcgtagtcctaaagagatatcatgattaaagtatttatattcagcatccttactcaagctatctacataagcagtttcatagtcttcgggtaatccgtcatttatattccaaggataccccaaatcatatgtcgatttatcactcttgctattcttatattggaatctataactaaattgcaggaaagtagcccgtgctataggttcgctataagtaaattgtgctgtataattataatttttagtaggcatcgtaatgtattgattacgatattcaatggagtcccctcctaaataattctttatctgataataacgggtttccgattgagcatactgatcgctgtcatcatctccatatccaaacgaaccacggaatgtaatattacgtcctttatcattcagtttccgattcagctgtaaagttgcattagccgacaaactatttgattttgacaaattgtgttcattggtagcattaatacgagtatcccttaacgggtcatcggtacctatattgttaaagttcagataatcattgggatttaccacatattggtaagggtcctcattaaaagttcctgattctgttgccgaagtcccttttgttttattataagaaacattcggccgaaaaataatattggtcattgaatcgggacgccattccatacgaaaatccgcattgaaatcagtcactttattacgatcggctttgtttgaattggaataagaatcccccgactgcaaaaaacgctgtgaagatcctactgttactacatccgcatcacgatagttgtaacgcatgctacctcccacttccattttttctgtttctgtagcaaaattcgctcctagcattttagttgcgttcaatccattgttacgcctccaacgaggtcctcctcccgaaaatccctgatcattcacattattggcggaaccaataatagagaattgagttttatcataaaaacggttaatcatagctcttcccgcataacggtcttccgtaccggccgccaaatccacatttccaaaccaaccctgattcatccccttctttaccgtcaaatcgagcactgtttcctcctcaccatcatcaatacccgtaatgcgtgccaaatcggacttcttatcatatgttttcagtttttccaccatatcgactggcagattcttcaaaccggtcttcacatcgccaccaaaaaactctttgccgtctaccataatcttttttacttccttaccattgattttgatattaccatcgtcatctatttctgctcccggaagttttttcaccaactcttccaacattgccccctcaggagtacgataagcagaagcattataaccaatagtatcttctgaaatggttacttgcggagcctcggctacaataactgcctcacccaacatgatagcatcggtaggtaaagtgaccgttccaatattaacgctcggtttaccagctgtcagctgcaaagatttttcctgagtaagataacctacaaatgaaattttaagtacatattttcccggacgggcggcaatagagaatactccgttgttattggtaacatttcctaccaccattgtactatcgggtagagaaagtaattgtacggtagcttgtccaaccgggcttttatcatcaccatcaatcacagatcccgtcacggttatgcgcttgccactttgcgcccaagagagagttgcacaggtacataccagtaacaacaataatattaacttcttcatttttttccttgaaattttaatgcctaatgtcc

SEQ ID NO: 14442 - DNA, 10942 bp, Unknown
  gut microbiota DNA sequence
gacgggaactgtcccgtcctttttcactacctgacgcttgaggtagtagattactgaaaatgtactcttcattgtccttaattttttggtttcaaaattagttggtgaagagtccggtgtcggtacgcaaaacggagaggaacggcgcaatctttttccgtaaccggatttttcgcgtgagttgtcggtaactcactattccttagtgtcttgtttcgccctccgtgcccgtttgtcgcattttcgggcatggttacgaacaagtaacgttgcggcgtcaggatttggcttcggcagggattgtaatggcttcacgaattatcgccacttcaactaaaacccttgtaactcaattctatcactataactttccgcatttcacttttttgtagtaactttgtaagctgaacatgaaaaactattaatcaaaaatcttataaaagaatgaaagaacaaattcaaaaaaagctcaatgactccaaggctcttcggtggagtgtgttggcgctggtggccttcaccatgctatgcggttattttttgaccgatgtaatgtcccccttaaaaccgatgcttgaaaaggagctgctgtgggatagtctggattatggtatttttaccagtgcatacggttggttcaatgtttttgcctttatgcttattatcggtggtatcattctggataagatgggagtgcgttttactgggatgggagcatgccttttgatggtgttgggctgtggattaaaatattatgctatttctactacatttgctgagggaagcactttgcttggaatgaaaacccaggtaggaatggctgcgttgggatatgctatatttggtgtcggtgtagagattgcaggtatcacggtctcaaaaattattgtgaagtggttcaaaggaaaagaaatggctttggccatgggcatggagatggcgacagctcgtttaggcactatgctggctttggctgttacggttcctatcgctactttctttggaattactgatgatgagggtgtgttccatcctaatatccctgctccattgttgctgtgccttactatgctttgtattggtacgatagcattttttatttatactttctatgacaagaaactggatgcttctttagaagaggaaggggcggaacctgaagagcctttccgtatgaaagatatttggttgattgtaaccaataaaggattttggctgattgcgttgctgtgtgtgttgttttattctgccgtattccctttcttgaaatatgccacagacctgatggtgcagaaatataatgtagatccggaattggcaggtactattcctagtctgttaccattgggaactttgttccttactccgcttttcggtaatgtgtatgatcggataggcaagggagctacgctgatgatcatcggttctgtgctgttgatttttgttcatacaatgtttgcgttacctatcttgaatgtatggtggtttgctactatcattatgattatattggggattggcttttctttggtgccatcggctatgtggccctctgttcctaagattattccggaaaagcagttgggtacagcttacgctttgatcttctgggtacaaaactgggggttgatgggtgtgcctgccttgattggttttgtcttgaatgagtattgcaaaggaccggtagtagatgggatgcagacttatgattatacacttcccatgtggatatttgcaggctttggtgtggctgcgttgttctttgctttgtggctgaaaggtgagaataagaaaaaggggtatggattggaggaaccaaatatcaaaaaataattgattgtcttttagtgaaaatgagggtatccatgcactggataccctcattttgctatataggggtgagatgaagttttagtctttatcaatcttcacaattcctccggtattaggattaaagatcactcgtgtgtttacttttttattaaaaaggttatctaccagacattccgttgttccaaattgtgtaacaggtagttctccgtcaaaataacgtttgtttggagtgaatacggtaacctgagcttttcccggaatattataaataacaccatccattttctttttttctttgcctttcggatccactggtggcagtgtttcttggttgatgatggagatataataaggttcaccggataaattatcggcatccagcatccctagtttctttgagaaacggaaagcgactttttctttcatgcctgcttctggctttatgcggatggtaaacgatttttctgtgcggtctgttgtgccggcaaacatttgcatcatggcttgttcctgttcatccagattgtccagcatgagttttaaagcagctccgtctttgggcatataatctgcttgcccgcgggttaggctgtttttgctttctcgtatattgtagatttctttcgccaccaattcagccattttagcggtagaaccggctatcagaatctcttcggtcataaaactgcgtgggtcaatacgttttttggccgtatcggcaacctttgttacaggtgctttttctataggagaggtggtgttgatagcctttatgattccttcaggagtcaattctacttgtgaggcggcacttttgtctttcagttttacagcgtatgcattgtccggatcaggaatgcctatggaatttaccttgatactgtttatttcccaatgttcttccggttgggatgatatgcctgtcaggcgcagatagcggtcggcgtattggcagaattctccgggagtgtagacaactttggttgcgatgacttgcaattctatttcggtcttaggcaaataataaaccactccttctcccatggttccgggagtatatgtactgacatcttgtgcggtgccgctcaatgaaaccagcaaccctgctgcgattaatccttttttcatatttctatattctatcatatatgtaagcaaatatagctattcttttgtaaatctgccttttgtttctgttaatttcttccatgctgcgggtaatgcgtcaataagatcacttgaggtggtccctatttctcctttttcttccgccgcaatgtctcctgccagaccatgtacgtagacccccaggcggcatgcgtcttcttgagtatatccttgtgccaataaggctgccagaataccggtcagcacatcaccgctgccggcagttgccatacctggattcccggtgggattgaaataacaatttccttcgggggtgacaactgtgctccatgatccctttataatgatataactttgcagataggcagccagttctttagtctttgtcagccgttcgtaagtatccatgcatttaccaatcagtcgttccagttcttttagatggggggtgagaatacaacgcttcggcatccggctgagccagttgcggtgagtgccgaaaatattaatggcatccgcatccaatactaaaggtaccggacaaccttgtatttgttccatcatggctaacgctgtatcttcttcttgtcccaatcccggaccgatggctatggcttgataacggtctgtatctacgggttcggcaaaataatggtcgtgtatgtctgtctgtacaatggcttcggggacagtggtctgaagtaaatcatggttgtggataggtacatggacagtcagtaatcccactcccgaacgcaggcaggcacgggcagataaaatggatgctcctgccatgccataagatcctgcgatgagcagtgcatgtccgaaagctcccttgtgggcaaatcgtttccgcggtttgatgaggctgcgaatttcttcttcctctgtgatatagtagggactttgtgctgtatcaataaagtcttttttcagttggatgtccaatagttgccattcgcctacaatgtcttcgttttcggggaaaagaaaggatagcttaggtaactgaatgctgagagtgacatccgcacgtatcatgttttggcggatgttataagtgttgtcctcacacattaatcctgaaggtacatcaatggctactacctgtgccttggatgcattaatatatttcactacggcagcaaatccgccgttcagtggtttattgagtccggaaccgaataatccgtctactaccagatgcttttctgtcaagactgggggatcaaattgtgtgcttacttcggtaaagtagaccgagccgcattcttttaaccgttcaagattagtctgacattcttccgacagttttcctttggtgttaaacagaaagacttctacgtgatagttttgtttagacaacatacgggctacggcaagcgcatcgcccccattatttcccggtccggcgaatactgcaatatggaaagaagtatcccatcggtgggtaatggcacgagtcagctcttcggctgcccgttccatcaaatcaatggaggcaaccggttctttggcaatcgtgtacttgtccagctcttttagttgggtgctcgaaataattttcatgacaatctcttttgtttgaacgtacaaagataacactatttacaaaaagaggttatgtgaatacttcgatacttggaataaaaatgttatttttgcagcaatttaataaaatagcggttatggataccattcaaatcaaagataaacgtttcactcctttcattcctgaagaacggatcttaaaagaagtggcacgggtagcgagtgagattaatcgggatttagaaggagctaatcccttgtttttaagtgtattgaacggcgcgttcatgtttgctgccgacttgatgcgtaaccttaccatccctagtgaaatttctttcgtgaaactggcctcttatgtaggaacttcttctaccggaaaggtaaaagagttagtaggtttgaatgataatattgagggtcgtacagtggtgattgtggaagatatagtggataccggggtgacaatgaagcacttgttggaaacattacaagctggaaaaccgaaagaaatccgtattgctaccttgttattgaaacctgataaattggaggtggaactggatatacattatgtggccatgcgtattcccaatgattttattgtggggtatggtttggattatgatggtttgggacgtaactatcgggatatttacaccgtaatggaatgaaatttgtacaactaaatataaaaataaaggataaaacaagatgttgaacattgtaatttttggagctccgggttctggtaagggtactcagagtgaacgtattgtagagaagttcggtattaatcacatttcaacaggggatgtgcttcgtgctgagattaagaagggtacagaattgggaaagacagccaaaggatatattgatcagggccagttgttgcctgatgaattgattattgatattctggcaagcacgctggatagtttcaaggaaagcaaaggggttatttttgatgggttccccagaaccatcgcccaggcagaagcgttgaagaaaatgctggccgaacgtggacaggaagtatctgttatgttggatttggatgtacccgaagaagaactgatgacccgcctgattaagcgtggacaggaatcgggacgtgctgatgataacgaagaaacaataaagaagcgtttggttgtttatcactcgcagacggctccgctgattgactggtacaagaacgaaggtaaatatcagcatattcacggcttgggtacgatggatgctatttttgccgacattgttgctactgtcgaaaaattataataatgtgctaatgtgctgatgtagcagtccaccaaagtgtcagtcagcataatgatacatggagtacagtttcattggcacattagtaagttggaaaattagtaaattattaattatggctgaatcgaattttgttgattatgtgaagatatattgccgctcgggtaagggcgggcgaggctctgcgcatatgcgtcgtgagaagtatgtacccaatggtggtcctgacggtggtgatggcggtagaggaggtcatgttattttgcggggaaaccgtaattattggacattgcttcatctgaagtatgaccgccacgtgtttgccacacacggtggcaatggctcaaagaataaaagctttggtaaagatggtgaagacaaagttattgaagtaccttgtggtacagtggtttataatgctgaaacaggtgaatatatctgtgatatcaccgaacacggacaagaaataactctgttgaagggaggacgtgggggattgggaaactggcacttccgtacagcaacccgccaggcgccacgttttgcacaaccgggagaacccatgcaggaactgatggttattttagaattaaaactgttggctgatgtaggtttggtaggttttcctaatgcagggaaatccactttattgtctactgtatcggcggcacgtcctaaaatagccaattatccgtttactacgctggagccgaatttgggcatcgtgtcctatcgtgaaggaaaatcctttgtcatggcggatattcccggaattattgaaggggccagtgagggaaaaggactgggacttcgtttcctgcgccatatagaacgcaactctttgttactctttatggtaccgggtgatacagatgatatccgtaaggaatatgaaatcctgctgaatgagttggctaccttcaacccggaaatgttggataaacaacgtgtgcttgccattaccaaaagtgacatgttggatgaagaactgattgccatgttggaaccgacattgccggataatgttccgcatatctttatctcatcggtgactggtctggggatacagcagctgaaggatattttatggacagaattgaataaagacagcaataagttggaaggtgtccgtacggaaacaattgttcatcgcgccaaagatgttgccaaactgcaggaagagttgaaagacatgggtgaggatgaggactttgaatataaatatgaagaagatgccgatgatgacttcgattatgaatatgaagatgaggattgggacgaagaagaggaaaagaaatgaaatggctgacatcagataataaaatgttgggatatgagctgatgaaggcatatcccaacatttcttgtttttctaccacccgtcacggaggttgtagtaaggggaactacacctcgttcaattgtaacggatattgcggggacgaggcagaagatgtgaaccgcaaccgggaattgctgcgtagcttgctgcccggggaatcggtagaactcgtgattccgcaccagacccatagtgaccatgtgaaagttgtggatactattcatgtaaatactgaattggaaggagtggatgcattggtaacagacattcccggttattgcttgtgtgtatctacggccgactgtgttcctgttttgttatacgatactcgaaagaaggtagtggctgccattcatgccggatggcgtggtacggtggcccggattgtagagaagacagtttcggtcatgagcgatcaatacggttcgcaagggaaggatctcattgcttgcatcggtcccagtatttcattggaggcttttgaagtaggggatgaagtttatcaagctttttatgaggcggggtttgatatgaatcggatagcccgtaaagaagcaaaatggcatattgatttgtggaaagccaaccgtcagcagctgctgacatacggtgtgaaacctgaacatattgaggtatccggcatttgtacgtatcataataacgatgatttcttttcggctcgccggcaaggaattcggtcgggaaggatattatcgggcattcttttaggtgtctgaggaacacactcattggaataacgcagtataaaaatgaatatggaaataaaagtatcggaagaaataaagaaagcctgtccgcagtttgccggtatagccatccgtgctacggtaaaaaacactgcttatagcgaatctttgtggaaaaagatagacgagttcactgtacgctatcgtgaaatgtacactacggattccattaaggatatggttacgattcatgccactcgggaggcttataagaaatgtggaaaagaccctagccgttatcgtccttcgggggaagcgctttgccgtagaatcctgcgtggaattcccttgtatcagatagatactttggtagatctgattaacttggtatctattcgttacggatattccatcggcggctttgatgcggataaaatacaaggagatacattggtgctgggtatcggtaaatccggagaaccttatgaagggataggacgtggagagttgaatatagaaggaatgcctgtttacagagatgctatgggcggaatcggtacaccaaccagtgataatgagcgtactaaactggaggcgggaactacgcatctgctgaccattattaatggatatagtggcaaggaaggtttgcaggaagcggcagattatatgttggagctcttgaaagagtttgcagcgtccaaggatgaagaattaatttatttttaaaataagataatgaaaagcacacaattactatttttattgttcataagtgtggtagcatgggctgggggaccggctaagagtaattttaccgcgatggaagtgaaccatatcagagtcaatacccccgggctctttaatgagcgcaaaagtttctccattcatctggatagtataaaagagaatgaatattgttttcctcttcccggtggtaaagtgatttctgcatacggagctcgccgggggcacagtggaacggatataaagactaaggccaatgatactatccgctgtgcgtttgatggaatagtacgtatggcaaaaacatacgctgcttatggaaatgtagttgttgtgcgtcatgataatggattggaaagtatttatagtcataattcccggaacttggtaaaatccggagatatcgtgaaggccggtgatgcagtagggctgacaggcagaaccggacgtgccactaccgaacaccttcatttggaattccggatagatggacaacattttaatccgaatctgatttttgatatgaaaggtcgtactttgcgcaaaacggaaattgtttgtgccaaagccggcaatagagtgatagtaaaacagaatttaacgcctaaaaaatgagacgatggatatagaaaaagcaatcaccgaaggaattgtattcaaaggtggtaaatctcctaatggtaaacaagaagataaagtgaagaccaaggctaaaaagaaaagttatataacagggttgcatgggtcgggagctgccaagatgaaagctgagtttcgtaaaaaacgtgctaacagacataagaataaataggaatgtagattgaatttaacattcagtattttattaataattaactaattatcctctcttttgttttggaattattcgttcttgtgtaaaatatgttgcaaaatataaaataaacagtacctttacaatgcaaaacacaaagaaggcaaacctcttcagcgtgaatcaataggtaaaaagtttaatttaaaaatgacaaaagagatgaaaaagattgtattgtctgttattgtagcattgattgctattactgcaaatgcgcaggtgtatgtaggtggaacatttggagtaggttctgataaagtggaaacagaaggaacagaagtaaggaatactactttcaagattctgccggaagtcggttatgaactaagtgaagattggtctgtcggtacagtagtcggttatgaatataataaaagcggtgatgtgaaaactaatactttcactattgttccttatgcacgttatttctttttgagtagtaatgtggtccggttatttgccgatggcggatttggcttttctacttcaaaaacgaagggaaatgacgctttgaattcgtggaatattggtattaaaccgggtattgccatcaaattgtctgatcatttttgtctggttgccaagtatggtttccttggatattccaaaaaagagaatcatggatatgagagtgaaaatgttggtatagattttgatacggatgagttaaactttggctttcattatatattctaatcatatataagtgtatctgataatcaggaatcatataactatataatagtttggtgagcggaatttttcattccatgaaagattccgcttattttctttacacattaggactggtttccaaaataaagcttatatttgtgaatgtaacgacggtacaaacgaattgggaactgaaatttattattaactaaaaacaaacagtcatgaaaaaactagccttttttattttattgtcattggttacactaggtgtttctgcacaatcaaatctgaagtggaatgtgaatgcgggtattggtatgtcaaactggtatggtgatgatacggatggtacagatgctaaatttgcttataaagtgggtataggtttggaagtaccttttgctaatactaatgtatggtctttccagacaggtttgaattttatttctaaaggtgtgaaaggtaatggagtaactgatgcttgggacgtggttgatgtgacaatcaaccagctttatctggaactgcctttgatggttggtgctcggatacatacagccagtaattttgaccttcttttcaaaggtggtccgtatttggcttacggagttggcggaaaaactaaaatagatggtgtatccgagaaagctgatactttcggtgatgatggtttaaaaagatttgatgccggtttgggtttaggagttgcttttgaatttggcaaaatagtcgtaggtgttgaaactggcacaagttttactaaagtagctagtggtgctagtgcttataatctttctgcattggccactatcg

SEQ ID NO: 14443 - DNA, 52238 bp, Unknown
  gut microbiota DNA sequence
tctttccgcatttcacttttttgtagtaactttgtaccattattctccttttatttaatacggtttgataggcaatgagcattgatttgaatgcatttaataaattttttatagactaccagcaacgttttgtccactttgcctgtacctatgtgcatgatgaagctgttgccgaagattttgttgtggaatcaatgatgtactattgggagaacaaagatcgtttgtctgctgatactaatattccggcttatgtcttgaccacgataaagcataagtgtattgactatttgcgccatcaacaagtctatcaggatgcttctgacgaaatagcccgaatctatgcatgggaattgtcgggcagaatcatgactttggaagatttcgagccctatgaggtttttacaaaggaaatacaggagattgttgataggacactggatgctttgcccgaacagactcggaaaatctttgtgatgagtcgtaatgaaaataaatcccataaagaaatagcagaactattggatattacaaccaagggagtggaatttcatatatcgaaagctaccaggacgttacgtcttgcattgaaggattatctgccggtatccttactttttttctatttgcattaaaaaaaacagtttttcactagggaatgttctttcccatccgctattactataaatacgtaaaacaaaagtgtttatggataaggatttgttataccgtttttttgaaggtcatgcttctttggaagatatgaaagtggttaaagaatgggccggtgcttctgaggagaatgccgggctgttgcgtagggaacgcaaactgtttaatgctatgattcttgcaggtcattcccgacggactgatatacagagaatgaggaacaggaggaactattttatcagggaattcctgaaaatagcttctgtaatagtgataacggtgagtgtgacggctgtattattttcaataggtaaagataatggaggtatgtatttagcgatgcagaccattaccgtaccggccggccagcgtgttaacctcgatttgcccgatgggtcaaacgtttggctgaatgccggaactacaatgcaatatcctgtttcttttatgacagacaaacgggaggtgatattagatggagaggcttactttgaggtggctcataatgaaaagagtccgtttgtggtacatacaagtacattggatgtagaagtattgggaacaaaattcaatgtggaagcttattcagcacgaaaaatattcgaaacgtctttgatggaaggcagagtaaaggtaaaattacctcacgatgaaaagaattccgtcatcttggcacccaatcagaaaacgactttgatagacggccgattggtggtgagtaaaattgatgattataatgtatatcgttggaaagaggggttatattgtttcagaaataaaccttttgctgatattataaaagacttggagaaatattatgatttgaaaatacagatggataaaaaggaaatagcaaaggttgcattaactgggaaatttaggatttctgatggattggactatgcgctgcgtgtcctgcaaaacgatgtagcctttatttatcaaagaaatcgggataatgacgtcattcatataaagtaagaaatgtattaaccttctaaaatggaaaatcagcctatgaagcaatccttatgaaaaacaactaaagagccgatgggtgtttgcaccacccaccgacccgactaacacaattatttttaataaatcgtattaataaccatttgcaaagatatgaaaaacattcctttgccggatctttattatcttgaaaatccggatttaaaacaattatttagaattatgcgaatatcaatattcttattgttcttctgcctgttcagcctgatggccgaaaatagtcactcacagaatgcgagggtaactatcaatagaagcgatgccccgttggaatctatattgaatgagatagagtctcaaacggactatctttttatatacaaggaagatgtgaacgtaaagatgcgtaaaaccatacaggtgaatggcaaacctgtatccgaggtgctgcctgcattactgaccggctcttccatcggttataaaatggagggaaatcatatcatccttactcgtgatgttgcattggcagcgcagcaacagggggtaacgggagtagtgaccgatgtctcgggcgaaccgctgattggtgttactgtgatgctgaaaggagaaatgcaaggcacggtgacagatataaatggaagattctcgctgttcgctgagcaaggagatgtaatagtggtaagctatataggttatgcttcacaggagataagattggaggatacaaagttacttcgtattatgatgaaagaagatgtggagctgttggatgaagtggtggtaataggttatggttccatttcaaagaaggaactgactagtgcggtttcccacatatcaggtaaggatatgttgcagattgggagtggtaatcctgccatgcagattcagggaaaggtttcaggtcttgcagtagagaactctactccttctgatcctaattcttcacctagtattcaggtacgtggagtatcctcgcgttcagccggattgggtccgctgattgtaattgacggtataccaggcggtagtcttgataatttgaatgaaaatgatattgaatctattgatgtcttgaaagatggggcagcttcggccatttatggaacccgtggatcgaatggggtgattgtagttactaccaaaaaaggtactatggatggtaaaattcatacttcgtattcgggatttgtgaatataactatacctgtcagagagctgaatgtattgtcggctacagattttagagaacagaaacggggagatgattatggtgctgatactgattggtttgatgaactgactaaagtggctgtatctcatagtcatactttgcaggttatgggtggtaatgccaagactaattataaagcaacagtggattataaaaatacagaagggatagacttgcgttcggaaaggcaacaagtaggggcccgtttgtcattaaatcatacaggaaaaagtgacttgtataatgtcattctgaatgtggctccgcgcacagtgaagtatcaggatgcagattatgatacttttcgttctgcattgttgataaatcccactactccagtgatggatccggaacaaccgggtaaatatactcagataactacttactccaccaataatccggttgaaatcttgaagttggagaaaagtggtggtgagcgtaccaccttaagttgggatggtacgtttaagttgaatttgtttccgctgttgtgtaaagataggaatcattatttaagtacacaaattacattggctcagcagattatagaaaccgattacagttggtttcgtccttcgatttctactatagaagacaaaagtggatttcagggagaagctagccgtaaatatgacaagaataaacaagagtctttggaatggttggtaaattacagttatgacactgataaccaccatgtaaagttcatgggaggatattcttatcaatactttgtaaatgacggattgaatgctgagaataagaactttgcttcagatttgttaggacctgataacttgggtgctggaacttacaatagtgaagtggagggacgcctaggtatggggtcttacaggaatgattccaaattaattgctttcttcggccgtctgagttataatttcagagataaatattttgctacattttctcttcgtcatgaaggctcttccaagtttggtattagtaacaaatggggatcgtttccagccgtttctgctggttggagaatcagtgaggaggattttataaaaaatatccaatggattagtgatttgaaattgagaggtgatttcggagtgacaggtaatcaggaatttgatagttataagtcattggccttgatgcaggcgtatgatttaatttattataatggaacatatattaagggttggggattcagttccaatgctaatcctaatttgaaatgggaaaaaggtaaaaattggaatgtaggaatagacttcagtctgtttaattaccgtttgaatggtggtgtgaattattatagtcggaaacaacaggatttattgggagtttatgatgttgcattgccacctaatggtgctccgcaatcgtttgttaatgtaggtacaatgaaaaatacaggtgttgaaatcgaattagattggaatgcggtaaagagcaaaaattttaattatacaattggttttgtgggctctacttcaaataataaatttgtttcattctcaaatcagttttatgaaggtcctaagtattattggatgagtagttttcctttgtacccaggaaatccgggggtattgcaacgtattgaagaaggagaacgcattggtaatttttatacattccagtatgcgggcttggatgataatggaggttggttgatttactctaaagatggtgaagtgattcctattgataaaggtacggatgaggataaacgggtggtaggtaatggattgcctaagtttacaatgtctgtgactcatactttccgttataaaaatttagatttgaatttgtatttccgaggtaatttgggttatcagatttatgatgtccatgatttgtattatggcttgcaggatgcagctccgaatacgaatgtgctggagtccgcttacaaggaaaatagggaaattactacaggaaaaaatgtgcatagcagttattttgtacataatggtgattttatgaagttggacgtcgctacattggggtatacttggaatataaataataagtgggttgaaaaggcacgtttctatattacaggacgtaatttgtttactatcagcggatatcacagaggactagataaggatgcatattgtgtaaatggtatggaacccggcttaccttacagtaagaacggatattatccgtcttcacgtcaattcttgtttggtatccaacttaacttctaaatttattactttatgaaaacgtttaaattaaaaaatatatttctgggattagggatgttggcgtcagtgggatgtacggatttgtcggaaactacttatgatattgtacctcaggatggattctatcaaaccaaggagaatgttcttcaggcgtttgtacgtcctttcggacacggatattggttgtgttgtagggcgatgtattggtttggcgaactttctgccgaccattatatgactgtgcaaagagaggaacattggtataatggtggtgaatatttccgttatcattaccatacttggactgttgatgattggtatgttaatgcaatttgggaagatacttacagagggatcattcagtgtaatgccagtatttctgatataagtaagctgaatcctgcaaagtttggtttttcacagcaagagtttgatgattttatttctcaaacacgtgttttacgtgcgtggatgtatatgtccatattcgatttagtacataatataccaattgttacggattatccaactacagagttaccggcacaatcagatccaaaagaaacttttgcttttattgaacaagagttattggaatcattgcctgtgttacaaaaaaaagaaagtaataatggaaatggtttaaagcagggacaatggacccagggagcttgtgctgctttattggtaaggttgtatatgaacgccagttggtggattgatgaggacaagacggtcgaagctgaaaaatatagtgaaaaaattatagatggtgaatatggtttctatgatatagataataggtgggatgcgccgtttgattgggataacgataagtctaatgaattattgtttggttatccatcctcgtttggtggtatgcattggctttatgattatgaaatgttttggcaggttgctccgttcctctctccgaaatatttcggttttacagattgggggaattgtaaccccaaatatgcattacagccaggattagatttaaatggaaatgaatattcctttgaaaatggaaagccggtccgtaagtttatgaaatatcctgatgatgtgcgtctgaaaaagtataaaaatttaggaaatagcaaacgtgaaggaatgtttttgtatggcgacctgccttatgaaacagcaaatggaacggaatatgttacttcggacaatggagcctacaagctttacattcgtgatcaagtaggtattttccgcgatacagatcctgctagtttctctcccaatccttctagtggaacccaaactccgaaatcggctatggcttacggagatcagaattcaggttggtgtttgataaaatatcctatctatcgttcggatgatgctggtaaaatagaatcggattatgctttgatccgtttagcggaaatttattattatttggcagaaattcgtttctatcagggtagaaaggcagaagcggaaaaattactgaattatgtacggaagcgttattatccagcaggttcttctagtttgtatcctgagaatgggagtgcattgacagaacaggaattattggatgaatggggacgggaatttttaggagaaggtttacgtagacagactttatgcaggttcgggatttttaattcgggaacttggtgggataaagaaccggattcggataatcatacgatgtggatacctctttcacgtattacattaaatacgaatccaaacttgaagcagaatccaggttatccgtctgttaattaaaaatttgataatctcattttaatctgataacttgtatgtatatctacatcttgttatcgggttgttgaataatttttgtatttaaataattagaacattaatagtatgaagaaaattaaatccttattttgtatcggtctgttactgactgttgcgacgactgtaaatgcacagtctgtgacttggattagtagtaccgaaggcaatgtatggcaaaaatcaaaagtgaagttgcaatcaaaatcagagcaaaatcctgttttgcaggtagatggaacagagaatggtgttgttttcaagaattggggaactacttttaatgaactttgttgggatgctcttgggttattaactcgtactgaacaagatgaaatattgtataatatattttctccgcaaggtgatttacggattacgcgtggacgaatttcgatgggagccaatgattacgctcgttcttggtatagttgtgacgaagtggagggtgactttgaattgagatattttaatattaatcgtgataaacagactattattcctttcatacgtgctgcacaaaaatataatccgaatcttacattttggatatcaccttggtgtcctccaagctggatgaaaataaatggagattatccggttttaagtagtccgtttaatagtttgtcagagaaacagaattatttattatatggtgctacaggcggtcaggttgatgagaatgaaatgaagttgactgatgcccgtgatggagtttttcctcgtcagcttgcgacaacagactttatgattcaggacccgcgttatttgcagacttatgcagattatttttgtcgttttatagatgcttataaggaacaaggaattcctattgatatggtgatgtatcagaatgaagcatatagttatactccttatcctggttgtgcctggactgctgccggtacgattcgttttaataaagaatacttggctcctactttgaaacaaatgcatcctgaggtaaagctttatttaggtacttttaatacgaatcgtcaagatcatgtggaaacaattcttgctgatacggctttatgtaactgtattcgtggtatgggatttcaatgggaaggacgtgaaatacttccttccataagaaaacagcatcccgaatgggaatatatctgttcggaaagcgaatgcggttggggtagttttgattggaaggcggcagaacatacattcgagttgataaatcactatttagggaatggatgttgcgaatataatttttggaattgtattttgaccgataaaggtgaaagtccgtggggatggaaacagaatgcgttgattcgtgtggattcggaaaagcgtacgtttgtttataccccggagtattatgcggtaaagcattatagcaaaatggtggctccgggatccaaaatgttacaatacaagatgaagggggagaataatcaaccagttattatattcctgacccccgaaaatcaatatttggtaatagcagggaattttagtgatgaacaacagaaattgagtgttaagttggctgggaaatatttggaggtaatgttgcaaccccattctttgaatacattttataccaaatgatcacaagcaaaccctcattaaattgatatctactgtatggattggaggaaatccttacagtagattaaaaagatgtaaaacttccatttttcctccatttgaccgaataaagtccctcttttgaaagatttatatacctgaaaataggttcctatactatatctttgcatcaaacaaattcaggactaattatatgaaaaacaaattttttatcaccttatttgcctgtttgctgccttggatggcaggggcgcagcagactattttcaaacaaaacaatgtagccgaaaaggattacatagcttatctctttacttatttcacaggtaaccacatcagcgaggaagccgtatgttatgcggtaagcacggatggatacacttactgggcgctgaacgataacaaaccggtcattgactccaaaatcatcagctctaccggtggcgtgcgtgacccgcacatcctgcgttgcgaggatggaaagactttctatatggtggtgactgatatggtttcggacaacggctgggactccaaccgtgccatggtgttgctgaaatccaccgatttggtgaattggacttcttccatcgtcaatatgcagaagcgttatgccggacaggagaaactgaaacgggtgtgggctccgcaaaccatctttgacccggaagccggaaaatatatgatctattggtcaatgcaatacaatggcggcgcggacgtgatttattatgcctatgccaaccgggattttaccgatctggaaggagagccgaaacctctttttatccccgagaacaagaaatcgtgcattgacggcgatatcgtctttaaagacggaatctttcatctgttttataaaactgaagggcacggaaacgggatcaaggtagcgaccactcgttctcttacttccggtcaatgggaggaacagcccgactataagcagcagaccacggaagcggtggaaggtgcgggaactttcaaactgataggtcaggacaaatacatcctgatgtatgatgtgtatatgaaaggcaagtaccagtttaccgaaaccaccgacctgaagaactttaaggtgatagacagtgaggtaaagatgaactttcatccgcgtcacggaaccatcatccccattacccgtgccgagctgaagcgtatcactgacaagtggccttcaaaggaaatgggtaatatgactatccccaacaatccggtgctgcaagggtttcacgccgaccctgaaatattgtattctcatcagactaaaaaatattatatctattctaccactgacggacagtccggatggggagggtggtactttacggtcttttcctcagataatttgaaagactggaaggacgaaggcgtgatgcttgacctgaagtccgaccaggtgatatgggcggatggaaacgcgtgggctccatgtattgaagaaaaaatagtggacggaaagtataaatattttttctatttcagtggtaaccctacagccggaggcggcaagcagatcggggtggcggtagccgattctcccaccggtccgttcaaagacttgggacatcccatcctcaccgaatctcctgtgggccacggacagcagattgatgtggatgtgtttaccgatccggtttcgggaaaatcctatctgtattggggtaatggctatatggcaggcgccgagctgaatgaggatatgctttccatcaaggagaataccctgaccgtattgactccgaaagggggaagcctgaaggattatgctttccgtgaagcggcgtatgtgttctatcgtaacggactttactattttatgtggtctgtggacgataccggttcgcctaactatcatgtggcatacggtacgtcaaaatctccgttgggtcccataaaggtggccaagaagccggtggtgctgattcaggaccctgcaaaggaaatctatgggcctgcccacaatgcggtgctgcaaattccgggtacggatgagtggtacattgtatatcatcgtattaataagaactttatagaccgtgagaagggtcctggcgtgcatcgtgaagtatgtatagaccgtatggaatttaatccggacggaaccatcaggaaggttgttcccacgttataaaagaaacataacaataaagtatataccatgaaaaagaccttattatctctggcaatcgcctcattggcagcaggccaatccgtctgtgctgccgtggaaaaagtatataatgagcccgattcggtctacatcttctcttacgcccatccggaagacgagggacgcagcggactgaaattcgcatggagccccgatggcgacaagtggctgagtgtatccgatggctttgcctatctgaaatgtgacttcggacgttgggggtcggaaaagagaatgattaaacctcttctggaaaaagcggaagacggacgttggtattgccggtggcagctcacccccagcggaaaagtatggggtacttcccattcttccgacttgttgaagtgggctccccaacaatatgtcaatgcggagaagcctgctgtgccccgactggtcactgcccggcagattgtccttgataaagatactttgaacggctatatgcagaaagtaccttatgtggatatagaacagttgattcgttttgccgagcataagaaattccgcgatatacagaataatgagcgtaccgaacaggacgccgttcgttttgccggactgaaaccggtcactgccaccatccgggtggatgccggacgggtaaagcccatcagcgagcatttaataggtattttctttgaggatatcaattatggggccgatggcgggttgtatgcggagctggttcagaaccgtgattttgaatattctgctaaagacggcgcaagagataagaactggaacagcacgtatgcgtggagcatacagggaactaatgcggaactgtctgtcagtgaggacagtcccattcatgctaacaatgcccactatgcagtgttggaggtacaccgcccgggtgctgccctggtgaataacggttttgacggtattgccgtgaaaaaaggtgagaagtatgacttctctgtgttttccaaagtgctggatgatacgaaaggtggaaaagtgcttgtgagactgactaccaaagacggcaaggagattgcgcaggctgctattcgggtttcatctacagagtggaaaaaacaaaaggctgtactgacagcaacggcggatgctgcggatgccgtgttgtccgtttgtccgcagatggctgggaagtatgccttggatatggtttctcttttcccacagaatacatttaaaggcagaaagaacgggctgcgcgccgatttggcacagaccttggccgaccttcatccccgttttgtccgtttccccggcggatgtgtggctcacggagatggtgtggacaatatttatgattggaaaggctctataggagcgttggaggaacgtaagcctctgcgcaatttgtggggctatcatcagacacgtggtttgggatatcatgaatatttcttgttctgcgaggacatgggtgctgaacctgttcccgtggtggcagccggagtgccttgtcagaactcgggaacttgcagccatcactcggtaggcgaactgggttgtggcggtcagcaaggcggaatcccgatggaggaaatgccgcagtacgtgcaggatgtattggacttgatagaatatgcgaatggagatgcgaagaagaccgtatggggaaagaagcgtgcgcaagccggacaccccaagccctttaacctgaaatacatcggcattggtaacgaggacctgattactgatatctttgaagaacgtttcactatgattttcaatgcggtgaaggagaaatatcccgaagtgaccgttatcggaaccgtaggtccgttctatgagggcagtgattatgaggaaggatggaaatttgctaccaaaatgggtattccgatggtggacgagcattattacaatactccgggatggtttatcaacaaccaggatttctatgaccgttatgaccgcaacaaggcaaaagtgtatctgggagagtatgcggctcacctgccgggacgccccaacaacatggaaacagcattggctgaggccttgtacctgacttccgtggaacgtaatgctgatgtggtgaccatgacttcatacgctcctctgttggccaaggagggacatacccagtggaatccggatttgatttatttcaataatacggaggtgaaacccaccgtaggttactatgcgcagcagatgtacggacaaaatgcgggcagtgaatacatcgcttcttccgtgactttggataatgcacaagatgcggtgaagaaacgggtaggtgtgtcggtagtccgcgacggaaagacaggagatatgatcgtgaaactggtgaatctgctgccggtagcggtgaatgcgaaggtggagctcccatctttggaaggaatgaacaccactgccgtaaagacggttctggcaggcaagccgaccgacaagcaggctcgtcctgtagccggtacaatggaagtaagcgagaaattcggatatgaattgccggcttattcatttacagtaatccggataaacaagaatgaaaaataacaatagataaataaacatgaagaaattactgactttgttgctggcagtcctgctgctggcgggatgtgccggcaataagtccggaacattcgaagcgggcaagaatacctttctgctgaatgggaaaccgttcgtggtcaaagcggcagaggtgcattatccacgcattccccgtgaatactgggaacatcgtatcgaaatgtgtaaagccttgggcatgaatacgctctgtctatatgtcttttggaatttgcatgaggaaactcccggcaattatgactttacaggcaacaaggatattgcggctttctgtaaattggctcagaagcatggcatgtacgtcattgtgcgtcccggcccgtatgtatgtgcggaatgggaaatgggcggtctgccttggtggctgctgaagaacgacagcgtgcagcttcgtactctcgatcctttctatatgcagcacgtgggagcctttatgcatgaagtgggcaagcagttgcaggatttgcagattacccgtggcggtaacatcatcatggtgcaggtggaaaacgaatatggttcgtatggcacggacaagccctatgtgtctgccatccgtgacacggtacgcgccgcaggcttcaccgaagtgcctttgttccaatgtgactggagttctaatttcctgaataacggtttggatgatttgctttggactgtaaacttcggtacgggagccgatatcgacaagcagtttgccaaactgaaagaagtacgtcctgacgctccactgatgtgcagtgaattctggagtggatggtttgaccactggggacgtaagcacgaaacccgtgacggacaaatcatggtggatggtctgaaagagatgatggacaaaggcatttccttcagtctgtacatgactcacggaggaacgacctttggctggtggggcggtgctaataatccggcttattcggctatgtgcaacagttatgactatgatgctcctatcagcgaagcgggctggaccaccgacaaatatttcgccttgcgcaatatgttgaaggattacatggacgaaggccagacattgcccgaagttcccgaagccttaccggtaatggaagttccggctatcaaattcactcaagtggctccgctgatcaacaaccttcccgaaccgaagcagacagaggagatccggccgatggagaaatttgaccagggttggggaagtattctgtatcgtacccgtctgccggaagatgtgaaagcaggaaccattttgaaaattaccgaacaacatgactggacacagatctttgccgacgggaaactgttggggcgtctggaccgccgtggcggagagcaggagttgacattgcctgcattgaaagccggaactcagcttgatttattggtggaagccatgggacgtgtgaactttgacaaatccattcacgaccgtaagggaatcaccgaaaaagtggaactggtgaacggtaagaatgccgaaacgttgaaaggctggactgtttataatcttcccgtagattatgaatttgtatcttcccggaattttcaggatatgaactcgtctgccgcctgtggcatagaaaaaaatgatgaaagtgttccggcctactatcgcgccacttttaccttggataaggtggctgatacattcctgaatatggagtcatggggaaaaggtatggtatgggtgaatggccgtgccatgggacgtttctgggagatcggtcctcagcagactctgttcatgccggggtgctggctgaaaaaaggagtgaacgaaatcattgttcttgacttgaaaggtccgaaagaagcgaccatcgtcggattggacaaacctatcttggatatgcttcgcgtagctgttccagaaacgcatcgtaaacaggggcaaaccattaaactggagaaggaaacaccggtagctgccggtactttcaaaccaggtaacggttggcaggaagtgaaagtacctgctacgaaaggacgttacttctgtctggaaggcttggcttcctttgataataccaatattgctgctattgcggagtttgacgtgttggatgagaaaggacagaaaatctctcgtgaaaactggaagattgtttatgccgacagcgaggagacccgtagcggcaaccgcacagccgataagatctatgacctgcaggaaagtactttctggcagacggtggacaatacagcttatccccatcaggtggtgatagatctcggcaaggaatataacgtgactggttttcgtatcctgccgcgtgcggaacaaggagctccaggcatgattaaagattataaggtatatgtaaaaacaaccggtttcggttattaaaatgaaggtgctacagaagaaaaataaaacacagatgtaaggagaagattccaaaagtaggaaacttgcagatagaacagttatcggatactttagcaaattttaaaaattactagagtatccgattttttttataattttgtggcggtctatgattctaatagaaagcacaatgaaatatatattgacctttatactatcttttctctctttcttggtgtgttctcagaacataactattacagatattcctaccattgaccagttgccggtaaatgctattcatcgtgttttcagagacagtgaaggatatatgtggtatggcacggtgaacggattatgtcgtgacgacggctatcatgtaaaggtgtttcgttcggacattgatactccggggctattagaggacaacttggtagaatgtatcgctgaggataagaaaggaaatatatggttcggtacagacaaaggggcatatattcttaataaatcggattacagtgtacatcctatagatccgaagcgtctgaagaatattccagtgatgtatctttatgctaccagtgacggctctatgtggctggggtatcgctctgtattggctaaatatgataccaacgggcagttggttaaagaatatcctatccggaatgaacacggaggagcctccatctccggattttgtgagagtcgcaaccatgaaattattatttctgtgtggaatggtcgggtatatcatctggacaaagaaaaagatgagtttatcccttatcccgataagatgagaagtcgaaatcctacggtgatggttcaggataatgaacaggattatttttggttggctacctggggggatggcgtggtacgtttcgatccttcggccccaggggattccatgtttgtatactctgaaataccggtcaatgcggccggtgaggaggacggactcatcctcagtctggcacaggatgataaactgggatatatctggttgactaccggccacgatttcatggctttgcaaattcaaccggaccggacgttgaagcagttgaaatttccggcaggacttttgcctgtcaaccacatgctggtagaggtcttgaaaggaaaggaatgtttgtgggtatcagcttttgaccgtcctagtttcatcctacatctgatggataatataaccaaagattatgctttgcccgctttggcggacagggtaaaccgcagtccggccataatggctttgtgtgatgatggagatggcatgatgtggatgatgcaggaacgaactggtcttgcactgtatgacttgaaacaggataaagtgaaaatctattcggattttcccgcacttgcttctttgcctttgaataatggacgagagatgacgagagcacgcatcaataacggggtctgggtggcgaaggatttgaatagatgggtctatggcatggctcgtcagggaatggagatgcatctgaaagatgttatcgacttgaacggacaggtggaacagaatgctacagtgacaaaattatatgaagactcgcatggaatcttgtggataggcttgagcaaaggactttgtagctatgatgttcgtcagaaaagagtcaaacgggtttatccggatgtgggtcatgtgatggggatagtcgaaaataaggaaggactgatatggatttgtactcaggacaacggtttgtttcagacaacggcagatgaaaaactgcgttcttttaaattagaaaagaacttctcctgtctgtctatcgctcctgatgggattttgtggttgggaacttgtgacggaggggtctactcttatgacccttcagagaataagttgctttgttataatggggcctgcggcatgaatggtaatcaggtgaaccagatagtggctgatgcatataatcatatttggattgatacgaaccagaaactgatagaatttaatcctcgtaacggttcgttccgcacctatcttaccacggatggttctatcttgttgcatcgctttcttcccactgctgtttgtcaagcaaaagatggcaatatttattggggcggcattccgggtatttgcatggttactccatcaaacgggttggaaagaaaggctagtgcagtgaagaccaagataactgatataaagttgcaaggagaatcattgatattcggagatagaaagagtagcaattccattaaccggatagaattgcatcccgatgatcagaatttggaaattagtttttcttctcttaaccaccgttatgcttcaaagatacgctatgcttatcggttgataggagtggacaaagcgtgggtatatgtggaaggtggaaaaaactcggctttttataatcatctgagtaagggcacttatacttttcaggtgaaagcgacggatgaaaatggtctttggagtaaagaggtaactgaactgactatccgacgccttcctgctttttatgaaacttggtgggcgtatttgttctatgtattgatagtgatgggtgtatccggttatagtctgtatctttatctgaagcgcgtggaccgtaagaataatgaaatgtgggcggacagcaaggagatgattaaaatgcgtatttatttggatagtaaggtgaatttgcctgaacctgagtttgtacaactggacaaacttctattggagaaagcggtaaaagccgtggaagataaccttactgagcctgattttgatgtgacagctctagctgatgccatgaatatgtcccgttctactttgacccgtaaattgaaagccataacaggtcgaactccattggattttatccggaacatcaagatgaagcatgccagacacatgttggaagataaagacaaaagtgtaacagaggttgccgctacgttggggtattttaatcggaagtatttcaccacttgctttaaagaggaatttggaatgactcccagtgagttccagaaatcacaacacgaagaataaacatcttcctgtcctttaattgttgcaaatagggggtacaaatgcgtcaagttatagctagagccatttgtatcccctgttagcatggttcttcacctgtatttctatttcctatttcattcttttgccacaaccttttacggggagaaaaacacatcttcttcattcattcccgcagtaaaggtatgtataactttaaatttaatatagaatgaaacatttgtttttgttgcttactctgttaagcttttcattaacagccttagcccagcaaaaagtgacgggtaaggtgaaggattcttccggcgagcctgtcataggagccagtgttgtcgtaaaaggcaataataccatgggaacgattacggattttgatggaaactttatgttggatgttcctacaaagagtgtattggttatttcttatattggttatgtcactcaggaagttccgacagcaggaaaaaaatcattagagattattttaaaagaggataccaagaccttggacgaagtggtggtgattggttacggtacacagcgtaaaggggatgtaaccagttctgtagctagtgtgaaagccgataactttgtaaaaggagccgtgaaggatgtgggacagctgattcaaggaaaagtagccggtctggctatcacaaatcctaatggtgacccgacgggaagtactcagatacgtcttcgtggtacaaataccattggtggagccaatacagcccccttggtgttgattgatggaattccgggcgaactcggtactgtggctccggaagatgtggagagtgtggatgtgctgaaggacggttctgctgccgctatctatggtacgcgcggtacgaatggtgtgattttgattactaccaaacaggctaaaggagtggatatcaaccaggtggagtataatggttacgtcagtacttctcttattgccaagaaattggatatgttgaatgcggatgagttccgtaccctttatcccgaccaggatcatggggctgatacggactggattgatgagattagccgtacgccgatcagccacgttcacaacttgtcattgatgggtggtaactcaaagactaattatattgccaatttgaactatgcttctcgtcaagggatcatgaaaaaatcagatttcgaaagttttcaaggacgtattgaggtgactcaccgtatgtttgatgataagttgaaattgaaattcggtttgtttggtaagaaaaatcaaatggaatctacaactagtgggggtagcttcagaggttgggtatatggtcaggcaactcgtagaaacccgactgatccggtaagaaatgaggatggtacatggaatgagaatgtgagcaaattcgaatatgagaatccgttggctttgttgtatgaggctgaaggaaatgtaaaaaagactcagttgcgttacaatggaaatattgtttataatcctatcaaagatttgactctttctgccgtattctcttatattcgtgacaatatgaaccgtggctacggcgagactttgagccatatttctgctttgcgtgatggattggcaggttggtcttcggtaggtgcttataccaagatggagaagttgatggaacttactgcacaatataacaaagaaatcggtgcgcataaattcagtgtcttgggtggttatagttacaatgaaacagattttgaagaactttggattgataactatggttttcaggatgattattttggcggatggcataatattggcatcggttctgctttgaaagacggtaaagcgaacatcggctcaaagaaaactcctacaaatttgatcggctttttcggtcgtgccacctattcattcaagaatcgttatttgttgatgggagcccttcgttatgaaggagccagtcagttatggggtactgataatgcatggggacttttcccgtccgtatctgtaggatggagaattaccgaagaagcatttatgaagaatcagaagatttttgatgacttgaaacttcgtgtgggatatggtgtgacaggttcacagcctaaagatccttttctgggtgtggctatgttgaaatacggatcgtatgcttttgtaaatggaaattggatacagaccatcgttccggcatccaacccgaatcctgatttgaaatgggaggaaaagaaagaaactaatattggtttggacttcgtttcatggggtggccgtttgtccggttctattgattattataaccgtgatgtggatggcttgatatacgaatatggagtaccgactcctccgaacttgtataataagacaatggccaatgggggtacaatgagaaatcgtggtgtggaagtgttggtgactgtggttcctgttcagaataaagattttgaatggagcactaccggaacattctctttgaactctaataagctaatcagtttgtctggcagtatctttaagtcggattacgactattttaatacgggtacagtggaatactccggtcaggtagccgattctcacagagtacaggtgggtgaaagtatcggtaatttctatggctttaaagtagtggatgtagacagtgaagggcgttggatctatgaagacaggaatggtgagctggtgaactataaggactttacccatgctcctgaagataaacatgtgattggtaacggtcttcctaaatggtatgcaggatggaacaatactcttcgttataaaaacttcgacttgaatgtgactatgcgtggcgcgtttggcttccagataatcaatggtggacgtatgaattacgagaatgtaaagaacagccgttttgaaaatcgtttgaaatctgtgaatgacttggtgtttggcaagcatacgttgagcccggaagtggaaccggaattcaacagctattatgtagaagatggtgactactggaagattgacaatataaccttgggatatagtttcggtcaggtaggtaaatatataaagtcactccgtatctatggttcggtattgaatgctttgactataaccggatataaaggtattgatccggaagtatcaacagacggcttgactccgggatatgatacacgtgacagatatccgagtgtgcgctcatttactttcggcgttaatgtgaaattttaatgaactaaaaaggaattgaagatgaaaacaaatataaaattatggacaatgggactgatgacagccgcattgttgggaaatacagcttgtactgatttactgcatgagagttatgggcaggtagtgtctgaggattacgtgccgaaaacggaggaagatgtcagttatctggtaaatgccgcttatataccttggcgcgaaacgttattgcaatggaacggagtggttcgtgcacaggaattatgtgcggatcaggatgttcttcccgctcgcgatggtattggatgggtagacggttatatctataaaagatggcatcagcatacttggactaccgaggatgacggtgtacttcaaggatgggaacgcacgtacaatggtgtgaatacctgtaaccgtattttatctcagatagaagaaggtgtgatcagtgtggatggagaaacgaaagaaaagttgattgccgaattgaaagtactgagggcttcctattattatattttgattgatttgtatggtaatgtgcccattgtgacagactttaaagatacttcattaccgcaacagtctactcgcaaagaggtctttgactttattgtgaaagaaataacagagaatatggatttgttgtccgaaacgccgagaggttattattatggacgtttcaataagtgggcggcccatgcattgctggctaaaatatatttgaatgctgaagtctggtcgggtactgctcagtggcagaaatgtatcgacgagtgtgatatcgtgattaattatgccgagaagtccggagaatatgcattggaaaataatcagaaggatgtttttgtaacgcataatgagaattccaaagaaataatctttgcattgccgtttgatgaaatttatgtgacgggatggaatgattttgatttccacatgtacactttagcacctgaaaaccaggaaacttatcagttgactgcacgtccttggggtggtgtgtgtgcagtgcctcagtttattaattcttttgataaggatgacgcacgtttggaggctaactatattcaaggccagcaatatacctattccggtgaaatcttgaagcgtagtattgatggaaagccattgatttatacggtagatgtcccttctattgaccagtcggatgtggatgatggtttccgttggggtaagtttgaatatgccaccggtataacaaaccgcttgagtaatgactggccgttgttacgttatgcggatgtattgatgatgaaagcggagtcattgatgcgtttgggcaaatcgggagcaggtgctttggtgactcaggtacgtgaacgtgcctttaagaatgagcctgaaaaagcgcaagttacagatgcagaattgatgggaggaagtgtatatgattatggccgaagagatagttataaggcagaacatgatggtggagcggatattaaatatggtcgtttccttgatgagttaggttgggagttttgtcaggaaggacgccgccgtcaggatatgattcgttttggaatcttcaccacgaaagcttggttctctcatgataagagtgatgaaaccaaaaatctgtatcctattccaaataaagtattgttgaccaatagcaatctgaaacagaatccgggatattctaaataatcaggttatttcatccggtggaatttactttggattttcacaaaatagttccatcggatgctctttgtttaatcataggttgttcaataggattttttaaggagtaaaagattgttttcatttattccattaattttgcaaggaaataagactttgaaataaacccctaattatgaatttacttaaaatcattttgtccacttccgcttttgccatagcttcagtagctttgcatgctcagttgcccacaaaagtagaaagttttccggttagggatgtgcggctcaccgccagccctttcaaacatgcagaggatatggatatccgttatctgctgggaatagaccccgaccgtttgttagctccttatttgaaggaggctggtctgttccctaaagccgaaaattatactaattgggaaaatacaggactggacggacatattggcggacattatttgtcggccctttcctatatgtatgccgctacaggcaatcaggagatcaaggttcgtttagattatatgataagtgaactgaaacgttgtcaggatgccgccggtgacggttatttgtgcggagttccaaacgggcgcaaaatgtggaaagaaatagaagaagggaacattcgtgcctccggtttcggactgaacgatcgttgggttcctctttacaatattcataaaatgtatgccggccttcgtgatgcaactcttcagacaggtagtaaggaagcaaaagaaatgttggtgaaactcactgactggatgattcgtctgatatctaaactgagcgatgaacagatacaggatatgttgcgcagcgaacatggaggactgaatgaaacattcgccgatgtagccgctatcaccggcgacaaacgttacttgaaactagctcatcagttctctcatcagactgtgttgcagcctttattgaaacaagaggataaattgaccggcatgcacgccaatacccaaataccgaaagtgataggtttcaaacgtattgccgatttggaaggcaatcgggactggagtgaggctgcccgttatttttgggaaacagtagtagaccatcacagtatcaccatcggaggtaacagtgtgcgtgagcattttcatccggctgatgatttcagcagtatgctcaccagtgaacaggggcctgaaacttgtaacacttataatatgctccgccttacaaaaatgttgtatgaaacgagtgcggacgctcatttgatggattattacgaacgggcgctttataaccatatcctttccacacaagatcctgtacaaggtggttttgtttatttcaccccgatgcgtgccggtcattatagagtctactcgcaacctcagaccagtttctggtgttgtgtgggatcggggatggaaaatcatgcccgctatggtgaaatgatttatggacacaaggataataatctgtatgtcaatcttttcattccctctaccttgcgttggggagatatccatattgagcaacaaacggctttccccgatgaggaagggacaactcttgctgtttctccggaaaagggagagaaggaattcacacttcttttccgtgttcccgaatggacgaatccggaagcattacgcttgtctgtcaacggtgaacaacagaaagtaacggtcaaagagggatatgttagtttgaaccgtacttggtcaaaaggtgacaaagtgagattggaactgccgatgcatctgcgtgccattgcattgccggatggttctgccaactattccatcttatacggaccgattgtgctggccgcccaattgggcaagcaaaatcaggatggtatgttcgccgatgatagtcgtggcggacacatagccgccgggccccgtctgcctttacaaacgatgcctgtcatggtgggggataagaatgatattctctctcatctgaagaaagtggaaggcaaaccgttgacatttgcgttgaccggagtctatcccgaacgttatgagggcatgattgtggaaccgtttttccgtttatacgagtgccggtatatggtttattggcccgtcctgtccaaacaggagttgcaggcaaggcaggaacagttagcgaaagaagagaaggaacgtgctgcattggatggtattactaccgacaaggtgatttgtggggaacagcaaccggaaagcgaccatttcatccggatggagaactctcgtacgggggatgatgaaggtgttcattggcgcgaggcaaccggttggttcagttatcgtatgaagacgaatggaaaacctgtccataaggtccgtatcctgttccgtcctgagattcgtaaggatgcaaaagtatggataaacgggcaggaagtaggtaaattagctgacaaaccagcttcggatttgtcggttggcatagttgacgtgcctgtatctatgcaatctgatgatcagttggaaataaagattggtagaggaaatgagaaagtgactccgcatatttatgaggtgcggttggtgactgaataaatacatgctttaaagtaataaaaacgatcatgtcttatgggtatgatcgttttttatttctttttataaatgaagtacctgtttgctatctgtctttccgaaaagattctctatttttgcaggaaacaaaccgaacagctaatgaaaattctccatacagcagactggcatctgggccagactttttatgaatacgaccgccgggaagagcatttccattttctagaatggctgaaacagcagataaaacagcatgaaatagatgtattgctgatagcaggcgatgtattcgacagcccaaatccttcagcagaatctcaacgagtgtattatcgttttttaagagaagtcacatctgagaacccttctttacaaattgtcatcattgccggaaatcatgactcggcagctcgtctggaggcccccaatcctttattggaggatatgaatatcattgttcgtggcacggtgcggcgcaatgcggaaggcgacatagatctgcaacacctcattgttcccctttatacagaaggaaaagtgaccgcttattgtcttgccgttccctatctgcgtcagggtgattacccttcggcagaaaattactcaaagggagtccagcagctttatgaacagcttttcaacaaagtgaaagagaagggaattcccgttgtcgccatgggacatctgcaagccacaggctcggaaatctcggaagacgaccggtcggaacgtactgttatcggcggcttggaatgtgtatcccccgatgcctttaatgaagccattacttataccgcattggggcatctgcatcgctcccaacgtgtatcccatcgggagaatgtgcgttattccggaactcctatgcctatgtcttttgctgagaagaataatgcatccggtgtagtcatgataacgatagatacggagggtacaaatattgaaaaattggaattccagccgttggccggtttagtaagtatcccccccgaagctcgtccgttggaagaagtgttgcaagtcattggtgaattgcctgacggtgatgtcacgttgcgttcaccttatctggaaatcaagatcttaatgactgaacccgagccttcttataaatataagattgaggaggccttgaaagggaaagcagtccgtttggcacgcatcgccgccatgcttccacagaaaaaggcaagtggcattgccgccacttcctatgaggaattgcagaccatccgtccgctggatatggcactggatgtttttaaacgaaaatatggagggacggagatgcccgataccatgaaacaattgttggaaagtgtgatcaaggaggccggaatatgaaaatagtagcgataagagggaagaatctagcctcattggaaggcgaatttgttattgactttaccgttgagcctttatgttcggcaggtatattcgccattacaggcagtaccggagccggaaagtcaaccttgttggatgccttatgcttggccttgtttgattgtacgccgcgtatgaacaaggcgaaagagaataacgtttctgttatggatgtcgccgacaggggaattgctcaaaacgacagccgttccatccttcgtcggggtacggccgaaggttattcggaagtggactttgtagctttgacaggggaggttttccgctcacgttggacggtacgacgttcgcgtggcaaagtggatggttccttgcaaaaagtggaaatgacattgactaacctcacttccggagtagaacagcaaggaacaaagacagaattattatctcacatcagtaaattaatcgggctttcttttgaacagtttaaccgttctgtattgctggctcaaggtgactttgccaccttcctgaaggctcgtcagactgacaaagccgaaatcttggaaaagttgaccggaaccgaaatttactcacgtatctctgcttccatctatgaacgcaccaagcgggcggaaggtgaatataaattattgcaagaacgtatcaaaggcattgagttgttgacagaagagcaattgcagcaactttcagctgaaaaggaagaattacaagttcgcttgtccgtttcgaagaaaaaagaggaaaacctgtccggcaagttgaaatggctggaagaagaaggacgcttgaatataggttgcatacaggcggaagaaacactttcggttgtcagaaaagaaatagaagcagcccgtccgcgttatgaactgttgttccgtatagagcaggcgcaggatatccgcgatgtgtatatggaacaacgtaatgcccggcaacagactactgccggacgttcccgattgaacgaaatacaggttgccatacagaaaaatgctgctttgcaaacttccgcgaccgcacagtgggaagctgctcagaaggcgcaaacggaattcaaggcttatctgttacaacaagaaccacaattggataaggctagagcattggatgtgcaattggcagaaaatagaaaacaactggtggaaagccggaaggaagtggctttggcattacaagctaaggataatttgcatcaatctatctgtaggactgaaaaggaaataagtctgttggcagagaagcaaaacattttgcaaacttggtttgagcgatatactgcttattcccaacttattccggctgttgaattgataaccagtttgcttagtaatctggaaatagcaaagacgcagactctgtcgaatcagcagttgctggagaaagtaaggaatgcgaatgaaatggaggaacaacgtttgaaatccgtacaacaagaggccgagcgcctgaaccgtctgttgccggcagaagttctgttgctccgtgcgcagttggaggagggaaaaccttgccctgtttgcggcagtcttcatcatccgatgagggaacagatcaatgtccaatccttgcaggaagaagaactgaaccgtgccaaagaacaggttgctaaggaaatggaacaactgaagaatacgttgaatgcccgtcaactggagatggcccgtctgtccaccttgattgagaattatacagtacaaagtgaagatatcttgaaaaaagttgaaacctgcgtttccattattcctacctggaaggatttattggagcagggaacgttgaaacgttatgtccagcaattcggcaggcaatggaatacccgtctgcaggagcagaccgaaataaaagaggctcttacctcaaaatctgcccaaagggatagtttgaaaaatgaagaggcgaatgctattcgtttgtacgaagagaaaaaacagaaagaagaaaagcaacagactgaactggaagaacgcacttgtctgcgcgcctctctgctgaatggtgaacttaccgaaaaggtcgttgcaaacaatgttaaacgacaaaaggaattggaacaacaacaggaaaaagcaatgaacttgcatcattctctaaccgtacaagcagaatcttacaaagggcagatcgcgcagttggaaaaggaattagtccgtctgactgctgttttgcaacaagacgagttgaaaataaacgagtggctcactcttcaaaaggaaacgtatgccgagttggaacaattgctttccaaagacaaaaactggatactggctgaaaaacaagcattgagtgcattgaaagagaaggaaaccgtttttcaggcagtcctttcagagcgaagacagaaaaaggaggaacatcagcaagctcccttgaaaccggataccacggagagcagggagtcgctggctgaaacattgacagcctgcaccgccgccaaagaagcggaaaccgggcgcttggcccaaatagaagtgacgatacagaatcatataaaaggtaaagaacgcatagccggcattaagaaggaattggaggagaaaacttccatctacgagaattgggcgaaactgaatgagttgttcggttcccaaacggggactaagtttaaggaaatagctcaaggctatacgctcgatgttcttttactttatgccaacaggcatttgcaggatcttgccccccgttatgaattgcagcgtattccggacacgctggccttgcagattgtggatcttgatatgatgggtgaggtacgtagtgtccattccctttcgggtggggagtctttcttggtatctctcgctttggcattgggcttgtcttccttgtcctccaaccggatgaatgtggagtcgctgtttattgacgaaggtttcggatcattggatatggacaccctgcgcattgcgatggatgctttggaacggttgcagatgcaagggcgtaagataggggtgatttcccatgtggcggagatgacggaacgtatccccgcgcaggtgcaggtggtgaagaccggaagcggaagaagcaaggtgcaggtgatgggacaaatataaggattgggctccattacagatgatgagttataaaggcaagttataaggatagaatatagcaaatgatattctatgtggaaatatctgtcatatttcgtgtatgtgaaaatgctttgtatggtttggttatgaattgtttaaaaaaatgttttcaaacaaaaaactcaaaaaaagttcttgacattgttgtttttttggtaaaatacatgtatgtttggaatgttcatcaaaatggacaaggaattataaacaaaagcgtttagctggttctgtataagtgaaaagtcgaaatttcccggaaagtaccaagaacagccatacgttcagcctgcaatatttagcggggggcgtttcctgtttgtaccaaaggcttcgactcccgcacttatagacgaggttaatgcccttccgcttttaatttagatgggtttgcacatagggcacaagcctggagattatattatgacaaaaataaacacgtgcaaatctcgttcttacctgaaaagtattatcaaacattggaactccactgaaaagaaatttccaatacaaggctgatatatagattcatgtgtctggtctatatgtcataagtatctggttttttcctggaaaccgatattacttcatatataaattcaattcggaactacttataaataagatcatggataagaaatctgtaaaaatcaatgctgaaaaaatatggtatacactgaatgaggtgaagtctgtttcaatatccgaacttgcaaggatacttaacctgagtattgaaagtactgcattggctgtcggttggctggtatgtgaaaataaagttttcataggaagtaaaaacggacagattgaaatctgtagtgaaaatacctataatttctgtttcggttaaattgaaagatatgttgcaatgaataagaacggttcggtataaatgctggacaatcagatgaaagctgccccttaccgtttttacaggcattgtacaatagatgaagatggaatcatgacttgtcatgctggaagtggcagtgaactgaatatttctgaggaagtgtttgaattccgtcttagagatatggaatccctgaactggatgatgagaaaggccagactggaaggacgaaaaatcagaccggcctctcttgatgagagatattttgacaacttgctaaattataaaagattccagtattaatggtatgattgctggcgcagaccttttatgcctcgcttttattataatataagaatgaaagcgtgtcctgattgatgaaaaagacaacaaggagggacttgaacagattattttatatatcggtatagtattcaataaaataaaaaagtgacggactatgaaaaaaacattaattggattattgggctcgacagttatatgcgtactgtttcttgcaggttgtattgatgaacattacggggaggatagcaataccattgttaccaatctgaccggctatgcatgggagagaacatttcagatacgtactgaggatggcagggatgcggaagtctgtgaacattatgagttcgggctgaatggtaaggcttcctgtaaatcacggacgacatgtgatagcgaggaagtggaagagcatgtacattatttccggtatgattttatcactcccaataacagatatcttcttctggattactgctactggcagattgacaggatcagttcttcagtattgagcatatatgaaacctctgacaatcctgtgattgtgatggggcagaccagggaatataagagtttctcggctgttccgttggggaatgactgatgcgctatgtttgatgtgtttttaggaacagaggcgttacaggcataagtgagggaaaaatatgatttttgtctccatattgaatcactgtttttacttatgagaatcggaccggtgtttttgatgggattttgtattcagaaattccacatcaaagacaaggatgttttttaaaaagatcaagagcttttaaaaaaagaacaggagctttttcaaaaacaacaggatgttttgatgtttttccactcgtattgtataacatggcaaaacaccttgtttttctttcagaagtttcagtctctccgcaaacgtcctgttcatcggcttttcggctgaaggatatgcacgataaaatccttcagccgaaaaagatctttcagcgtgacagggtaagcgatgtcgtattgtttggttttctatcggtgttcggattcacctttatacatttattgaccacggctgaaagaaagaactacgcagttgaaggatctcagtgcatcaatctgtcagccggaatgccgatgaacaggacgtttgcggagaggctgaaacttctgaaggtttttggggggattctccgggagagggggatttcttttcaaaagatggatacgcatatcaaaaagaacgtaagaagactttgcatacttgccgcaagtttttcggaatcttgtagcaggatttgcagattcttggtataggaatatcttgtttgattttattgttgtctggtaaaaatgccgaagtttcccaaaaacggtctaggcttgcgataaacagattcggttttaatggtaaacaaatatgattgtatctgatacaaaggtagtaatttcctgccaacgggcaaaattttaatataaaaaggggtaattgctttacgccgatcaatagttgtatggaaaaataatatctttacaactttgttcagatttaaggtgttgaacctatatactggtcatactaggagtatgtgagagataatatattcaggtgattgttatcgtccgtgaggtgaaaaatcaaggatttatcaaataaacatgtaacttatttgatatatatatattccgataatttcagtatattttgtagaatgtgtctgtgcaaactagacgtagcatctatcgtctgtgaaaagttggatacttattattgaacctgaatccgaatcccagcatcagatagttaggatcatggaaatcctgtaaattatatccgatatgaaggaatgagctgcgcgtaacttctatctttagtgccaatatctggtagaaagattttaaatctccgcctgcatggatcacatttgtacctaatcctattccaactgtgaagtaaggcattacgtactcggcacgtcccgaaactcctagggctaattgtttgccggcagacggcttgaggaattcgtcaccgtatccgtctggactatatacattcgcactgccgtcataaacaccgtccaatgaaatacctgcacggaacttatatccgaaattatacatcggcgcgaaattaaatccaagtaccggataagcttcaggagaagcaaccatttgtccttcgccaatagttactccttttctgcgccatgaaccgaacaataccaagtcataactgatatgacgggggaatttaggtacgggtgattgatatagaggttttgcaaaacattcttcttttctgttaatattgtagaccaatcctacctttagtccgatggaattaagtcccgcattcgggaattttgtattaccgttagagaaatgcgtcactgccacacctgttgtgaaatcaaatttgggagagagcatccagttgaaatagaagtttgtattcagataggcgtttacttttgaacctatcaccttattatatgggttcaaatcactgtgatatggtttccagccaaatgaagcgccgaagttccattcatagtttaacgacaatcgttggttgaaacgggcgatacgcgctccttgaaataaatagacagtaagcgggttgcccaactgcggcttctcatacatattgtagtaggccacaccgataccttgataggctcctctgtaaatacggtcggtataggtgttcggatgaaattggaatgagtatttcaagtgaagcgacagggaattctctatgggtttccaattcagattttctcctctgaaaaaggaactggtggggaaaatatatccgggacgtgcctcaatgccgatacggtggataaagtgacgtttcaatgacagagaatctacataaagccggtcggggatgttggttttgtctgaaatggaaactgctgttgtgtctatagggattccctctgtataatgattgattttgtcttcagcaaaggtcatgttacttaagaacagtaatgcacccagaagtatcatgaatttccatttttgtattgtgcctttcatatgccgtgtaatgtttttgtgttttttactgatctattgtatggtctgaattttttatttgtggcacaaatataatcatagtatttgaaaaaagaaatttgttagatataaaaaggttttgtataaccttgataaccactatttaaactattttgaggatgaattgtaatatcatcctctaccatcggctccccacatcattttgttgcggagtgtgttgaaaaagatatggctgtttcgttttactacatttattttatagtcggctttgcggatagtgagccggcttccttcacggcaagtttcgctacgtccgtcgatggcaatcaggaaattgtggctgcggctctctatatccaatgtgatttcccagtcgtcgttgatgacaatggggcgtacattcaggctatgtggtgcaaccggagtgatggcgatggtattactgtgtggcacgatgacaggtcccccgatgctcagcgaataggctgtagaaccggtaggagtggcaattaccaatccgtccgcctgataagtggtgagataggccccattgatggctgtgtggatggaaatcatagaagaactgtcacgcttcagtaccgctatctcattcagaccgaaagggtaacctttcagttcttgttctttgcaggatacttgcaatacgctgcggtcttctatccgatagtttccattgtagatatcattaaatgtgtcctccatctcttcaggggagacatcggccagaaaacctaatcgtccggtattgatacctagtatgggaatgttgcgtgaacccacacggctggcagctttcaggaaagtgccgtctcctccgatacttagtatcatgtcggcttcaaaattatttccatcgaaaacaccggcgtgacggatgcttatcttgaggtcgttcgtcagaaactggtagaactcgcggcagatatggacttcggcgttatgttgtgacagaatggatagcaaacgttccacatgagccgatttcttggcttgataagtgtttccgaaaagggcgaatttcattgggcgtatattcattagttaattttataaatcttttgtttgtcaaaatggaccaggttttaataaaacctgctaactttgcacatcagaactgcaaagataataatatattgccaagatgacaaagttaagtgtaaatataaacaaggtagccaccttgcgtaatgcccggggaggcaacaatccggacgtggtgaaagtagccttggactgtgaggcgtttggtgcggaaggtatcactgtacatcctcgtcccgatgaacggcatatccgccgcagcgatgtgtacgaacttcgtccgttacttaccacagagtttaatattgaagggtatcccgcaccggagttcgttgacctggtactgaaagtgaaacctcatcaagtaacgctggtgcccgatgcgcccgatcaaattacgtctaatgccggatgggataccaaggccaatctttctttccttaccgaactgatggatacgttcggacaggcaggcattcgtacctctatctttgtcggtacggacaaggagatgatagaatatgccgccaaggcgggggccgaccgggtggaactttatacggaaccatacgctacgatgtaccctcagaatcccgaagcggccattgctccttttatagaagcggcgaaggtgacacgtagcctggggatgggactgaatgcaggtcatgaccttagtctggtaaatctgaaatatatgcatacgcatattccttggctggacgaggtgtctatcggtcatgcattgataagcgatgcgctttatatgggattaaaacaaactattgaagaatataaaaattgtcttcgttcatgatgaatatcactttattggctgcacaggcggctttggcggatacccttgccgggggtaaccccacattgacacccgtttcgggggaggctcagatgaacctttgggatatggcggtaaaaggcggatggatcatgcttgtgctggctctgctgtccgttgcgtgtttttatatcttttttgaacgtcttgcttacattcgcaaggctggtaaggaagaccctttgtttatggaacgtatccgggattatattcgtaccggagaggtgaaatcggccatcaattattgccgtattactaatacgccttctgcccggatgattgaaaaagggatttcgcgtatgggacgtcccgtcgccgatgtgcaggctgccatagagaatgccggaaacattgaagtggcaaaattggaaaatggcttccccgtcatcgctacggtttcgggtggtgctcccatgcttggctttttaggaacagtgactggtatggtgcgcgctttttgggagatggccaatgccggaaataatattgatattacattgctgtcaggaggtatctacgaggcgatgattactactgtaggtggtcttatagtaggtattgcagccatgtttgcttataattatctggtggtacgtgtggataaggtagttggccagatggaagcccgtaccatggattttatggatctgctgaatgaaccggttcaaaaataaaaatatatggcgttaaaaagaagacaaaaaatatcacccaatttcagtatggcgtctatgacagacctcatattcctgttgctgatatttttcatgattacctctactatggtgtcacccaatgccattaaggtattgcttccgcaaggcaggcagcagacttcggcgaaaccacttacacgggtaattatagacaagaatctgaacttctataccgctttcggtaatgaagatgaaatgccgatagacttggaagaactgcccgcattcctgcaaaggtgtgccgagaaagaacccgatatgtatgtggccctttatgcggatgaggttgtgccttaccgtgaaatagtaagggtactgaacattgctaatgaaaatcacttcaagatggtgttggctacacgtccgcctgagaagaaacgttaagctgtaagcatgaagaaaaataagataacaggactgattggtacggctgtactgcatattcttctcctaatcctgctgttggtgattgctatccgtcgccctcaggctcaggaagaagggggtgtccctgttatgctgggaaatacggaactttctcaaggaaatgccgatccttatacgctgacggatgtggatataatgaatgagcccgaggttccggctcccgatgtatccgaatccgaaatggtttctcccgtcgaaacaaaagaggaaatcatcacgcaaacagaagaggaaacggtgacagtccccaaaaaggaacctaaaagagaaattcctaaaaaagaaaagcccaagaaggagactcctaaaaaggacgtaccgaaaaaggagacggtgaagccgaaagagaagactgaggccgagaagcgtgctgaagcagaaaaagcagaggctgagaagaaagcggcagccgaaagagcggcagccgaaagagcggcagcggaagcggcggcgaagaagatagccggtgctttcggaaaaggaactcaaatgggaaataaaggaaccggtactacaggcttcggtttggagggtagcccgacgggaaactcttcggaagggaaatccagcggagtgggcggttacggaacatttgacctcaatggacgttctttgggtagtggcggtttgccgatgcctgtctataatgtgcaggatgagggacgggtggtagtgactattaccgtaaatcccgcaggacaggtgataagtactagtatcaacaaacgtaccaatacagtaaacgcttcgttgcggaaggcggcggaagaggctgcccgtaaggcacgctttaaccaagtggacggagtgaataaccagacaggtactattacatattactttaaactgaagtagcttatgaaaacaatttatgtatttttggcagaaggcttcgaggaagtggaggcactgaccccggtagatgtgttgagacgtgcaggtttgcctgtaaagaccgtttctataacaggtgtgctgaccgtaaacggtgcgcatggtgttccggtagtagccgatatggtgtttgaagaagtaaaagaagaggatgcggaaatgattgtattgcccggcggtctgcctggagcgacaaatctggatgctcacgaaggtttgggcaagttaattatgacatttgctgaagcgggacgtccgttgtctgccatctgtgccgctccgttggtatatggaaagcgtggtttgttgaaaggtaagaaagtaacttgctatccgggatttgagaagtatctggaaggtgctgagtatactgccgctttggtagagaaagacggtaattttattactggtaaaggtcccggtgccgctatggcattctcatttgctattgctgggaaatatgtcggtgcggaaaaggtggcagaattgaagcaagggatgatgattgcagaatgaacaggcatgtcattatagttgcgggaggcaaagggttgcgtatggggggagatattcccaaacagtttttgcctgtgggaggcaagcctgtgttgatgcgtaccatagaggctttttacgcttttgattcttctatacatattatattagttcttccggtgagccagcgggcttactggaaagatctttgtgaaacgcatcattttgctttgcgtcatgatattgccgatgggggcgagacccgtttccattctgtaaagaatggattggcatacgtgaggggagaaggcttggtaggtgttcatgatggcgtgcgtccttttgtttcccgggaagtgatagccggatgttatgaggcggcgcagactaagcaagcggtcattcctgtaattgatgtggtggaaaccgtgcgtcatcttacgaagccgggaagtgaaacggttccgcgtaatgactataaactggttcagactcctcaggtctttgaagtgcagttgttgaaagaggcatatcaacaggaatatacggatgcctttactgatgatgcttctgtagtggaggcgatgggcagggaggtctgtctggtacagggaaatagagaaaatattaaattaaccaccccttttgatttgaaaatagcggaagtcttaatttgaaatgttcgatatcactacgcgtgacataaaatatttgcaaggagtaggcccgcagcgtgcaaccgtcttgaacaaggaattaaatctgttttccttgcatgatttgttgtactattttccatataaatatgtagaccgcagccgcctttattatattcatgaaatagacggcaatatgccttatatccagttgaaaggcgaaatcctcagttttgagacttttggtgagggaagacagcgcagacttgtcggtcatttttctgatggtacgggcatcattgatttagtctggtttcaaggaattaaatatctgttagagcactataaaaccaagacagagtatattgtctttggtaaaccaaccgtattcaatggtcgtatcaatgtggctcatcccgatatggatccttcaggcgaacttaccttatctacgatggggttgcagccttattataacacaacggaaaggatgaagcgcggtttcttgaactctcatgggctggagaggttaatgaagaatgcgcttgccctgctacaggaacctcttgctgaaacattgcctcctcagttagtagaggagcatcatttaatgtctttggatgaggccatccgtaatattcatttccccaagaatcccgaattgctgcggaaggcccaatatcgtttgaagtttgaagagctgttctatgtgcagctcaatattctacgttacagtaaagacaggcagcgtaaatatcggggcctgcgttttgaacgggtgggtgagatctttaatactttttattcacagaatcttccttttgaactgaccggagcgcaaaaacgggtgataaaggagataagaaaagatatgggaagcggacggcagatgaaccgtttgctgcaaggtgacgtgggaagtgggaaaacattggtggctttgatgtccatgctcatcgcactggataatggctatcaggcatgtatgatggctcctacagagattcttgccgcccaacattatgaaactattcggaaattcctgtttggcatggatgtgcgcgtggaacttttaatgggatctgtcaaaggaaagaagcgtgagaagatattgagggatttactgacgggggatgttcagattcttataggcacgcatgccgttttggaagatactgtgggcttttcttctttgggaatggtggttatagacgagcaacatcgtttcggggtggctcagcgtgccaagttatggagtaagaatgtttgtccacctcatgtgctggtcatgacggctacccctattccccgtaccttggctatgacactgtatggtgatcttgatgtatcagttattgacgaattgccgccgggccgtaaacccatccagactatccatcagtttgacaatcgtcgcgccagtctttatgcctccattcgcaaacagatagaagaagggcggcaaatctatattgtttatcctttgataaaagagagtgagaaaatggatatcaagaatctggaagaggggtatgaactgatttgtgcggaatttcccgattgccaggtcagcaaggtgcatggtaagatgaaaccggcggagaaagatgccgagatgcagcgttttgtcagtggtgatactcagattatggtggccactacagtgattgaggtcggggtgaatgtccctaacgcctcggtaatggtcattgaaaacgccgaacgtttcggactttcacaattgcatcagttacgtggccgtgtggggcgtggcgccgaccagtcttattgtattctggtcaccacttacaaactgaccgaagaaactcgcaagcggcttgaaataatggtacagaccaatgatggtttcgagatagcggaagccgatttgaagttgcgcggtcccggtgacttagagggaacccagcagagtggtgtcgcttttgacttgaagatagccgatattgcccgtgacggtcaattattgcaatatgtccgtgatgtggcaaatcgtattgtagatgaagaccccacagggactcgtccggaaaatgctattctttggcggcaattgcaagcattgcgtaaaacaaatataaattgggcggctatttcttagtttatgttactacattgttaaaaataaagatatatgttgcataacatatttgcgatgttttctccctgtttatagaggttacagggtattttaccgggattttgtatataacttatataaaaaaagagttaaagaagtaccttgtttctcaaggaaaatctctatctttgggagaatttttgaaaagaagcacagtattaaccttaaatgaaccgaatattatgatggaaaaaacgctggttattttgaaaccttgtactctgcagagggggttggtaggtgagattactaatagatttgaaaggaaaggtctgcgtttagccggaatgaaaatggttcagttaacggatgaagtgcttagcgaacattacgctcatttaagttcaaagccgttctttcagcgcgtgaaagatgcaatgatggtttgtcctgttattgtatgttgctttgaaggtgtggacgcagttcaagtagtgagaacattaaccggtcctactaacggacgtctggcggctcctggaactatccgtggagattacagcatgagctttcaggagaatatagttcatgcttccgattcgccggaaaccgctgaagtggaacttaaacgattttttaaaccagatgagatattcgagtataaacaagctgtgttcggctccctttatgctaatgacgaatattaaaagaaaaaccaaaaaaaacggatgattttgaaatgtgttaaagtagtcgcagcggcagccttcgccctagtcagcctgaatgtgtcaggacaggatctgttggcacgccaggcacctatcgaccgaaaattgaaagcagtagattctgttgcattgattcgtcagataaaggcggaaaagtcagcttatcctgcatatagtctctatcctaattggagtaacgagcgtgtacacgcttatggtaatactgttactattcctgatacattccgtattgatatgaccggtttccgtatgccgacagaacacacaaaaataacttctaaatttggtccccgtcgtcgtcgtatgcacaatggattggatataaaagtatatataggtgatacgatccgtgcagctttcagtggaaaggtgcgtatggtgaagtatgaacgtcgcggatatggaaaatatgtagtgattcgtcacgagaatgggttggagactgtctatggtcacttgtcaaagcagattgtggatgagaatcagtatgtagaagcaggagaacctatcggattgggtggaaataccgggcgttctactggatcacatcttcattttgaaacccgtttcttgggacaggccattaatccggcacttttatttgattttgaaaaacaggatattgtagccgattcttatttgtttagaaaaggtaataacagataccaacgtaacacgaatagtaagaacgtgaatttgttggcttcatcagatggtactatccgttaccataaggtaagaagtggagatacattgagccgtattgcacagaaaacaggtacatctattgatgctttatgcaagttgaaccatattacccgtagaactattcttcgtccgggacaagtgttaagatgttcttaagctttagttaattaagaaatacaaaatagggcgggaaagagtattcttttccgcctttttgtttacgcttaagcagaaaaatgcgtaactttgccgtctaatcatagagtgtgatgaaagatacgaaacaacaatttgaacatgtaatagctgtctgccgtgatttgtttgcgaaaaaactgcacgattacggcgcagcatggcgtatcatgcgcccttcatctgttaccgatcagatatttatcaaggcaaaccgcatccgtagtattgaaatcaaaggggtgacgatggtagatgaaggtatccgttcggagtttatcgctattgtgaattatggaataatcggcctgatccaattggagctgggatatgctgatacggatgatatgactgaagaacgtgctttggaattgtatgaccggtatgccaaacaggcattggaactgatgctggccaagaatcatgattatgacgaagcatggcgcagcatgcgtgtcagttcgtatactgatttgattttgatgaaaatctatcgtaccaagcagattgaaggtcacgatggagccacattggtatcagagggcattgatgccaactatatggatatgattaattattctgtattcggattgatcaagttggaatttggagagtaaacagttacatagtatcattggaatctggacaaatgcctgccgctttttgctggcggtagtatttatattttccggttttgtcaaagcggtagatccgctgggtacccaatataaaattcaggattatttggaggctttcggttgggctgcttcggtgcctgcctttcttccgtttctggcgtctatattgcaggcaatggttgagttttgtttaggagtatatcttttgtttggtatccgcagaagaatgacaaccttgtttgttgtgcttatcatgggggtgatgactccgctcactttatggttggctctttccaatccgatatcggattgtggatgtttcggcgatgctgtgactttgactaattgggaaacttttgggaagaatgtatttttgttgatagctgcggcttccgtttttaaatggggaaaccgtataactcctttggtgaccaaacgtttcgattggttggtggctatgtatgcgtttctctatatttcggggatgactttgtattgttaccatgaattgcctgtctttgatttccgcccttatcatatcggggcagatatacgtaaagggatggaaattccggaaggagcgaagcctactgtttatgaaactcgttttattcttcaaaaaaatggagtggagaaagaatttacattagaaaattatcccgatagcacatggacttttgtagattcccaaacgatggtgaaggaacaaggatacgaaccgcctattcatgacttttctattattcgtcaagaagatggggaagatataaccgatgaagtactggatgatgataattatacttttctgttggtggcgcatcagctgagccaggcggatgatagtaccattgacctgataaatgaactgtatgattatagtgtggagcatggatatcaattctattgtcttacttcatcacccgatagtgacattgaagactggcaggagcgtacgggagccgagtatcctttttgcctgatggatgacattacactgaaaaccatgatacgctctaatcctggactgatgttgctgaagaacggagtagttataaacaagtggagtgtgaatagtctgcctgatgaatatgtgctgaccgacaggctggaaaaattgcccttggcacaaatcaatgaaaagactttcagtcataaagtggtgctggtattggcatggtttgtcttcccgttgttgtttttcagcatggtggatgtcatttgggagcattttcataggaaaaagaaattgaaagagaatcgaacaaaataatttcattaaccctttaataaaataaacaaaatgagaaaaaacattgttgcaggaaactggaaaatgaacaagaaccttcaggaaggtattgctctggcaaaagaattgaatgaagctttggctgttgacaaacctaattgtgatgtagtaatctgtactccgtttattcacttggcttctgttactcctattgttgacaaagctgtaattggtgtaggtgcagaaaactgtgcagataaagtatcaggtgcatataccggtgaggtttctgctgaaatggttgcttctacaggtgctgaatatgtaatcctgggtcactcagaacgtcgtgcttactatcacgaaacagtagaaattctggaagaaaaagttaaattggctttggctaataatttgaagccgatcttctgcatcggtgaggtattggaagagcgtgaagctaacaaacaaaatgaagtggttgctgctcagttggcatcggtattctctttgtctgctgaagattttagtaagattatcctggcttacgaaccggtttgggctattggtacaggtaagactgctactgctgaacaggctcaggaaatccacgcgtttatccgttctttgattgctgacaagtatggtaaagaagttgctgataatacttcagtcctttatggtggcagctgcaagccttctaatgctaaagaattgtttgctaaccctgatgtagacggtggtttgattggtggtgctgctttgaaagttgttgatttcaaaggcattatcgatgcattcaaataattaattttatcacagattactcaagcttacacagataaagaatcataaaatcgtctgtgggaatctgagtaatctgtgatgatttacctaaattcataaaacgacatgagatacatttttatcctactctttttaagtctcggactttccgccgtggcacagcagaacatagtagaaagcttgcagcgtaaccgtgccggagaaggtactgtaaccatccatcaagatcctaaaataacaggcttgattggtagtatctatacagggaatgttacgggaggtgagcagaaaatgttgaaagccagagggtatcgggttcaggtctatgcaggaaacaattcgcgtgtggctcgtaatgaagctaataacgtggctaccaaggtgaaagaagagtttcccgatatgcctgtctatgcctatttccagccgcctcgttggctgtgtcgtgtaggtgatttccgcagtattgaggaagcggatgccgctatgcgccgtctgaaggctaccggtgtttttaaagaagtatctattgttcgtgaacaaattaatattcccctggactaataacatggaagaactattgcatcccgaatggtcagcagagaaaattgaacagttgaaaggccattatcagagtattttatcgctattgggtgaagatgtagaaagagaaggattgctgaaaactcctgagcgcgtagccaaagctatgctgacattgacacgcggttatgaacaagatccgcatgccattttattgggagcaaaattcaaagaagaatatagtcagatggttatcgtgaaagatattgatttcttctctttgtgcgaacaccatatgcttccgttctatggaaaggcacatgttgcttatattcccaatggttatatcaccggtttgagtaagattgcccgggtagttgatgtgttttctcatcggttgcaggtacaggaacgtatgacattgcaaataaaagaatgtattcaggaaactttgaatccgctgggagtgatggtagtggtcgaagccaagcacatgtgcatgcagatgcgcggggtagagaaacaaaatgccattactactacttctgatttcacaggtgcgtttaatcaagccaaaacacgtgaggaatttatggatttgatacggcataaccggtaaggagttatgcctcctttattttaatactacccggtctccggcacgcttggccataattttttgtaattcacttaattctttaaagtgggccatgacttcaaggcatttatcggcattggctgctacttcaggcttgttcaatgcttgcagcgtatatttcatatcttcttctaaaatggcaagtttgaagtcgataagttggtgtggtactagttcgtgtaagcgttcttcatctttgaccatcgcttgtgaattgcttttactcaattggtaacgatcatttatcatatctgctgccagcttgctgattgtagggtcgggatgagccagaaaataacgctctgccgtgaagttggagtcatgcagatgagcttctgcctctgctagtatttttcggtgcaacggattatggaactgtaattcatcctgtttcaaatccatggaaatatattctatcacagtgagcggagtttccgtattttcttccgtttctacatagcacatgactttctctccgtggcgtatcaaagtttgaagcagtaactgttcttttacataaaaaacgtacttttcccgtccttcttggggaatatacgattgataccccgcttctgcttctgcaggaggaaacggagggggaacatcatcatctacttctatggggggcatatcggcaggaggtatgctgccggcaggaaaaggtgcatcggcagaaggcagagagccgatagtggcggatgcgtctttttctttcttgatttgttccagatagttatcatcccgttgaagcagatgctttttgatctcgtctaaaataatttgctcgtttacgttcaagagggtagcacattctgtcaagcaggtatatcgaattactttatccggaatcagtccgatacttcgtgccatgtccgatatcaatccggcccgtttgatggggtccctttgtgcatcttttagtaaaaggttggtcttgaaacggataaagttctcttcgtgatcatcaatgtattttctgaattccgtggcattgtgttttctggaaaaactatcgggatcatctccgtcaggcagaagcagcactttgatattcatgccttctgcaagtaacatatcgatacctcggatgcttgcttttataccggcttcgtcaccatcatataatagggtgatattggaggtgaagcggtgtagcaaccggatttgttgttcgctcaatgctgtacccgagttggccactacattctccagcccgcattggtgcatggcaattacatcggtgtatccttctaccatgtaaacacagtcggcttttacaatggcagctttagcctgataaatgccatatagttcttttcgtttactgaaaatttcggattcgggcgaattgacgtatttttggtttactcccttggtgcggctgtccagtacacgtccaccgaagccaagcacttttccgctgatgttaaaccatggaaatatcacacgtccccaaaaacggtcgcgtaaactgccatcttctttttcgtaacatagtccggtcttgagcagaaattcttttttatatccttttcgcatggcttcttgtgccaatgcgtcagaagcggtagtgctgtatcccaattggaatttcttgacaatatcgtcacgaatgccccgttggcggaaataagacatggcaatggcttttccgtcagcgtggttgtagaggatgttttgaaaataatcgcgggcaaactcattgactacaaagagactttcccgtatattttgtacttgtttctcctcatcggtcaattcgcgttcctttatttctatattgtattttttggccagccagcgtagtgcttcgggataggtcatctgttcgtgttccataacgaaatggacagcatttccaccttttccacaggcgaagcatttacataatcctttggccggtgatacatagaatgaaggggttttgtcatcatggaatggacaaagtccgacaaaattcacaccgcgtttccgcagagtgacaaactcggataccacatctacaatttgtgcggcatccagtatccggtctatggtgggttggtctatcattgcgagtgcgaagatacaaaaaaaacatcgccaagggcgaacccggcgatgtttttaacggaatattgtaatcagaattatttaatattaggattcagcttgttccattcggaaaccggaggaagtactcccatcgcaatcacttcatcacgcaaagcacaaaggtgtgcataacttttttctaatgcggcttcttcttcgggcgttccttttacttcttttaagtggcagccatccttagcgatagaagtttcccaggccatcatgatatggtcgaacttaccattggatacgtaagtgcctgcaggccagtggaatggctttcctcccatggcggcggcaatcatttcgatagaaacatatgacgggctttggaaagaagagcggccgcgcaggttgatgatgtttgcaccgcctttagttactttttgttgtatttcagtccattgttcttttgtcaaagcatcagtgccgatgatatcaagtaatgcttttccgtttactttagcggtagaagcataaacagccatctgctcaccatgaccgccatacgtgcggcagttttctacattatccatggcgatgccgaaatgcttggacaattcgctgcgcaagcgtgtagagtcaagagcggcaagagttgtaacttgtgatggtttcaggcctgaatataataaggtgatcagaccggtaatatcagccggattgaaaataaccacgatatgttttacgtccggacaataggcctttacattttttccgaattcttcagcgatggctgcgtttcctttcagcaagtcctcacgggtcatgccggctttacgtgccgcaccacctgagtttacaatatatttagcatcggtcaaagcttccttgatatcggaagtgaaagtgatgttcatgccttcgaaaccacaatggtatagttcttctgccacaccttccagaccgggagcgtatgggtcatacaaacaaatattgggagtaaggcccatcataatagcagtttgagccatgttcgagccaatcattccggcagcacctacgattgtcagcttttcattcgttacaaattccataattcttttatttaaagtttgtataatataaacgcttttgtgggagaggatgttctctcttccgggtacaaatttacaaaaccttttattaaggtgtttattctaaaaaattatatgggataatagaaagttatctcatataatcatcctaggatggtgaatttcagaatgcctgtcaatcaagatgttaaacagtatttattcaaacaggtttgtggatggaacaaataatgatatgatctgttatgtatttatgtttatataactttttaatgcatctacatattcttcaaaagcttcaagccctttttgtgtaatcttacaaatggtacaaggcatttttcctttaaatgtcttgatgacttctacatagtcagccttgttcagcttgtctatttgcacactcagattacctgccgttgctcctgtctgttgtttcagatagctgaactcggcttcttccactgaaaccagtatggacatcacggcaagtctcagttcggaatgtagtaatggattcaattctttgaacataggcgcaaagttacgattttttttgtttacgggcagcatgattcaacacatgtcccggaataaccatcataaaaataaagacaggagcgaagattaatatctggtttagacctggataaaaaaggcatccgatggagcttaacgctcccagtgtgccgcaaatagtgacagttttataacctatcaccagacctgttagtgtagttcccatgcccatcagcagaaggaccatgaataggatgggaagttgccagaaaaacatggcgagcatggatatcagaaagccggttatgccgaataccaaccaaatataattgattactttgtccaaatgagtcttgatacccggctgctgattacgtgtggaaaggtaagttcctgttcctgcgatgatggggagtaagaaccataggtattgccaataataattccgggtagttactaccagaaaccagaccagcaggctgacaaagatagtggtatatccccaaaaaaggaacggcatgccacaattggtttctagcctgttttttgtattctgaatcatttgagcgatgagttccaaactctctttctcattcaattttctttcttccatactgttttttctttttagtttgtgattaattaatatttgatgcttttctctatggctgtcatcagcaagctgattccccagcctactatcacccatagtacccaccagtagtgtggactggtaaaccagtttatagctataagaaacaggtttattaccacataatagactaatgaccaagtgagccaattccaaaaatgacgggctctttgccggcatactacttcgatttgttcctgagttggaacggtttttttgttgttctgatttgttttcatagctttatttcttattatagtgatataaagtcggtggtttgtgctatattttcagtggcaaatctcggaatagctagtgtggcgcatgccaggatagtggcacgtttcttgtgaaatgttgtgtttgttttcattgttatgatgttttataggttgaatgataaaagtttattttacttaattactttacaaatataatatagtttataatataaaccaaattttcatagaacttttttcaaataataactgtcaagtgtgtatgtgtggtagagggggaagtgcaaaatatgtagtcttctttatggattttacattcagacttttgttggcacgtgcttgaacaaggaaattcttctctgctttttccttcctaaagtttttcaagagtggtagcattggcatctgtttttgctaactcagttgtgtgtgctgcgtacatcgt

SEQ ID NO: 14444 - DNA, 9491 bp, Unknown
  gut microbiota DNA sequence
acttcatccggtcatgtgtgcaaaattactttttcacaccggagattggaattgtcaaacagctgaaaaacaatgaagtatggtgcatatttatggctttttcaaaagccttaaaaaaagccactgaattggcaaaatccaacttcacaaatatgtagcggaatgcgtagtgagggtaaaaaaagaacccttgaactatctctaattcaagggttttcatgtgtgaaaagcatttatgtactttctttggtggtgccaccaggaatcgaaccggggacacaaggattttcagtcctttgctctaccaactgagctatggcaccattatttcttgtttgcggttgcaaaggtagtgaaacttttttaaactgcaaactatttctaagaaaaaacactgataaaaacataaaatgcttattatcagtgttgtttaattaaaattatttttcttttagtggattccaaccttgcgctttcagctcaaactcttgtccgtcacgggtaatcagggcacatcccagctccggtttggtgatgtgaccaatcacttttatattctctatagccgaaattcgttcatggtctgttaaaggtacagtaaataacagctcatagtcctcaccaccatttaaagcacatgttgtcacattcatattcagttcttccgccattacagccgtttggtaatcaatgggaattctttcctcgtaaacgcgacagccggtatcgctttgtgagcatatatgcagcagttccgaagaaaggccgtcggaaatatccatcatagcggtgggcttgattcccgcttttgccagtttctcaatgatatccttacgtgcttcaggctttaactgacgttccaaaatatattcttttccggaaaaatccggatttgcttctttttctccttggaaaacagccttttcacgctctagaagttgaagtcccatataagctcctcccaagtcaccgctgacacaaatcaagtctgtatcttgtgcgccgttgcgataaaccactttgtccttgtccgcttcacctatgcaagtaatactgatggcgagcccggttacggatgaagttgtatctccacccacaatatctacatggtgtagttcacaagccagttttagcccatcatagagttgttctaaatcttcaatacaaaagcgtttggacagtgcgatagaaactgtgatttgttttggagcaccattcatagcataaatgtccgagaagtttacgatggccgatttatatcccaaatgtttcaatggggtataaaccaaatcaaaatgtaccccttccatcagtaagtctgtggtcaccaatacctctttatctttaaactccaatacggctgcatcgtctcccacaccatattgggtttccggattttttaactcaatatccttcgtcagatgtttaatgaggccgaactcacctaaggtcgctatttctgttctgtttatttcctgcatatccttaaattcgattaatcatttcacgcataatggtagtcatgcgcggttgcgcttcatctgccgctttctgaacctcttcgtgtgaaacttccacaatttttccctccacgcctaggtcggtgataaccgatactccaaacactttgatgccacaatggtttgctacaataacttcaggaacggtagacatacctacggcgtcagctccaagaatgtggaacatcttgtattctgccggagtttcgaaggtaggtccctgtgtaccgatatatactccttgttgtactttgatgcctttttctttagcgatctccagtgctttgtcaatcagttctctggagtaggcttcactcatatccggaaaacggggaccgtattcaatgttcttgccgtgtaacggatgttcgggaaaaaagttgatatgatctctgataatcatcaggtcaccaatttcaaagtctgcattcgtacctccagctgcattggatacgaacaatgttttgatacctaattcacgcatcacccgtacagggaaggttacttctttcatggagtatccttcatagaagtggaaacgtccttgcatggccatgatgtctttattacccaatttgccgaaaatcaatttaccgctatgtccctctacggttgaaacagggaaattagggatatctttgtaattgatctcgtatttatcggtaatttcgtgtactaggcttcctaagccggtacctaatatgatagcagtttcgggactggtatgcatcttttctctaagaaaatctgctgtttcttgaattttttctaacatagttggttatatttgaattaaacagttcttgttggtcttgtaagaagattacctcaatgggcagcatatatatataaggttttagtgtcttgtccatcagtggatgggctgctaatcgtactgagtctttttcagtggtgataatcatgcgtttaccttccggaagtttcatgaaacgtttctttatcagttccatatctcttgctgtaaagttatggtggtcactgaaagccagtgactcaatgtgctcattgtatggtgataaatcttgaatgagttttgctggtgaggctatgcctgtcaccaataggatatgcttatctttttctatctcttttaatggaactgcattccctactgtaaacaacggatgcagcttgccgtatgctaatgtcgtgaagtagagctgctgataggggtaaagttccatttgcttgctcaagactctcaaatccatcggggtgatgtccttagggcatttagtgacaatgacaatatgtgcccggctttttccattttcaggttcgcgcattcgtccggcaggcagcaaggcgtcttcgcaaatcagtcgatggtaatctactaataagatgttcattccgggttttacatatcggtgctggaaagcatcatccaaaataatcacttctgttccgggggcaatgtgactattgcataactgctctatgccatgacaacggtttcggtctactgccatatagatgtccggaaacttctgtttcatttggaaaggttcgtcacctatcatctgtacggacgtatccggcccagcaagtacaaaacctttggatttgcgtttgtagccgcggctcagtacggccactttgtaatctttctgcaataatcttatcaagtattctgtatggggggtctttccggttccgcccacggtgatgttgcctaccgagatgattgggacatcaaacttacgttctttgtatattccccagtcaaacaatttattacgcagccatacgccggtcccataaagccatgaaaccggatatagccacttgtttatcttgataagattaccttccatgcgcaaattattggatattagggtcaaacggcatacgtgcctgtatgcagttggcgttttttatgttctccagcgccttgaagctgttataatagcttcccaaatattctttgatttcgctgtttacataatgttttttctgattgcccagcaaacttgcgaaaatattttctttttcgggatagccgataatactgtaattttctatgccggcttgggtggcggcggcatttaatgccttgtctatacctcccagttcatctaccaaaccgagatctttggccatagcaccggtccatacacggccttcagctactttttcaatagcctctgtagacatttttctaccttcggcgcaacggcttacgaatagcttgtatcctcggttgacataattctgcatcaattcttgttctgatgcgtttaatggacgggtaagaataggacctaggctggcacccagatctgccattttattagttttcactacatcaaaattcaatcctaaagtttcagtaaacagtttctcacctgaatacatcatgccgaatatgccgatagaaccagtcagcgtagtcgggtcagcgaaaatgcggtctgcagcgcaggaaatgtaatagcctcctgatgcagcataatctcccatagaaacgattaccggttttttctctttcagccttactacttcacgccatatttgatctgaaccgtatgcgctgccacccggtgagttgacgcgtaatacaacagcttttacatcatcgttatcacgtaatttgcgcaggcctttacacatcttttgtacatcaatacaatcttctgtggaactgccgggagcatccagaatctcaccgtatgcataatatacggctattacatttccacttttgtctttgggcacatttttcttgacgtttatcatatcttctatgaaaagactgttcagcttgtcgtcttcgtcacgaccgcttaattgtttcagataggaaataacttcatctttatacatcaaggtgtctgctagtccgcattgaacatattcttctgcctgacaaaaatccatatatcggtctgcataagcattcagagtatctgtcgggatgtgtcgtgaatcggatacatctgcctgaatacgattccagacagattccagacattcggtcatctgttcgcggttggccggactcatttctgtagcgataaacggttccacggctgatttgtaagtacccactctgaatacttgtatttccagtcctagtttggaaaccagatttttgaagaaaacaggttgcatgcctgctccgtgccatccgatacttccttgcggattgataattattttatcggccacgctggaaagataatacatcttctgtgcatattggtctgcataagcaatgatgaatttaccgctttctttgaaatccagtaatgcattgcgtatttcctctaaggaagcgtatgatgcttccagataagaaggttggatataaatacccttgattttgtcattgtcttttgctttcttgatagaagctagaatgtcatccaaaccgtatgcctcaaattcttcccccaaaagttgttggagtgggttttcctgtacgcgttcggatagactgcctttaaagtcgagtacgaagatagagttgtctttcaccaccgtttcagtatccgatgatgcgactatgccaaccagagtgataatccctagtatagtgaacactacgcctgccagaatgacgccgataacgctggcaaacgtaaattttagaaaatctttcattgaatgtgttgtttttaatgttaataattagctaacaaaaataggttattgcattgaaaaaagcaaaaaaagtgaacatcttttgctgcctgtttgttcttcatttataataacctataaatacgttgtattatatgacaaaaagttttaaagaggctctgaaagcccgtcgtacattttatcagatcgaaaacaaatcgacattgtctgataaagaaataagagatttaattcgttttgctgtagaatttgtcccctcagctttcaattctcaaaccacccgtgttgcgttattaacaggtaaggcgcatgaaaagttgtggaacattgtaaaaaatgtcttgcgtgagcgggttccggctgaggtatttggcaagaccgaagaaaagattgatggctgttttgcttgtggatatggtactattctatattttgaagatatggctatcgttcgctctttgcaggaaagtttccccacttataaagataatttccctatctgggcagagcagaccgatgctatgcatcagttggcagtctggaccatgctggaagatgcaggaatgggggcgtctttgcaacattataatccgctgattgatgatgaagtacgtaaagcttggaatttgcctggtgattggaaattggtagcgcagatgccattcggtgtgcctgttgcacaaccgggctctaaggaagtgatgtcattggatgagcgtgtttttgaatttactgattaaaattcatgtctcatcttttggcttattaggggaaaataagcatctttgtgtgcaataaaataaagatgtgctatgaaaaaattattatcccttccccctaatctggtggaatgttttcatgatatagagaaagcagaccggacagagtggttttgtacttccgatcctataggcagtaagctgggatcaggtggggggaccgcatggctgttggaggcttgtcatcagaaagtgactcctgacagcgattttcttacttggttgggaaaagaaaaacgtattttacttcatgcaggcgggcagagtcgtcgtttgcccggatatgcgccatccggcaaaattcttacccccattcctgtattccggtgggccagaggacaacggctgtcacaaaatctgctttccctccagctccctttatatgaacaaatcatggagaaagctccgtcttctcttcatacattgattgcaagtggggatgtttatatccgtgcgggccaaccgcttcagactattcctgatgcggatgtggtgtgttacggtttatgggtagatcctaatctggcaaagaaccatggtgtttttgtttcttcacgagtcactcctgataagcttgatttcatgcttcaaaaaccttcggtggaggaattggggaaattaatgcaaacccatctttttctgatggatatcggaatttggctgttaagtgaccgtgcggttagtctgttggtaaaacgatcttataaggaaggaaaactctcttattatgacatgtattctgatttcggacttacattgggagagcatccgcgtatgatggacgatgagcttaacaagctgagtgtggctattctgccgttgcctggaggggagttttatcattacggaaccagtcgtgaacttatttcttctacattggctgtacaaaatctggtaaacgaccagcgggagattatgcacaagaaggtaaaaccgcatccggccatgtttgttcagaatgctgaggtaggttatcaacttacctcacaaaattcggaaatatggatagagaacagttgtgtaggagcaggatggaatatccatcaccagactatcataacaggtgttcccgttaataattggaacttggaggttccgtctggtgtgtgtattgatgtggttccttttggagaatcgggctatgtagcgcgtccatacggcttcaatgatactttcaagggatctttggccaaggaagaaacatattatcaaggaatgtctgtaggtgagtggtgtgctgtgcgcggcatttcggtggaagaaatagaaaacggtcacgacttgcaggccgcgcgtttgtttccggtttgctcatctgtagaggaattgggagcagttatgcgctggatggtttctgaaccggtattacagcaaggaaaagaaatatggcaacgctgtcgtaaattgtctgctgatgatatatccgcttattctaatctttaccgtctggcagaacagcgtgaagctttccggataaagaattggccggcattggcgcacaattatgaacgaagtgtcttttatcagctcaatttggagaatgctgccggagaatttgcccggtatgacctgtcgttgcctgagcctttatcagaatcggctccgttgatgacacgtatcagtgacaatatgttccgtgcccgggtgcagcagcttaaggggctggcttatcgggaatatgaaaatgaggcttttcgtttgatgcgcgacggacttactgcttcggctttagccaagaggcagcaaccgcatttgtcagtgtactctgatcagattgtctgggggcgcagtccggtccgtattgatctggccggcgggtggacggatactccaccttattgcttgaatgaaggggggaatgtggtgaatattgctattgagttgaacgggcagcctcctttacaagtttacgtgaaaccttgtcgggaatataaaataatccttcgttctatagacttaggcgctatggaagtggttacaacttatggggaggtaagaggtttcatgcaagtgggctccccattctctatacctaaagcggcattggtgctggcaggtttccagccgggcttttccaccgaatcgtatgtttcactggaagagcagttgaaggcgtttggttccggaatggaaattactctgctttctgcgattcctgcgggctccggtctgggtacaagttctattcttgcatcgactgtgctgggtacaatctctgatttttgcgggctgaactgggataagaacgagatatgtaaccgtacgcttattctggaacagttgctgactaccggcggggggtggcaagatcaatacggaggtgtgcttcgtggtgtgaaattattgcagacccatgcaggtatggatcagagtccattagtgcgctggttgcccgattatttgtttacaggtggcgaatatcagaagtgccatttgctttattacacgggaattacccgtacagccaaaggaattttagctgaaatcgtgcgtagcatgttcctcaactccacagagcatttgtctatacttggcggtatgaaggggcatgctcttgacttgtacgaagccattcagcgtgggaatttcgatgaaatggggcgtttggttggtaaaagctggaagctgaaccaagcgttggatcccggcactaatcccgaagcagttgaggctatcattcgccggattgatgattattgcctgggatataaattgccaggtgcggggggaggaggctatctttatatggtggctaaagatcctgaggctgctatacgtattcgaagtattcttgctcagaacccacccaacagttgtgcccgtttcgttgatatggctttgtccgacaaaggcttgcaaattagccgaagctagttataactgaatagagttgggaaaccagccgggtgatattttctttagcaaactccggttccattgccttctccagggtgatggggccgggggctatagagaatatacctttgaatcccgctttgtttaattccggcaggttttctatactgcctgccagtacaataacggggatatgttctttttgtgcttcctttagtatcctgtatggaacttttcccatagctgtctgccggtctgcttttccctcgcccgtaataatgaggtctgctccttttattttctcggagaagtcgatggctttcaataataattctgttcccggttttagctctgcgttaaaaaaagccagcagtccgccacccatgcctctggctgcacctgcaccggggtagttcgtgatatcttttcctgtcgttttctttataacttcggctaatgattgcatgccttcatccagcctttgcaccattttaggatcggttcctttttgttgtgcaaagatatatgccgctccgtcaggaccgtagaaagggttggttacatcacatgctaccacgaagtgtgtttcttttagtgcggggtgaataccggatgtgtctatgctgctttttccttcctaaagtttttcaagagtggtagcattggcatctgtttttgctaactcagttgtgtgtgctgcgtacatcgt

SEQ ID NO: 14445 - DNA, 12565 bp, Unknown
  gut microbiota DNA sequence
aaagggttgcgtcactcacggcacaaccctttcacaaaacaataatttaaattctcttatttcacctgaataacaagataacgtgatacgctccaaaattcagtaggatttgtaattttcaaggccagttgcccttttgcatctttcactagttcatatgaacctaccggatgtgtagtcagcaattcagcacgtttagaatacaacttgatttccttatcagtacgaatatcaatctgagtaaaataatccttattaaagtccgcacttttcaggacatcacctttttcaagaattttctggtctttcaattcagattttgttccaaaaacaaaccaggcagcattcaaagctttatcctggctggctacagttgcagccttcgcttcattttcagcggtcagttcacttacattctggcttaaaccagctacagcatcatccagctcagcgatacgaatattttttgaagctaattcagcctgcagagtctcaatctgctgctgtttagcttccaactccttcgtcaggttggctacagctttcttcaactgagcggaattatactgactattcttcaattgcttctccagtttcgcaatctgctcacggtttgactgcaatttttcactgatgaagcgaatatcttcttttatcttatcagcactattctcacgaatagaaccactctgtaagtctacacgattttcagcctcatttatctgacgaaaaccttcctgtacttcattgaaagcacccatgatatcgtccaattcagcatttctgtttgacagttccaccatcaaagaatcattttgagccttcaaggcatctttctgagctccattaccacatgaagtcaataaagctacagataacaacgataaaaatactagttttttcatttgctttacattttaagtttattcatttttagtcctctttcccactgagtacaattacaatttcacctcgcggctcgttttgagtgaaatgcgctataacttcagttaatgtgccccgaacactttcttcgtgaatttttgaaatctcacgacatacggaaacaggcctttcggcaccgaaaaactcggcaaattgagttaaggttttcaccaaacggtaaggtgattcataaaatatcatcgtccgtttttcttcttgtaaagaagtcaaacgggtcactcttccttttttttgtggcaagaatccttcaaaacagaaacgttcatcaggcaatcccgacgacaccagcgcaggtacaaaagcagtagctccaggcaaacattgcacttcgatgtcattcttcacacactcacgcactatcaaaaatccgggatcagaaataccaggagttccagcatcagatattaaagcaacagtttcgcctgctttgatacgattcacaataccttccactgttttatgctcattaaacttatgatgagactgcatggcgttcttaatttcaaaatgtttcaaaagaatgcccgaagtacgcgtgtcttccgccaatatcaaatcagcctctttcaacacacggatggcacggaaagtcatatcctctaaatttcctacaggagtaggtacgacatacagttttcccataaaacaattgcattctgttataatggaacaaatgtagaaagaaattaaatgaataaagttaattgcctccattatttaacagatgttgcactttagtttaacattatatcttttattaataaatttccgagtgaaaatagtcctttttcgaggtacaaatcgtacatttgtacctaaaattaatctatattgttacatcaaaattatggtagttttttcagaagaccacattcaggaaacgcgtagaagaggaagaatagaagtaatatgcggttctatgttctcaggtaaaaccgaggaactaatccgccgtttaaaaagagcgaaatttgcccgtcaacgggttgaaatattcaaaccggccatggacacacgctattcagaagaagaagtcgtatcacatgacagtaattccattgcatccacccccatcgattcttctgccagtatcctacttttctcatcagacaaagacgtagtgggaatagacgaagctcaattttttgatgaaggcctggttgatgtttgcaaccagttggccgacaatggcatacgagtcattgtagcaggattggacatggattttaaaagaattccttttggtcctattcctgccctgctggctatcgctgatgaagtaaccaaagttcacgccatttgcgtgaaatgtggaaatctagcctatgccactcatcgaatcaccaaaagtgacaagcgggttttattgggagaaaaggctgattatgaaccgctttgccgagcctgctatatggagtccttgaaagaagaaactgaaaataaataacatatgctttatgctgcagaaaaaaataacattcgacagttttatccgtggaatattgacagcggttgtcattatcggcattctatacttagtaaatcagcttagcggagtgctactcccctttttcgtggcatggcttattgcttatcttatctacccgatggttattttcttccagcataaactgcgtctgaagaatcgggttatctccatatttgttgttttattagtattattatccattatcacactagcatttatcggacttgttccacctatcattgaagaattcggcaagctgaaagagctgcttaccgaatactttatcgaaggttccaagcaagcagctattcccggcactgtggccaatttcataaaagaacatatagatatgctgaaaatacatgaagcactgaacgaaaacaacttcgcaaatactatgcgtaatgtgcttccacaagtatgggccttgttgacccaatccgtcaatattgtggtcagcgtatttacctcattcattatcctgctttataccttctttattttattggattatgaagccattgcgcgaggatggattaaactggttcctatcaaacaccgtgaaatgacaatacgcattgttactgatgtgcaagatggaatgaacaaatattttcgcggccaggcatttgttgccttttgtgtaggaattctattcagtataggtttccttattattgacttcccattagctatcggtttcggtttatttatcggacttctcaatatggtaccttatcttcagctcatcgctttcatccccaccgtcttattggcactactgaaagcagcggatacaggagagaatttctggtggatattattttgcgcttttttggtattctgtatcgtgcaaatcatacaagatggcctaattgtaccaaaggttatgggaaaaattacaggtttgaatcctgccatcatcctattatctctctctgtttggggagcgttaatgggaattgtaggaatgattattgctctaccttgtaccagtttaatgctctcttattatcaaaggtatatacgaataaaagaaaaagaattttccgaaagtacaaaaacgactgacaatcaacaaataagcaataccaaagagaaataattcaaaaaaaacaggtaatatatttgcatgtttcatttaaaaagtctacctttgcactcgcaatttggaagaatagcaataacaaaggattgattcgctagctcagcaggtagagcacaacacttttaatgttggggtcttgggttcgagccccaagcggatcaccaatcaaagatgaaaatcgaagaaaatccctgataatcaacagttatcagggatttttagtttctgcccacctcccctttttacgcagaatgcggcaactttcacaggccaaatcggtggagtaagattccgtccgaaaaagtccaccgaattaggatgttttgcgttgatacacactattttgcgtagccgcacttttggctttggaacttaattttgcaaacaaaaaagtatcaagccatgcaaagaaactatttctcgattctcttctttatcagaagaacaagactgttgaaaaacggtgaggcacccatcgggctgcgaatcaccgtaaacggacaacgtgccgaaatgcaaatcaagcgcagcgttgccgaagagcgttggaacgcttccaaaggatgtgtgacaggcaaagatcggaaagcgttggaactgaaccagtatctggaatctgtcaggacgaagatttatcagatacaccgcgaattgctgcaagacggcaagcctgtcacggctttcactatgatacagaagttcaatggtgagggcgaagctcccaagatgctcttggaggtattccgtgagcacaacaagaagtacagggaactcattgaccgtgattatgtgaaaggcaccgttttgaggtacgaaaggactgtccgctatctagcggaaatgctgcaaagccaatacaatctgaaagatattccgttgaaggaactgaaccatgaatttgttttgaacttcgaacattttgtaaaggtacagaagagttgcgcccagaatgcggcagtcaagtatctgaagaacttgaagaaaatcacccggcttgcgttggtcaacaaatggattaccgatgacccgttctcagaaatccgttttcaccaaacacagagcaaccgtgacttcttgacggaagaggaactcaataccatcatcaataagcagtttgacataccacgccttgaaaccgtccgcgatatttttgtcttttgtgcgctgagtggcttggcgttcactgatgcacagcatctgacaccggagcatatcacacaagacagcaacggggactattggattaggaagccgcgcgaaaagacaaacaatatgtgcaacatccccttgttggatataccacgaatgattgcggagaaatacaagagccatcccgagtgcatcaaaaaaggtgtggtattgcctgttccgtccaatcagcggatgaatagctacctcaaagaaattgcggatgtatgcggcatcaagaagactttgagcacacatattgcgcgccatacttttgcctgtatcgccatagccaacaaggtgtctatggagtccatcgcaaagatgttaggtcactccgacctcagaactacaaaaatctatgcgaagctgatggataagacggtttccgaagaaatgaatgtcttgaagcgaaaattcagtgcagtatgaacagaggaataatcacaattagtgaaactggggcagtcggaatagtgactgccccagtatggatgaccaagtttgagattgccgacctgttaggggtattctcctgcgacatccgcaaggcaactcatgctatatataagaacaaggaactgaatgaagccgatacaatgcgatatatcaggcaacccgatggtatcagttatgacgtttatagctttgaaatagttatagccattgcattcagaatatgcagtaaagaaagtatcctgttcaggcggtttgtaataaatgaaatctgcgccaccaagaatggcagcccgataacattgttcttctcttgtggcaagggcggcaacctatggtatagttaaagttcgtcccgtcagccacctgttcccgatgctcgtgatgcaaaggtagcgtgtggctttaacggcattggcaaggtcaagcggcagagccgtttcgggcagaatcttcctcaaacgggtttgagcgtattcagcccgaaaaatttgctcaaatcataagaatacgggaaatcagaaagaatagagaaacggcttacagacgaagttaaacattgatgcttcatccgtaagccgttccttttttctttttgtcgaagttccaatgctaccgcaacataggggtagacggcaaactgcgctccttcaagaaaatcaggttgccgcctgtcggtaggcagtgcggtaactgtctgccagcatcctttcgatgtcggattcacggtagaggattttgccgcccaactggatataggctatccgtccctcattgcgatagtcctgaagcgtccggcggctcaccttcaaccgtgccgacacttccttgtcggtgaagaaacgctctccatctaatgtcgggcggtagttggcggttagatgctctacgttgtccagcagacggtcaaggttgcccaagaagtggattatccactcgttgtctttgttaatcagttcgttcatgttactttggatttagtggaattgttgttattactttacttagtcatcaaattgtcctgcctttgaatttcgcttcctttcgtctgtcctctacaatggaaacgatgcgctgcacatcttcgggacggtaatacgttttgtgattgatttggctgtatgaaagcgtcccgttgtcacgcaaggtttgcaacgtgcgcgggctgatgttgagcatccggcacacgtcctgattgtccatccactcgctcattctcttttctccgtgccgatggcagatggcatccatacggctgacgaaatggtcgaacttggcgaccagttcctcaaaggtctttttctcgattgctacgatttccatattgtttttcttttagttgttactgtttcttttgccacaaaggaatatataatctgttatccaacaatagatttctcggaagtggcagcatgttgcgtcaataggtagtctttgtccgggttgccgctttgttgattgctcgtaaacaagctacctgccgtaatttctgccataccattttggacggttgtcattccttttgccgcaaagaaatacatattcttttacctgacaatggcttttgatattactggcagtatgtggcacagggtggtagcggttggcattggctggagacagcggttattctcttaattctgaaaaataggaaagtggcaagggaaaaaataagggcttaattcaaattcgcttgcgattgagcctttgccctctcagacatatacatccggcaaaacggtgaagtccacaccgttgttcccatcgccataaagcaaaaccatacaaaattgccaaagcgaacccaagtgcttgacagattgaattacaggtagttactttgctcacaacaaacggtcaactatgcgcatacagaccacgagtattaactattaaaatgtaacaagatgacaaagaaaagaaactacgagaacgatgaagcgtacaagaacttcagggtggaggacctcctgcccgaaatgaaatggcgtgagccggaagcaaaggtttccgaagcggaagcacccacagaagaggctacactctttccttcgctggaggagccggacacatctgcggtacaagttacgatgcccgaagctgttcgacaagacgagccggagatacgggaagatgatgccgataatacaggcgaagaagtggaggcaactgtttccgaaacggatgttcctgtggaacggattatcgccagacgcatcagcagcaaacaacgcaggctgtcactagaggagtaccgcaccacctttctgcaagttccaaagattaccgaccgcaagcctgtattccttagcggagagatgcgtgacaggctggacgagattgtccgccgtattggtggcagaggattgagcgtgtcgggactggtcgagaacctcgcccgtcatcacctttccacctacgagaatgacatcgaccaatggcgtaaattgtaggaattaagacaagactaacggagtgtttttggggtatctttcagagatgctctaaatcactggtaacgaaggttggaggggcaagtttatgtttcgggcagaccgaaaccacttgccccgctccaaacctcgcagggaagtcacatcccgttggtctatcttacatacaattgttatactcagtaattaaactaagaaacagatatttatgaacagcaaaaaaagaaagaatgatgtaatgggcaacggacgggaacgaaccaacaagggcggtcgtcccgtcaagggtgtcaccgagaaactaaaatatcgcatcacggtgaagatggcaacggaggactactatctgttgaagtccaaggcgaaatcggcaggagtatcagccagtgaatttatccgtggctgtatcacacatggcggagtgaaagaacgtctctcgaaagagcatggcgaccttatccgcaagctatgcggtatggcgaacaacctgaaccagttggcaagaaaagcgaatgcggaggggtatgcctccgtgttcttgccttgccgtacgctgatgatagagatagacaaccttataaaccggatacgcctatgatagcgaaaatcatgaaaggctccgacttcaaggcggtagtttactacatcctgaacgatgaaaaaggcactcaaatcatagactcggacggcttatttctggaaaataacgatacgatagcgcagggcttcatcggtcaggcgcagatgaatccgagagtgacgaaggctgtcgggcatatcgcattgagtttttcaaaggaggatgcgccacggctggacaatgctgtcatggcacagatagcccgtgaatatatggagcggatgggtatcaaggatacgcagtacatcatcggacggcacttcgacaaggagcatccgcacgtgcatatagcgttcaaccgcatcgacaatgaaggcaagaccatttccgaccggaacgaccgtttccgaagcgagcacatctgcaaggagcttaccaagaaatacgatcttcactttgccaacggcaaggaacaggtgaagattgaccgactgcgtgagccggacaagacaaggtatgagttatacgaaatcttgaaaatggaggtaggcagatgcaaggattgggacaccttacttgggcggttgaaacggcaaggtgttgatgcgcagttcaagcataaggggcagacggatgagattcagggcatcgtctttaccatgaacggttactgcttcaacggttccaaggtggacaggcaattcagctattccaagattgatgcggcattgagccgtaacaattacgaggaacgacagatgcgacctcagccgcaggctaatcgggaagagataagcccgacaacaaacaatgcaagcggtcttattgagggttcattaggcttgttcacaccgaccaatatatcggaggaacagcagccttacgacccgtatctgagaaacaagaaaaagaagaaacaacgtaaaatcaactggtaattatggcagacaacaatgtatttatcctcttcgaggaaatcaagacagccttgaatggcatcaaaaacaaagtggaagagttgtccaatatggcaaaccaacaacctcaaattggaaatgacaagccggacttgtccccgattaaagagacaatatcagaaatggcaaaggctcagtatggagaatttaaggacttgttggataagcactggacggcttacgcccagctttccactttgaccctgcaccaccttgacgcaataaagaaatcacaggaagagcaaggcatacgacaagagcagcaaccgcaggagcatattcacaaacacagctttgacatcaagtcaagcaaggtcttttccttcgttgtggggcttggcgtggtatgcgccttgtccctgtggggcaatattgagcaatggaaatccaagcggcagtatgccgatgatgcgctgaagttccgtgccatccgctcatggggcggatgtacagcggataatatactttggctaaacaaggtctttgatattcatcgggacgagaaagccatcgaatgggtacggaaacaggcggacgggtacgacacatccctgaaagccgtttccgacagtctgatgcaggagaagggcaaatcaaaatcggactgatatggcatcggtcaagatcaaatttcgcccttctaccataggcggtaaggagggtacactctactatcaggtgattcacaaccgtgtggtcagacagatatataccaattataaacttttcgcttcggaatgggactgccgttccgaagcggttgtcctgcatcgtgtcccgaatgaacaagagcggaacaactatctgctttcgataagctcacgcatcagatgggacaaagacagggtgaacaatattatacacacattatcccaatccggcacattcatgacggatgatatagtcgcgcgttttcaggataataaacaggagcaatcgtttaacgactatctgcgtcagcagatagcaagactgaaacgcttgggtaagatacgcacatcggaaacctatacggcggcactccgaagttttagcggctttatgaatgatagggaggtcttgtttgaccagattaacgctaacctgattgcggaatatgaggcttatttgaaaggcagagggaactctcccaacaccatgtcgttctatatgcgaatactgaaagcgatctataaccgtgccgctgaagacggattgaccgaacaacggtatccattcaaatccgtttatacgggagtagagaaaaccttgaagcgagccatatcgctcaacgaccttaaacgcatcaaaggactggacctgtcgttaaagcccaatcttgattttgcacgtgatatgttcctgttctgtttctacacaaggggtatgtcgttcattgacatggcttatctgaggaagaaggacttgcagaacggcatcctttcctaccgcagacgaaagacggggcagcagttgttcatcaaatgggaaaagtgtatgcaggagattgttgacaaatacccggaaaacaaaacagaattcctcttgcctatcattacacaacggaatggagattatcggaagcaatacactaacgaacttcatcgtgtgaaccatttgttgaagaaaattggaaaacaactggaaatactaatacccctgacgatgtacgttggacggcattcatgggcgagtatcgccaagagccgcaatgtacccatttctgtcatcagtgaaggtatggggcatgattcagagaacaccacgcagatttatcttgcttcgctggatacatcagtggtggataaagccaataagaagatactggatttgctgtgaaaccatgaatgttttgcgaatctgtccaacgcttgctaagagacggatattatgctgcaaaattacgcaaaataatgattattagagcataaaacactgaaaattttcttattaccatacttctttgttttgcgagaaacacagaagttttgcaaaaggttctacaaaaagatagaatacagctcattatcaataaaatacagctgtttatccgtctcttagcaagagacaagtaaccgtttgactaaaaatacaacaaatgacatttaacataaaaatatcatcaatagccagatcagtgcaagcaatactattcgcttgtgtttgtttttcttcatgttgcccagacaatgttccgtatgatgtaaagcacatgaagacgtttcatgaacttactactccacaaaataccgtagattttcgcgttgacaatcttgctctatttgtggattactctaattgcatatccgatggaatgcaatccacattttatcagcaaatggtatctccgcttgttgcagcaacaaaagaattttgggcaataaaagggaatgatataaccaaagaaaacggttctgtgtatgcccttctcaataatgttcaagaagtaaactatgcggctttagataaggctattgcacaaatggctgaacgggacacagaatcagtacttcttacagatggagaattatttacccaaacggcaacgaagaacaaccccaataacccatatatgcacgctgctttcaaaaaatggcttttagaggggcatgacattcatattatagccgaaccatatcaagaaagatatagagggaacctattcaataaaaaacgcttttatattatctttacggatgacagaattgatggtaatgtgtatagccgtattaaggacattgttgactttgagcaatttccgcaagttgacgagttccatctaagtggtaattatccttggattgtgccctcaaatggaaaggcatccgatatctgctcaatagttggagcaaatgtcgaacctcacggctcttatgaaattcaagactggcaagtggattggaagaatatagttaatcttatcgttaatggatatgatgaagaaggaaatccattacctaatggggagaaattaattggtggactaagaattaacaaaaatgcgtttggagcatatcgtatatctgatattgatgtgaaggtttccaatattaatactgaatattttgaactttataatcaaattgaattggggcaaaaagttggtagaattgaaattaagccgtctcttatcgagaattttataattgtaaataaagacaagtttaacaaacatggaatggcggatctttacttcgacatcaataattttgctcctaatgctgacttaaatggaaagccattcaattatttcaaaattgaaattataatagctgggttgcaggatattataggcaacaatattgagatgttcaacttcgattcaattaccaatgctggacaaacgaatgtttctatctctgaaagcct

SEQ ID NO: 14446 - DNA, 76745 bp, Unknown
  gut microbiota DNA sequence
gccgggagatcatcccgtaaatatttaccatcctgaaggagagtatttgaaagggctggtgctgtatgtggaataattcaatttatttatatattatatagtacaatggcgtttttacaggatttgaatctgcaaaagcgccattaaagtttaaatgatgttaatcagaagcgaatagttgtagtattattatgtttgataacataaaactccttatctttgcactgtgtttttcatggtattagatttaaggttaatgaagattgggtgtctgggatagatacccttctttttttatatatgatatagaccgttttttaaagcttcttcctgaaagaaagatttgctctgtttttttcttccactccttacattttctcttttggggtgacaggcctatgcttgtttttccgtttatatccattgtgggatttttcttgataggatttgttcttcttcaatccaggcagcataaagttcgctcgcttggtcctaaagctttatacacgctttcctaagccttttcgggctgatgattaaggagatttttacggttatgtagtacagactccgacagtggactatacagtcgcttcgaatggactatacagtctattataagcgtctgtatagtccactgtcggagtctgtattaggtggctggaagaaagagcttaatgtaatggaagaaaaagcttagataacgggtaatgagcaggaatgcttcaaaatgtcaataatagaaaggttgcaggctttttaatgaagttgtaatactaccatctcactctcggtgcctattctgaaaggaggtccccataaagataatccgctggaaacatatatatggctgttttcccattggcgatagccgtgactttgttcataaagatggtctgttacccaattcatgggccaaacctgtccatggtgggtgtgtccgctgaactgtaagtcgataccggctgcctgactctctgccagttggtaaggctgatggtccaacagaataaccggtttgcttttatctatacgggccattaacttttgtaatggaagccgtctggcattgctacggtcgtcacgtcctatcagttgtatgccgcagggaagtgtgacaaccgagtcgcgcagtagttgtataggagtattttgtataaattggatacttttgtctatcccgctgatatattcatggtttccggggaccatgtagattcccagtggtgcttttaattccgttagttcttcagccatgttttcagcataaagaggtattacgctgttatcaattaaatcgcctccaattaggattaagtccggattctgtccgttaatcattttcacatattgcttcaaagacgtttttcctgtgccgttgcccaaatgtatatcgctcactgcaactatttttataggacgccgattatcggtcagcggtttggtgagcgtgatgttgacagtatttatcttgggatggcgataattatagtatccatatcccaacaagacgaatgtggccagtaaagaagtcatgaaactctggttgaaagaaatagagcacagtttcaataaatcaaagaaaagtaaaaacaagaccatatataaagtgaatatcagccagcctgtcccgacctcatacattatgtgggataagtaaaacggtatcttcacattgcgacttagcatcgttccgaaaaaggacagtgcagctagccagaataaaacagtcaataaaatcttgattccgtatggaaagccggataatgtttgcaaacctctgtaaaatatgtaggcatttcctccaaggtatgtaaagataagaatgatgaaaaatgtcggcataaagtcaatacattaaatttggattacaaaggtagtccaattcttgataaaagagaaacaaactattgatataaacatgaaaatagtataaattggttgccttaaggatgaagatcacggtggcgtgttatatagaaacaggaggtgctgaagtaatttctgatgtgttttaactgtgccagtacaggatataattttcgtggccgcagatggaacttctgttggtagtgtgggttgatgaaccataattgtctgtcgattatttcgtatccatacttttcagcaagttgttcaaaggcgtctatggtcatgcggcagcgtttgatgtctgataattcttcgatacatgatggtgtttcatggaaacatctgagcagaaaccgatagaatataccgggacataaatggatgaaaggaagagaggagacgaaccggttgtgacaaatttgctgatgtccgccaaatggcatttgccaagacgggaatccccagaatatgatgcctcccttagctagaagaggagagaggcaacggaagaattcttctttgttactgatgtgttcaatgacatcgtgtatcaggatgagctggtaacgggaaactgaagagaagttgaagaaatccatcgtcctgaattctcctttgtagccggaggcggcgaagaaggattgtgcctggtgtatgcggctggctgcacggtctatgcctgttaccttgcagtctagttcggcaaaggggagcaggttacctccttctccgcaacctatttccagtatgtgggtagaagagctgagggagataaattgctttacatagtctatatagaaactgcgtgatgtgtttgctagttcgttaaaataacattgtctgtcttgatgtcttttttgcatggctgtctttttatcctatagatacaaggatggacaaaagactgcatgaagtttccttaataattccagcgcactcccaactgtaggttgaaatggaacgggtactcgtcacgtattgtgtttttaaagctgccgtccttgaaataaaaagctgctccgggttctataaaagcccctagggtaggatttatattatattgtattcccaatgcggcgtgtatggagaattggagcggttttattttcagactctctgtactggaatagattttttctttctgaacgatgaaatcttgttccagtttacccgatacggatttgtctatcgtgcctcctcctgtggtataaaaggaaaaggtacgggtggtataaagccggcggtctagtttcacagacaagcctatgtagtggaacttttgtcgtttaacccacttggaatcttctcctatggaactttcggacgacagataggtatattgcagacctgcactgactccccaatgcctgcttatggatttacggaacgaaagcgcaaaactgacggggagattataatgggtatattctgtcatggggcgtcctgtgttgtcatttgctatttgtagcagagctccgtaagcttgtgcatcgggaaagtccgagggatattcctgcaaatagtttttgaagtcattccaatacataatttcatccttatgagaacttcctatgtctccccgggaaaaagttttgtttatgaagccggtgcttgttccgttattgccggcagatatggcaagtgccaaagtatattcggaacgtttatgcggtaatgcaaagtggttatgtccggaggggctcttgtgtacagattctgtgttccggattgtatcttgtgccgggagagtgcattctattcctatattatttgccgtatcggtattgatacttgtttggattggtggttttgtcaaggaagttgtctttgattggggcctgtccggtaatagtttgttttcaggcataatggaaggattgcctgtaatgcttcttggctggtgtgccggtaaggatacgacgggcgaggctactttgtgcttttctgtctgtaaaaaataaaaagtggtggcaaaaggtataaacagcaagaggagaacggctgctatacgcatcgttcttatcctttttttcttatgtaaatagggggtgaaatattccgtttgaaaatgattccaatcattttcggggaggggcttttcgtattcgttaacccgttgtttcaagtggtctatccacggttcttcttcctgtttcataatgattgtcgagttaagtattctttaattttttgagcaagtacacatttggcgcggtgcagttgtgaggaggatgaatgttcgttaatgcctaatgtcttcgcaatctccttatgaggcattccttcgaatacggccaagttcagtatggtgcgatagcctgccggtaattcagctatgaatttcatcaaggtttcaataggaatcgaaatcatatcttcttcgtccacaggctgcatgtcttcttccagatcatctacagaaaggaaaaagcaggttttctgtttacggagatgatgcaaggaggtagttaccatgatacgggtgacccaggatttgaatccatgcaggtcggtggcatgtagttggtcgatggcggaaaatactttgatgaatccatcatgcatgacgtccaaggccgattcttcgcctacatagcgacagcacactccatacatttggcgggagaagagtctgtatatggtttccaaagcttccctctttccggctttacatccttctattagttctgcgtcattcatttttcttttgtcatgttattatataaagatacaggggagaataaaagactgcataagaacaggagtttttctataaaatagatgtgaaatagaagattattgcctacatttgttaggttaaaacaaaatagatgagaaacatgagaaaacaactttatgcaacattggcttgctttcttctcacttcggtcacaacttacgggcagggctggaaactttatgaggaagctgcgaaaggagaatcgtatgccaagtttgactgtgtggcgttgctggacagtacatcggtgtcagtacaaccgacagggcagggatcatttgccgtatgtaaggttatcaaggtgcagactcctaaaggagcagtagctaaccgggtgattaaatatgattatgatccgttgacggcccatgccgagtttaaacgtgtgacgatatatcatgctgacgggcagattgaagaggtggatgtgaagaagacctgtgactatgcggctccggcccgtgctatttattggggagcacgacagattatgatagaagtgggggctttgaaccccggtgatgtcatagattatgaaatagcgaaaaagggatttacatacgctttgctgggagctgttcctgaggatgattcccggtttatacctcccatgcgtggccagttctatgacattgttccattttggagcagtgagcctaccgtgcgtaaagtgtacaaggtcagtattcctatggaaaaagagatgcaatttcaattttatcaaggagaatgtacatcgtccatgcgttatgaagacggacgaaaggcttatacttttgctatggaggacatgatgcctttccggcgggagccgaatatggtagatttgtttgatgcagctcctaaactgatgatgtcttctactcctcattggaaagacaagtctttgtggttcaataaggtcaatgaggattatggaagctttgctccactgcccgaagcgcagaagaaagtggacgaactgataaaaggaaagaaaaccgaaatggagaaaatagctgtactgacccattgggtagcggataatatccgttatgcaggtatctctatgggaaaaggagagggctatacgttacatgatactaaaatgaattatacggatcgttgcggcgtgtgtaaagatatagcaggaactttggtttcttttctgcgcatggcggggttcgaggcctatccggccatgacgatggcgggcagtcgtgtcgaaagtattcctgcggatcatttcaatcattgtgtagctgtggtgaaacttgctgatggaacttatatgccgttagaccccacatgggttcctttctgccgtgagttgtggagtagtgccgagcaacagcagaattatctgcccggtgtacctgaaggttccgatctctgtctgactcctgtttctgctccggaaaatcactatgtacgcatcaaggcagacaaccgcttggacgctaatggtactttgcgtggtacatttaccattcaagccgagggacagagtgacagcaatatacgcagcatctttacaagaggttttcagagccagtggcgtgcgactatggaaagacaattgctggctgtttctcctaaagccagattgctgagtgtagattatggcaggaatcctaaagattatcaagctgctcctatccaaatcattttccgttacgagattccggattatgccatgcaaggggagaaggaaatgttgttcaagcctttggtaatgaataatctttataatcaggtacgctcttatctacggattgatacagaaatgaaggaacggaagtatggttttaaagacgcctgctcccgtttggtggaattggatgaaaccattcaattgccatcaggctataggctgataaatgggccaaaggaggataccatgcagggaacgggagccgattttgaaggctcgcttctacaaaaaggaaaccgggtggtcctgcataatcgtctggctttgaaaaagcgtgtatatgaagcgtcggattgggatagcttccgtaaagcggtggaagctcataaagcatacggtgattatttggtgattaaaaagtaaagcgacatgaaaaagatttattatatatatgtatgcttgggagtgttgttattgacagctcttccggcaaaagcggcttctgaagcagaatttgggaagttagccaagacttatacattacataaggacggtagtcaggaaatgcgggtatataaggagttgactttatttacacatgcagcggtgaatggtttgtatggtgaaagcttcattgtttacaatccggcatatcaggaattgaagatacatgaatcttatactcgccagaaagacgggaagatagtaaagactcccgaaaatgcatttgtagaggttcttcctgctgcggcggctgatgctcctgcctataacggactgaaagagatggtggtggtacatacgggactggagttgggagcgactatttgtttggattactcggttatcacacgtcccggttatttgcccgggctggatgtatatgtgccggtagaggagttatcgcccgtcaaagaatatatctgtagtgtgtcggttcctgaggacaagcctttgaattatgcattgataaacggaaaagctgcgccggtagtgaaaaatgagaatggaagtaaagttgttacttggacactgaaaaatattcctgcttattatcctatggaaagtactcctgctttatcaggaaatataccggttattttagcaaatacgtatccgtcgatggccgatgctttgaaagtgctgaaatctcaatttacggcagctcatgaaaaagaggtcatggctttggcacaaaaattattgcaaggaaaaaatgcggatgaaaaggaagctgtcctgatgaactatgtacatggattgggcacgtcccggttgtctttgtccgaaacaggataccggatccgtccggcaactgaagtaatccgtactgcctatggcacggaagcggaaaagataaatctgcttgcaggattgttgcaggcggcaggattacaaggtgaggttaaggttgcttttggcgtaaaagcaccggataattgtttgggattgggcgctatcagccagttgtttctggactctcctgtcatagcgggcatacaggaatatcagcctgtcaatacgttggatggtaagaaagcggttttggaagtgaagaataaaccggtttatgaaacggatacgataacagtcacttctgaaacaggtaaaacgttggcagggggctatcgtctgataacattgcctcgcgctaaaaccggaatagccatgaatggttatggctttggaaatacagaacgtactacgaacctgttgcttcctggtatgacggatgaaacctatatttgcatagtaaatgttccgtcggatatgcaggtatgtactccgcaaaaggcaaaagaaatagtcaatgcggtagggaaattgaaaataaccgtacagactacagaggataagacggaagtaacccgttcgctgcgactgaataaacaatggataactcccaccgattatgcagattttcatcggttgatgtccgaatgggaggatagtcatcatactactctattgctgaaagagaagaagtaatcgggtaaaaattggttgaaatagttgaaaagttggtcatcccttgaaaaaggaaaggccggcttttcttattttccatcggaggatttacatttgtggcatttaaaacctataaaatgaatgatatgagtggaaaacatggtatagtttgtatgggcttgttgatgctgctttcttcttgtcacgacgacaagcaggtcactgcttcaggattacaacgtaaggattttcagacagaagtgaatgggcagtataccgatttatttactttgagtaacaaaaaagggatggaggtctgtatcacgaactatggggcgcgagtagtttctatccttgtacccgacaaaaatggaaaaagggaagatgtagtgtgtggattttccacgattggtgagtatatggaacaacggcagaattttggttctacggtaggacgctatataggacgtattctgaatgcgcgtttcacactggacggggtagagcataagctggtccctaacaatgggaagtccggacatatatcacatggggggaatcccggttttgccgatagaatatggaaagtggaacaggcagatacatatacggttcgtctgtcttatctctcccctgatggagaaaatggtttccccggaaacctgaaagtgacgttagtctatagtcttggtgaggatgagaatgcactggatttgacatacgaggcaactacggatgcacccacggtacttaatctttctcatcattctttttttaatatctcgggagactttacaaaaagcgtggaagaccagcaactttgggtagatgcagatcgctttactccatacgatgataagaaatgtgtcacaggagaatatctcccggtggccggtactccccttgatttccgtatgccgcatactatcggagaacgtatagatgcggattatccgcaattgaaggtagtaaacggatacgatcatacttgggaattgaatacgaaaggagatgatacaaggccggctgcttgggtgtatgatccaacaagcgggcgtaagatggagatcttcaccaccgaaccgggaatacaaatctataccggtaatggactgaaaggaaaaatgactggtaaaagggggatagcttatcctttccgttcggcggtatgtttcgaaacgatgcattttcaagatagccccaatcagcctgaattccccagtactgtactccggccgggagaggtttttcatagtcatacggtttataagtttgaataatttgctaatctgtcaatttgctgatgtgctaattaggggtgctatatatgcccacacggttattggtatattagcaaattgacatgtcggcaaattatttttcattttgatgtaacgtttccctacctctatgtgtcatactagtgaacatggaacaaaatagatttgaaatagaggcaaaacgaatgcggccggctttgttaagaatggctatccgttatctggaagactccgatgaggcagaagatgcagtacaagatgtactgttgaaactttggtttcttcgcgaccgtctggaccaatatcgtagcgtggatgcactggctattgttataaccaagcatttgtgtattaatcgtttgcgaggtattcgaatagagaaagtcgatttggagcaaggcatcagcattggtggaggtgaaaaccctgaaatgaaactggtagaggaagagaatatgcaggagatactggaagtaataggtactttacctgacttgcaacagtctattctccgcatgaagcacttggaaggtttcgaagtagaggagatagcccgtctcacaggaagtacgccggtggcggtacgaaccaatttgtcgagagctagaaaaagagtaaaagaacaatttatgatacacagtaaggtatggaattagataagaggaatatagaagaatacattaaccgtttcttggaaggggaaactacgaatgccgaggagcaggctatttatcgtttcttccatacaggggatgtaccttctcatctgatgggatatgctccgatgtttgcctggtatgagggaggtatgcagggagaaccgggtatgttgcagccagacggacagaaggaggttgctggaggaaagaaatcagaaaaggtaccggtggttggaaaagaaagcttttatcagcgtattccaatagctgtctggagtgccggtatagcggcaatgatggtcattgcgctggggttaggttttattttctattcggaaaaccaagcagacggaagtggtgagtggtcgtgctacgaaggtagttatgtggaagtgggaggcaagcgcatttcggatgtgaaacagattatgccttgtattattgaaacattggaaaaggcggaacgggtggagaaactggcccaggaacgtgtggaagaaattcatcgttccgagaaagagatagaagaaaaggaattattggtaagcgaataaaaaacataaaaaataagatatgaaaacaaggtttattttaggaagtgcattggcggctgttttgctgctgtgtggtggaacaggcaaggttatggcccagaagaatattgataaaatggcggcagaattggaaaagcgggatgatgtggctatcaactctgtaacgaaacgtgactctaaaacccgcaaagtggtaaaggtggtgaaaagtttttcgttaaaggatgagaaaataggcgcaaggttgattgaggctttcgagaaggatgaggaatatgcagaaactgccattaaggatatgccgaagggaaggggcaaggcgcagaaagcgaattttacattcatttataagatggataatgagaaacgtacttacacccttaatgtcaatgaaaacggaaatgtaagcatgaccgttattatcagtccgatgaaggatgggaaagaagtgtattctgctgtccttgattcggaatattgggattcgttcaatgagcagatggctgaattggggaataatctaagagattccggtatagaggtgcgccaaatgagccgggaagagatggagaagatgcagaaaactatccgccagtcattgaaaggactggatgcttatgccatagctgaatagataatggcattatttttcacgaacaccagataataaaacactctcttttagttagattacaaaaactttttaattgtcttgcctttccggaagttgtgaaaccaccggagaggctttgttttttaagatgaatctccatgaaaaatcgaattgttttatatctttgcaagtaatataaaaaacacacattaaagaagaaagatgaaaaacgaaattaccggaatgaaactcagactgatagtcatgaacttcttacaatttgccgtatggggggcttatcttacttccatggggacatatttgtttaatattggcttgggtgctaggataggcctgttttacgccatgcaggggattgtttccttgtttatgcctgctgtaatgggaattattgccgacagatgggtgcctgctcaaaaattatatggcttctgtcattttatggctgccgtgtttatggtggctgccgggtggtatggctacgtggatggtgaagcggttaatttcagtactttatttacattttattcttttagtgtagctttttatatgccaacattggcattgacaaattcggtagcctataccgcactggataaagtaaaactggatcctgtcatcgcttttcctcctatccgtatttttggaacgattggtttcatctgttctatgttgctgacggatatcttgggattccaaaataattatatgcagttcttttcttgtgcttgctttggagtgatactggccatttatgcgcttactttgcccgagtgtcctgtaagtcgtggtggagaacagaaatcgctggtagatgctatgggattgcgggcgtttacactgttcaaacagaaaaagatggctgttttctttatattttctatgttgttgggggtttctttacagataaccaacggttttgccaatccgtttctcagcagtttcaggggagttccagagtatgctgatacgtttggagtgaatcatgctaacgcattgatatctttgtctcaggtgtcggaaacgttgtgtattttattaataccttttgtattaaagcatttcggaatcaagcgcgttatgctgatagccatgttggcatgggtacttcgtttcggattgttcggactggggaatccagggccgggtgtctggatgtttgtactgtccatgattgtgtatggtgtggctttcgacttcttcaacatttcaggttcgttgtttgttaacaatgagactgatttatccattcgttccagtgctcagggattgttcgtgattatgacaaatggtattggcgctacagtgggaacgttgggagctcaagctgtggtaaatcgttttgttgatatgaacagcactgctccgcagatggagggatggagtatgacatggtttgtttttgcaggatatgccttggtggttgcggtattgtttgctgtcatattcaagtataagcataatcccaggcaagtttaataaattatttttgaccatatccgatgtaaacaggagtggtagaagggaagttaaaattatggatgaaatagaattgaaggtacatgatatgtcctctacattgcagccggcggatgcatatgcgctggtgttggaagaagtgaatggtaaccgtaagctgcctattattatcggttcgttggaggcgcaggctattaaggtggtaatgatggaatataagatgcccagaccattgacgcacgatctttttctgacagtgaccaaagagttgggggctgctttaaagaaagtgttgatatataaggtaaaggatggagtctattattcctatctgtttttggaaaaggagggtgaggtatttaaaatagactcacgtacttccgatgcgattgcgttggctatgcgttgcggatgtcctgtttatactactaatgagatcatggaaagtgaacagttgcatgaagttgggaatacggcattttctgtcaatgtaaatacagttgatgtggtgatgctgaaagaagcattgtcaaaggctatagaagaagagaattatgagcaggcatcccgtttgcgtgatgagataaaacgacgggaacaagaggaggagaatacgatagtttgatatataaattgaaaaacaagaagaactatgcatgttttttatacccctgatatagcgagtaaccttgaacttccagaagaggaagcaggacattgtttacgggttttgcgtctttccataggcgatgagataatgttgactgatggaaaaggttgtttttacaaggctgtaatcagtgctgcaagcggtaaacgttgccaagtgaaggtaacggaaacgattccgcaggaaaaagggtggaacgggtggttgcatattgccatggctcccactaaaaatatggatcgtactgaatggtttacagagaaagcgactgaaataggctttgatgaactgtctttcttgaactgccgttattccgagcggaaagtaatcaagaaagaacgtattgaaaaaattctggtatcggcagtgaaacaatcgttaaaggcgactatgccggtactgaatgaaatgacggactttaataagtttgtttcacgggattttaaagggcagaagttcatcgcccattgctatgaaggggaaaaacttttgttgaaagatatattgcgttccggagaagatgctttggtgatgataggtccggaaggggattttagcgaggaagaagtggctaaggctatagcggcaggttttcagcctgttagtttgggaaagtcccgtcttcgcacggaaacagccgcattggtagcctgtcatacactgaatttattaaaccaaaaataagaatatgagaaaaggtatttggggatttgcattggtggcgatcatgctgcttatggcttcctgttcgtctaaaagtgaatatgccaatgctattcctaaggatgcggcaatggtcatgtcattcgatttcaaaacaatggcagagaagagtggcataaacggtaaagggggagaaaaggtggtagccaaactgacggacgcattaaaaagcggtctggaaggagaggcctataaaactgccgagaagattattaaaagcccgtctgaatccggcttgtcttttactgataaagtatatatgttcattactcctcattctaatgcttttgctttattggcaaaagtagatgatgaaggtaaagtggaagatttgctggaggcgttgaaggaggagcagatatgtacggaattgaaaagcgaaagcggatgtacatggacacagatgggtacggcgctgtgcgcttttaataagggcactttcctgttgatgggaagtaataaaggagatgctctcagcttgaaaggaagtttgctttcattgatgcgccaggatgctgaaaacagctatgtaaagaccacagactttggtaagttggcctcgtcgaagggtgaaattgtcactgtgatgaatatgtcatttattcctaatgatattaccatgcagatgcgaatgggaatgcctgcctatttgaaattggaagatatcaaatatctggtttccgctactttcgaaaaaggtaaaattgtagtgaagatggaaacattgattgaaaataaggatttgattgctatgtatgaaaagcagtcggctgtttccgcactcatcaaaggagcttatttggagtatttccctgctaatatgttggtttgggcaggtggtaatatcgatggaaaaggaatttatgatttactttgcgaaaatcctaccatcaagcaagcgttggataatccgatgttgccaatagatattgaaggtatattctcttctattcatggggatgttgctgttggctatagttctttgtcaaataatgacttgctgatttatgctgatgtaacgaataaagactttttgcagtccttcgaagacctgagacctttgttggctatgaccggtgggcagatgcaattgaactctacgggcaaagaccaatatgagttccgtatgtatcgccagagcatttggtttggtgtgaaggataatctgctttatatctcgaacaatgaaagactggcagatgaggcaggccgccgttacggagtttctttgcagaatactccttgggccggagaagtggtgaaaaaccgtttctttatggcgttcaatgcggcgcagttggtgaaggacgttcaggagaatcctcggttaacccgtatgctgggtagtgatgccgccgtgtttaatgctattttgggatcttgcgactatgtggatgtgatggctcccgattggaaaagcggtcgaataaatattgttatgaaagataaagaagtcaacgtgctacagttgatcgtacatggattagagaacttatgaatactatagaattacaacggacccttcctgctgtttttgcagggagggattctattatatccgatgtctggcatcagttgttgaccctgcaacgtggggaagcctatttggtggaagcagcatccggcactgggaaatcatcgctttgcagctacatatacggatatcgtaacgactatcaaggtatcatttgttttggcgagaaaaacatccgtagtctttcggtgcatgactgggtggagattcggaaacgttccatcagcatgttgtttcaggaattgcgtttgttcacggagctgacagcgtgggagaatgtgcagttgaagaattcgttgaccggatttaaatctaaaaaagaaatcaaggcttggtttgaacagttcggtattgccgataaatgggatacaccggtagctaaaatgtctttcgggcaacagcagcgtgtggcgttggtccgcgcactttgtcaacctttcgattttatctttctagatgaacctatcagccatttggatgaagaaaacggatggattatgtcccggatattggtggaggaagcggatagacagggggcaggtatcattgtgacctctatcggcaagcatttggaattgaactacacaaaaacgttgaaactatgaggttggtttggaaattattacgtcagcatatcagtttcccacaattggcgggttttttctttgccaatctgtgcggcatggtcattgtgttgctgagtgcccagttttataaagatgtgttgcctgtttttacggaaggtgacagtttcatgaagaaagactatgtgatagtaagcaaaaaggtaagtacattgggctcctttgtcggaaaaagcaagactttttccgaacaagacattgctgaaatcagcgaacagccgtttaccaaaggagtaggggcttttatgccttcccaatttaaagtgtcggcaggcatggggatggagaacgtggggttgcacatgtctacagccatgttctttgagtctatacccgatgagtatgtggatgtgaacttggataaatgggagtttgatgaaaatgaacgggttgttcctatcattattccccgtaattatctgaatctgtataactttggttttgcacaaagccggagcctgccgcaattgtcggaaggggtgatgggtatggttaatttggatatacgtattactggtgcagggcatacggaaaactttaaaggaaaaatagcaggtttctccaatcgcctgaatacgattcttgttccggaaacatttatggcgtgggctaacaatgagtttgctccggggcagaaaagcgaaccgtcacgactgattgtagaagtgaacaatcctacggacgaccgtattgccaagttctttaaagacaagggatatgatacagaagatgacaagttggatgcgggaaagactacctggttcttgaaagtgattgtaggaattgtgctttctgtaggtttgcttatcagtgtactctctttctatattttgatgctcagtatttacttgttactgcagaagaatacgtctaagttggagaatctgttattgataggttacagtccggctaaggtggcgcttccctatcaaatgctgacattgggcctcaatgcagtagtgttgtttttatcggtgggaattgtgatctatgtgcggaatagctatatggatatgatagaaaagttatttccacagttggaagaaggaaatctgggaccagccatggttataggtattttgctttttgtgggtgtatctttgtttaatataatagcagtacgtcgtaaagtggcatctatatggatgcataaaggttgataatagttatggtatctcagacagaatttacgcttcgtccccgtactaggggatttcacctgattactgatgaagtggtgcgcaatttgcctccacttccccaaataggtttgctttatttgttcatcaaacataccagtgcggcattaagtatcaatgaaaatgctgatccggatgttcgtacggatatggaatctatttttaatcacttgataaaggaacgcgaaccctattacgaacatactttggaaggttgggatgatatgcctgcccatgcaaagtcaaccattataggagctagtcttactattcctattacagatggtcgactgaatatgggtatttggcagggaatttacctttgtgagttccgcaaccatggaggcggtcgcaagattgtggctactgtaatgggggaataactctttcagatattcatccgggttattatttatttaaaaaaatagattaatttcactttaatcagaactctttttttaactttgtaccaattcttgaaaacagatgaatattcatttgaaaacaagaagggacatatataattaagagcgtttaaaatattaccttgtcttagaaaatccccaattttcaaagctgcacaagtgtaatacaacaagcgctcacgtcttgtgtttatactcctttacaggattagtatattcataaagacgtgggacactgttgttattatttgtgcagctggtatggggatacctctaaggcagataaaatattaagcaggtcccacgtctctttttatgtttgtaccataaaaatgaatggataaaactagcctgagtgatgaaaattattgtttggaattcgcaggataaatgtgtggctgattatcataggttgataagaggttgcgatgtattgtgcctgttggattgcgggcagtggacggttccgatgtatgcgcttcagatacagaagggtctgtttcattggaaagttgagcatgaaggtctttcctatgatatattttattgcttggagaaggtggcgtttgtatgtcgggatggtttgtatagtggagagtctgttctatatagcattcattctaatataggatctttgataggtattcgtttgcaggatgatttttggttatttgcacaccatgagcctaatctggttaatgcctatcatataggtgagttttatttacgtgaaatctcggaccgtttcagaaaagcggcgtttatagccgattttaaaaaaaagtcttattcttgggtgcaggaaacggtaggtaagttatattgcatcgctctacccgaaggatattatccacatactgttaattatttattcactatccatgtggcctgtacagatttatatctgttggaaggctatagcgagacctccaatcagcctactttctttgaattggatatttaatgtccagattagaacctgtcttactgaaagaaatcaattaaagttcggtgaaactgatgacaatgctgatgaaaattaaacgagttcttataatttcttgttttttcctttgataataaaagaattagtgtatatttgcatgtgaacaattacattttctaaggaaatcatcttatgggcagagaacttatatttgaccggttttcacagcaagctctccagaccttgcaccggtatcgtgccgttatgttcagtcctacgatgctcatgtctttagttgttacctatgattttttttaatccttaattcttacacattaacatgagtttactatggacaacagaccgactatcgccgaagtacaagaatgggtactgaagctttataacacgtgtgaacaaaccatcactagtgaggaacgtaaagaacagcataaatatgccgttatggtacaacggccacaggacaaaaagttcttggtgaagatgctggacgaatcttctcaaattcgtgatcgtaagaaattggcagaacgtatcaagaagctgatagaccgttatggtgtacctgagttcttgaataagcgtgatgctttcctttttaagatgtaccaggcttttggtcatcattttgatttcatagccataccaatcataaagaagcgtcttcgtatggatacttctaaagtaattctgaacgaagcgcgtcctaaattgacagatcatctggctacccgtttcaaacaaaagattggtcagaacgtgaatttgttaggcgaggtcgttttaggaaacggagaagcggatcatcgttatttccactatctggaagccttggaagctcctgatatcaattatatttctgtgaaaatatcgggtatctacgcgcagactcatgcgctgaattatgaagaaagctttccggagctggtgaaacgtatgtgtgcactgtatcagaaagcaattgactttccttacgtggatgagaacggtgtaaaacgctccaagtttgtcaatctggatatggaggagtataaggacgctcactttacattacgcttgtttaaagaagtgttgagcagaccggagtttaaaaactattcggcaggcatcgttgtgcaggcttatcttcccgatgcatacgaatttcagactgaattattagaatttgccaaagcgcgtgtggctgatgggggtgcaccattaaagatgcgactggtgaaaggctgtaatttggaaatggaaacggttatttcttcccttcgtggctggcctaatcctgtaaggacatcgaaaactgaagtggatgccaattatttgcatattctggaacgtgctttattacccgaaaacgcaaaggcgttgcatgtgggggttgcttctcataatttgttcactattgcatacgcctatctgttgagtcagaagctgggaagcgcggagtacatgacttttgagatgctggaaggtatggctgaccatgtatggcgcgctcaatcccaattgggaaatcatgtgattctatatgcgccggtggtaaaagatgagcatttcctgaatgcagtatcttacttggtccgtcgtatggatgaaaatacggctccggacaacttcctgacccattcgttcaatttgaaaccgggtacggatacttggcgtttcttacagaaccagtttgaggaagcttataagatgaaagatgttattacacatactcctgcccgtacacaaaaccgcttgcatcgttatactcccgttccaccagctgatgtaatgaagaatgaacctgatactgattttgatttggctcagaaccaggaatgggttcggaacatttttgcgaagtggaagaagtcgccgacggattcacctgaaattattcctttgcagataggagctgaaacggtggtttgtgagaaacgccataaatatatggaccgttgccaggatgatgaagtttgtgtatgcgaaatgtcacaagctgatgccggacaggtgatgaaaattttggatatagccgaaaaagatcctgccggatggagaaagactacattgcaggaacggcataaaataatgtatgaagctgccaacagactgggtgagatgcgtggtgatttgataggttgtatgtgtgccgtgacagggaagacagtagtggaaggggatgtggaggtgtcggagggtatcgattatgctcgtttttatagcactagcatgaagcagtttgcagaactaccggatgtggacattgctcctaaagggactattttggttatttctccgtggaacttcccgtgtgctatacctattggtggtattgtggcaggactagcaggaggaaatactgtaattttgaaaccggcgactgttgctgcccctgtggcatggttgtttgccaaggcattttgggatgcaggtgtgcctaaagaggctttgcaggttatcattacagaccgtgaggcattaaaggtattaactacggctccggctgtcaaacatattattttgacaggagggacagatactgctcaaaatattgcacgcagtaatccggctactccattgtcggcagaaaccggtggtaagaatgcaattatcttgacggcttccggtgaccgtgaccatgctattatgaatattgtggcttctgcttttggcaatgccggccaaaaatgttccgcatgttctttattgctggtagaacgctcagtttatgaggacaagaactttcaggataagttaaaagatgccgcaactagtatgaaggtgggtagtgtatggaatccagggaatgtggtaggtccgatgattaccaataagaatgataaattattgaaagctttggaattggaaaaaggggagtcctggctggttccacctcgttttcttgataagcataaatatgtattggctcctacagtgaagtggggggtacgtcccggtaactattcattcagaaccgaattattcggtccgatgctgagtgtggtttgtattgaaaatttgcagcaaggcatcaattgggtaaacagtttggattatggtttgacttcaggcttacagagtctggatgaaggtgaacagaaattatggaaagattcaattatggcaggtaatctttacatcaatcgtggtataacgggggccattgtaaatcgtcagccgttcggtggaatgaaattgtcagcttttggtggcggtgtgaaagcgggtggtcctaactattgtgcttgttttgtaaagattacagataaactaggcagtaccactgactatacacaaagttatgtgaaggcatacgagcaggaatttgcgcatgcgcgtgatgtcaataatctgtatggcgaacaaaatgcattccgctatctgcctttaaagaatatggttttgcgtctttttccgggagataacaatgaagatgcaaagatgattgctttggctgccagaatttgtcatactccattgagcattagttttgagcccggtgatgatcgtacagctgcattggcttccttgggatgtcctttaaaagaagaagcgttggccggattcctgaaatcaatgaagaactatgagcgtatccgtacttgtggggcggatattccgatggaaatgtatgaggaagctgcacgtattgataagtatattgctacagctaaaccggtgaaagatggacgtgtggaattgattcattacatcaaagagcaaagtatttcatttgaatatcatcgttatggtagtatcttggaggtgccgtcggtagaatgatgaaatacttttattagtatgtcttttgtataactttattaggagtctcgatttgtatgggactcctaattatgttttagaaattattattagaattatttggtggagaagaatgaatgtgtatatgttcagacgtgttttatcaatagaggcaataaaaagggtaaataatcttttaattcaatacgtaattgttttagtgcctgttgaatgcggtagtctatggttttaggtgatactcctaaaatttctgctatttctttataactcatatttttaaagcgatgcattacgaaagcttctttataggattcaggaagtgtttctactgcttcttggatacgtatagtcagttcttctataagataaaaattagtgtcatctattagggattgcatctcttcataaaaatagttttcgacccggctttttacttcttgctgtttgatacggtttatagcacgatgatgtacaatagaaaataaataattacttaatgaagactgaatgactagcatatctttattttcccaaagccacagcatggcatcttgtacacattcttctgcatcttctaattctacgaatttgtttccgtatgcacataacatgggatagtatttcctaaaaagtgtatcaaatgctttctcattgccatttttgatggctaataatagggattggtcttcatagttatactccgttttcattatttaaaggttgatttgtgtgcaaatataatcttttaaaactaaaaaaatatattgtatttcagtaattctattctatggaatactattttagaggaagtcttgattaaagtcgtttgtagtgtgcccttgggtattatgtatgcccaaagggcacataggaaatatatttaattattttttactttgaagcataatactatcggttcgtttttgaggttacggggtaagaacacctttgtctttggtatattttatatttttattgccttgtagtggaatcattttaccgttaggaatattgccggtccatttattgtttctggaagttcctctccttctgataaagcgtaaatagcatataaagtttttccgtttttgtctgcagtgaaccatatattctcattgttatatataggagttgtacgagtggcataaatggcttttctgtttcatgtaaacgttttattacttcgtctttgatggcgtcagacctactcctaataataaacaacctcctttggcaatgattcctattaaaatattaataattttttgtggtgatttaaagggagcattaggtgtccatccccaatcattgcttagtggtggacaactttcccaaggatagttaagctgtgtttcggagataccgcgttctggtgtctggtaattttcgtttttaccacgtatgctgcggtctactgaaatgagtcctgggtgtttcttgcgtgcttttgacaatcttctgtccaagtgaatatcttcacctgtaatccatcctccgtttaaccataaaatatcaaaacttccatactcggacattttataacggctaatgattcgtatgtgacaccggttcctttcaaacatttgcagaagtagggagtgctgactttaaaagaagatatcaccgaaagctagacagatatccgcattcagaaaagtgatttgtttgaaattcctctatcattgaatactcttcagatagacaataaacttattatatataacaagatggaaaaagaaactgacttctttttattgaaggattgcaaaaggggagctttcatgacaaaagcgtcagatcattcttcaaaaactcctttatataaattatctgatcatgtctataaggtatttttccgggatttagctttacaagatacattggcagaccggattgccgatttgatgaataggatcggcttaagtcagatttcttttgatagattggagggatgttcctataccgggcatgacgaatacgctatttcccgctttgcgccccgttgttatactcagtttaattataattaataaatgacgccagtcgtttgaatcataatttatggcgtattcacacaagaatgaattgaggtgagccttggggagaagttatgcgtacggaacaaatggctaataaaattaagaaccaaaatttttttcaaaggaatctttttccacgtatgtttggatggtttcttattcgattggtcgaccgggaatttgaatgttctactttggaggatgtggaggggctttgtccgaggcggcaggttttgatgccggttatgattaataccactatcttaaatcggtatgggcaaatagaccgattgctacaagctatcaaacattaggatatactacatgaggcttaagtcttcaccgaaaaacaaaaacagcgtttgaaagatctgcagttcgaatggcatttgcaaaaggtggatgagaagaactatcagctctatcttttgtttgtgtctaaacttattattgtaatttaacagaacttcagccaggtcagccggaaggagctgactggatatgagaaaataaatatccggggcgatgtaaaattcaagtaaaactggaaggagaagcgactgttttcaatctgtcgtttactacttcggctggtattgttaaatttccgtgtgagttggagggtggacaatatctgttatatgatttcgatggaaatgctgctataactgataaaaaatataatgtaatagaggtgatcggtgtagagggtgcattttatctttccgaaacttcttctctggtatctttttcttgtgaactagaagtgggagaggctcctgaagtagttgtacggtatgtaacttgtgaaaatcctgaaaaagtttctctatgaaaatatatttttgaaaataaatgcatatttgtttaggaatgtgtttttctcgcttgccatataagtagaaggacttaaaaacatacgtatggagtataatgaaacgaatatagaattgttacttccccgttattgtgagggtattgcaacggtagaagagcagcgactggtaaaagattggatgaaggagtctgaagaaaatcgccggatagtaaagcagatggaaatactttatttagcggctgataccgttcatgtaattaataatgtaaatacagaaaaggctttagttaaggtaaaaggtaaaaagactgaaagaaggaaggtggcttggtgggagtgggcacagcgtgttgctgccgtgttatttctcccactgcttgctacttttttggtagaacattatggtggaaaggatgcagatgtacaaatgttggaagctaggacaaacccgggaatgactacttcagtagtgttacccgatagtacggtggtttttttgaattcagaatcctctttgcgatatccttcttcttttaagaatagcaaggagagaaaagttgagttgaagggggaagggtattttgaagtaactaaagatgtggagaaacattttattgtgtctacggttcaccgttcacaggtagaggtgttaggaaccagttttaatatagaggcttacgaagagtctcctgaggtatctactactttaatcaaaggtaaagtcaacttcagtttccaagaaggtgtccgcaaaaaacagattgtgttaaaccccggtcagaaagttgtgtatgattcaaaaaaaggtacagcacgtttacttgagacttccggtgaaacggaaacttcatggaaggacggcaagattatttttgataatacttctttgaaggatgctttacggattttagaaaagcgatataatgtggtgttcattcagaaaaatcctgcacgtaaggctgcttttaccgggacttttaccagtcagcgtttggagcgtattctggaatactttaaattatcttccaatatacactggaaatatgtagacggtaaggatgcgtcgcaaaaaaagacccatatagagatttattaatcaaataaccttaaattgaatataatatgaaagaactgtcaccttaaagtaacaaaaaacatacgggaaaatattggcgtatcttcccgtatggaaaatcggttttcaaattaaagcttgtttggcgacaagcttaatcaactaattttaaaacttaagtcattacaaaagtatgaaaaataattgtagtatccaattttcgaggataccaaatcgtctatggctctcctcgaagaaaatcccaagaactatgaaactatttactcttttctttgcttgttccctaggactggctcatgcatccgaatcgtatgcgcagaaggctatagtcaatgtggaggtacagaataagactgtaggggaaattttgaaagaaattgagaaacaatcagaatttgatttcttctttgataatacgcttattgatttaaatcgtcgtgtatcagtcacttcccgtaacggtgatatctttaaggtgctggagaaggtatttaaaggtacaaatgtgaaatattccattttggataagaagattgtcttgactactaatgctgacaatacacagactgtgcagcagattacttttaaagtaatcggaaaagtagtggacaatatgggagaaagcgtgatcggggctactgtgttggaacaagggactacaaacggtactgtgactgatatggatggaaactttgaattggtggtttctaataaggaagttactttagagatttcatatataggttatagtaagtctgttgtgaaatcaaaagtaggtgtccctgtcactgtgactttaaaagaagatacagaagtgttggatgaagtggtagtagtagggtatggaacacagaaaaaagtgaatttgacaggtgctgtcagtcaagtaggggaaaaggctttagaatctcgtcctgtacaaaatgtatctcaggctttacagggattagtaccgggaatgacctttggggttgacgctaaaggtggacagttgaataatactccttccgtatctattcgtggtgcagggacaatcggtaaaggctccactggctctccattgattttgatagatggtgtagagggtaatatgaacttgcttaatccgttggatattgaaagcatttctgtattgaaagatgcatcggcttcttctatttatggttctcgcgctccgtttggggttattttgattacaactaagcaaggaaagactggtaaaccggtagtaagctataatactaatattcgttttaatagtcctcttactgattatgatatgatggattcctatcgcttcatgcattattataatgatgcacgtactaatggtggacaggcagcttattttagtgatgagcaaatagctaatgttttggcttatcagcgtggagaagtaggaaaaattattccggttacaacttcaaatacatatacacacaactgggcaaatgctaataccgattggtatgatgtatttttcaaagaccatgccatgtctcaggaacacagcttgagcttgagtggtggtacggaacgtttttcttattatctgtccggcaattttatggatcaggaaggcttgttgaattatgctgacgaaagttattatcgttattctgtaaatgggaaaatcaatgcgaaaataaacaaaaacataagtctctcttataataccaaatggtttcgtactaattatgaagctccttcttatttgaatcaattatttttccaccaaataatgcgtaaatggcctaatgcgtttgttactgacccacaaggatattgggcggataacagtgagattataccattaaaagaaggaggacgaatgaaggaagatttggatcagaacttccaacaattgcagttggatgtcactccattgccaggatggaatattcacttacagggcaatatgcgtattacaactaattttactcatactgacagacaagctgtttatgcccatgacgccaatggagaaccttatgctatagctatcactaatgcgacgcagccaggtcagtccagagtaattgaaaaaggaacaaagaatgaattttatacagtcaatcttttctcggattactctcgccagttgggtgaccattatttcaaagtaatgggtggatttaatgccgagcatcaaaatgtgaggactttaagtgctcagcgtgatggcattattgtaccagatttacctacaattgatacttctactgagcaggacgtagcggggggcggttataaccattgggctactgccggtttctttgggcgcttgaattataattataaggagaaatatttgctggaagtaaatggacgttatgatggaacttcccgttttatgaaagatcagcgttggaactttttcccctcattttctttaggttggaatgtggccagagaaaatttttggaaaccgctggaatcagttgtcaatcaatttaaactgagaggctcttggggtgaattgggaaatcaaaatacatcgaatttgtacccattctatgaaatcttacccgtgaaaagcaattccggtaattggctggtgaatggaggaaaaacaaatacggcagatattccttcattggttagtacattattgacatgggaacgtgtgcgttcttttaatgtaggttttgattttggtgctttctctaatagattgacaggttcttttgactattttgtacgcaagactgtcgatatggtaggtcctgctccacaattacccttagttttgggtattgctcctgctatagtaaataatgctgatatgaagtcttatggttttgaaatagaactttcatggcgcgatagaataggagaagtagattatggagtgaagtttaatttggctgatgcccagcaaaaagtggtgaaatatcccaatactacaaatgctttcagtgactggtatgcaggaaaaatgagtggagaaatttgggggtatacttcattaggtattgcaaaaacagatgaagaaatgaaagagcatttggcatctttacctaatggtggccaaaatcaattaggaaacaaatggggtgccggtgatattatgtatgctgatataaatggtgacggcaaaatagatggtggtaaaggtacattagctgatccgggcgatcaaaggattattggtaattctactccccgttataattttggattggttttggatgcttcttataaaggatttgatgtttctatcttctttcagggagtaggtaaaagagattatgctccgattgtaggaactaatggtgctgttttttggggagctgtaaataatatctggcaatcaatggcgatggaagaacattttgattatttccgtcctgagggccatcctatgggagctaatctgaacgggtattatccgagaccggactttaccagcaacaagaatcatcaggtacaaactcgttatctgcaagatgcgtcttatatccgtttgaagaatttacagattggttatacattacctaaacaatggattaataaattgcacattaatagatgccgtgtatatgtgtctggtgataatttgtggactggaaccagcctggccagtatgtttgatcctgaaacactagctgccggagattggggatcaggaaagacttatccattatctaaagtgatatcttttggcttgaatgttaatttttaaatagaaatacaatatgtcttacataaaaaatacagtagcttctgtagccatgttatttacctcagtggtattgacatcctgcaatgattttctagattgtgaaccgttggataaaataaccccagatgcttattttaattcagaaagtgatttggctgcctattctattcaacaatataaattcccatcctatcttaattttgatatctctttagtaaaaactgataacaattcggatgaccaggccgcaacggatgcttctaccgcgttgtgggtaccgggagaaaaacgtactcctgctgataaaggagcatgggattttacagaaatccgtaaagcgaattatttcttccaacaagtattacccaagtatgaggccggaagtataaaaggcgatggagtaatgataaaacattacattggagaaatgtattttttgcgtgcctaccagtatttcaataaattggtaagtctcggtgattttcctattgtaacggaagtattacctgatgaaacagaagtgttgaaggaggaaagtaaaagacagcctcgtaataaagtggctcgttttattatagaggatttagatagagctattgaattgatgtcattgactaccgataatggtaagaatagattgacaaaaaatgtggcattgttgtttaagtctcgtgtagctttgtttgaggctacctggttgaaataccataaaggtacagaccgtgtgccgggtggtccgggatggccaggagcacagcaagaatataatgctggcttttctattgatatagacaaggaagtagattggtttttggaacaggcaatggatgcttctgctcaagtagccgatcgtatttcattgacaaaaaataccggtatatataatccggactcgaatccttataactggaatccttattttgaaatgttttcggctgttgatatggaaccgatagatgaagtcttgttttggagagcatacagttctgtgcagggtgttactcatagtgtaagttcttatctttgcaaaggaggaggggatttaggatatactcgtagtttagtagatgcatgtttaatgaagaatggattgcctatttatgcgccaaattctggctatgctggtgacgtgacgattgaaaatgttaaaaaagacagagatgaccgtttacagttatttatgggtgctcctagtgattgttcaaggcttgatccatatgagacatataaatatcctaagatattggagcagaccaatgatagatgcccgacaggttatacggttcgtaaattcttgacttatgatccagctcaagttgtaatcggttctggtgcagtcaatacgtatggatgtcttcttttcagatctgttgaagctaacttgaattatattgaagcttgctatgaaaaaaatggaagcttggatccaaaagcgataaagtattggaaggagattcgtagtcgtgcaggtgtgtctgataatatcgatatgacaattgctgctaccgatttgtctaaagaaaatgattgggctaagtattctgccggtcagttagtagaccccaccttatataatattcgtcgtgaaagacgcatagaactaatgagtgaaggtacccgtatgcgtgatttaaaacgttggcgtgctttggaccaagtagaaaattatcaagttgaaggatttaatttatggggtggcgaactggaaaaattgtatgttgatgaagctggtaatagtttgttgattccagaaggtgcttcagataagcaacctaatgtatccaacaaagaaaacagcagttatttgcgtgttaatcagattgtaaaaaagaataacttgttatacgatggttatacctggataccagccaattacttagagcctatttctgctatcaactttacacttacctcttcaaatcctgatgacttggaaagttcaacgatttatcaaaatccgggttggagtaaaatagctaatgaaccggctataggatattaatataaaaaagagaatcatttttaaggagaagatataaaagagagtgtgtaaggaacccttctcttttatgtcttttctgtttgtgtatgtaacatcttttattttagataagcacagttgtattctgtaaataccatgaatatgaaaaaactgattatgttgtatttctttcttgccggaggaatagcggcaaatacgaaaaatatagattatacttatttgaaaatgcagtctgctccttttgaggtagatgacgattacctctccaaacatgatatcgtttatttttcacctacgcaactggaggcggaaggctttccgatgggtaatggtgatataggcggcatggtgtggaatcatgacaatggcatcgaattgcaaatcaataaaaatgatttgtggacaaaggcacaaccagaagaatacggaatgtcattgttgaagcatgcggctcgtctgaagatcgattttggtgcaccggtattcagttggatgcatttggaagagtttgaggggcggttatcgctggcaaatgccgagaatacatatcgtgcggttacgggttattccgctacaactattcgtacttggttggcgcaagatcgtaatgtatggatagtggaatgtgaaaatatacctgatcctgaaatgttgggaaatcattcggtagctacggtttcgttggaaagactggggagccgttcctttaccggatggtatggaggttggtttgcgaagaacccttcagtggggcttggtaagatgcgtgcaatggctgatgctcgcgaaatgatattggaagaaacggatggtggactgcactttgctgtagcttgcagggtggtagagtcgtccgaggaaccggaaacggtgaatatgcgtcgtgccgaatggcggacaaataaatgtaagttcacaattatggtcagtgtagtaactgatcgcgaagataaggatccggtaaatgcagcaaagaaattacttgatgaggcagaagcgaagggggtagatgagttgcgtcgcgagaaagatgagtggtatcgcaatttctggtccaattcgtttgtgaagttgggtgatgattatttggagaatatctattacttgcatcgctatctgatgtctgctggttcgcgaggtgagtttccgctggcttttaatgggggactttggcgttggaaccgtgatgtacttaattgggggacaccgcatcattggaaccagcagcaggaatattggggattgtgtgcgcaaaacgattggcggctgatgaaaccttatctcgacacttacttcaagatgataccgtttgctgagaaactggcaaaggagtatggagcggagcatgatgcattgctcattaccgaagcgcataatttcaacggtgtacaatggggaaaggacaaacgctatctgaggaacaattttactcctgcttcacagatagcttctctcttttgggattattacgaatttacgggagacgaggaattcttgaaagaaagggcatatacgtttatgaagaaagcttctcatttttatttagacaggttggaatgggatgaagaaaaaaatgaatattttttgaaagcttctttgtatgagtcggcccctatcgcttatgtgaagaatcctatcagtgaccgcaattgcatcgaaaggcttttcaaagattgtatccgtgcggcggaaatattgaacgtagacaaagatgaggtgaaacagtggcgtcacgtactcaatcatttatgggaaagaggctatcagcagtttggtgaatgtggcgaagtaatctctcctgccgaggagtattatacggaaaagcgttattctccatggatttggggtaacggtggtgccgtagcttttccggcagggctgattggtattgatgataaagacactcgcttgggaaaagctgttgtgaatctgttgaaacacgatgacgagtgtaacgcgcattatccttatccgcagatagccgctcgaatgggagaaggagatgtggccttgaagtatatatggaacggggtgaatgtacatcagatgtatccacaaggattgatgcacaatgtgaccggttatcctgacaatatttacgatcttgcttctgtgcacaatctgttgaaagacacgtatatgatacgctcacatgatttctttcagtgcggtatggaacccatgagcaattattgcacgggcataaatgaaatgatgctccaaagcaacgaggggaaaatcagagtgttccctgctgtgcctgctgcatgggattctattcctatggcatttattttgttggcaagaggggcatttctcgtttctgcaagtaggaataattcggctgaggttacacaagtaggtgtgaagagtttaaaagggaatctttgtcgattacagaatccttggggtgacaagaaatgtgaagtgttgagatgcagagatggcaggaaagtttccgtaaagacaggaggggatggtgtattggctttctctacccaaacaggtgaagagtatgttgttcggctcattggtacggaaactttggttaaagaagtgtattttggcaagcctaatatgaaggtgaaacaattgggaaaaagaagattgggaaaggttagtggctggaatgattttcaatgtggaggtgaaaaatgaatctttacagtgaaagtgaaggctgaatatgattatgcacagaaaaataaagctaattatttgttgaatattgctcttcgcggagatgggtctattcatcctgctgaccaatccactttgcaaggttttgctgatctaaaagattgatagtatacgtgactggttttgaacagatagattcttctttcttcctttcatctacttttgaaaacgccctgctgacaggcgttccggtagtgacaggacttcccgtcatcccctttcagtttcctccactctgtatcttcactccttcctgtgaagggaggagaatctacagatgaaacgggaatgaggggagatcttacagtttttaaccaattgataactagtgtgttttaaatgaaatgacagaatgagaggagaaaagtgaacacctgcatagtgagaggatagtgtaatgaaccgacttggctggtttgccggacatgataggcttgtccgtcggaccagctaagctggttcatgaaacatgccggccttttcatcaagacatgctgaccttttaagtaaaggtgctggcatttaccaaaaacataaggacattttaaaaaaacgaccggttcttttgaagtaaacgaccaaagcaacacatccggtaacattagtaacatgtgacctgtcacgttactgacgtatgagtctacacgtatgtatgtgtcgggctgtacatacggtagcgtatgcctatatatacgtatgtactgtgtatcaagttctaccgcaacttgtactaagatgcactatatcctgtaccaagattcgccataacttgtgccaagttccgctacctttgctgaaaatggtaaaggcaacttgcaggataacaagaatagtttttcaggagaaatcccggcaaaaaagtggaatcagtcctttcgacagcttcagccagaaaagcagaggagaattctgctcacttgaaagacgtgcagaagaaggctaagccgcattccttgatgcaggaagtgaccacctttctcacctcccactaccacttctgtttcaatgtactgaccgaggtaaccgaagtggcatgtctggaaaacgatgtgcccgacccccatctgcactatgctaaagttctacaaacacgtacccgaagaggagtattccgcctctgcttccgcttcgctatggtagaggatgatctgcagaaggtactgaccttttccgtcacccagttgttcgggcgtatgaaatccattcatccttcggtcataaggagcatgaccgcttacagtctgagccgcattctgcctctgttgggcgggtgcatactgtcaaagggaatgtatatagggtagtggaatgctagatacccttaattaccacatgggataggagaattagaagtcctttcttgaaagttcgtgaaaaagcgaactttattcgttaaattatgcggaaagttcacaataaagagattccttgatttaggaatatcccccgcacaattgccattaaataaaagactttttgttttgctgttattgaaagcaaagtggatatggactataatctctattctgtttccggtctgaaagcaacgtgcgcaaggtgagggataaggcatgaggttatgctgtcatcggtgtgtataaatcggatgaatggagataaaaagcaagacttattctaaaaataaatcaatatgaaaaaactgttattattatttttattcttgtgctcgttggaagtagcacaggcacaaccgggtatctcaactgcaataccttctgaaaaaccttcaaaataccagaaagatcagatcaagcgcaagtatggtatgttcattcattttggtatcaatacattccatgatgtggaatggtcagacggatcttttccggtggaaacttatgcccctgcggagattgacgcctgtcaatgggtgaagacagcgaaagatgccggtatgaagtatatcatcttggtggcaaaacatcatgagggcttttgtctttgggacagtaaatatactgattatgacgtggcaagttcgggaataaaacgaatgtgattgaagccgtagctagggaatgtaagagacaaggcatgaagctgggactgtattactcgttgtgggacaggaaagtcaatgcggatgttgacaatgtggagtcggacaggaagtacaatacatacatgttgaagcaattggacgaactgatggacatcacggaaaaatatactaaaatagtggagttctggtttgatggaagttgggtgaaacccggttatcgctggccggtagaaggcatatacagaaccatcaaaagccgtgagccgcaatgccagatcggaattaactggacgataggcgaggatgcggatccccataatccgaatgcgccggagaaatcatataaaattattccggaggaacagaaggaaggggatcctatccgttattttcccagtgacttccgcttgggcgatccgcttctgcccgcaagtctgataagagagcttgacttcaagaaaaaccggatggagctggtggccctgcacgctacaggtttcggaaggcccagccaggcggcatggacggaaatctttgcggatggccagtctctgcgaatagcccgttggccgaatgactctacggttatgattggaaaaatacaggaatcggggatggctaaggaagggaaagaggctcctttccctgtattcggatatcaggaagagcgcccttcgagttggaaatcggtagagaatatgtggataagcggatactttgcgcacggttatgccgatgacatgatttgtgtggaaagcatcgacacgatacataaaatgattcatacagggtagcatacggtatatggatttatgacaggtgcgccttggcgtcaatggtttgccttgaacctgctggaggaactggatgggccgggcgaatacgtgattgatgccgggagagggaagatgtatgtatatccgcttgccggaaagatggaaaattggagtgtttctttattggaagggcccttgctggctatagagcattgcaaagatgtgaaggtacaaggcatcactttcgagtatggcaggcatatcggtgtctatatggagaatacccatcgtgctttaattaagaattgcattatacgcaatatgggcggagtgggcgtatccatcggaaagggaacgttgaaggctggtaaccaaagagggcacgagtcgggaggcaatccagcttcgcgtgtcgtgggtgatttgatgggaacggtttatcagaacatcctgttcaaccgcgaaggaggaacggaaaacggagtcgtggattgtcatatttataatgtaggtgccggaggtatcagtctgggaggaggagacagagcctcattgacccctgccggaaactatgtggagaattgccggatacatgattataaccggattgagaaatcctatcgtcccggaatatggatggatggtgtgggtaaccgcatctctaaatgtgacatctatgatgcgcccagcatggctatcctgtttcatggaaataaccatgtgatagaactgtgtgacataacgaatgtgtgttctgaagtcgatgatcagggagctgtttattatagtcgtgatccttcggagcagggaaatgttatccgttattgttattttcatgaattgagtccgcgccatcgtgtaacggctacttatcatgatgacggagcttgcggagcggaagtttatggtaatatttatcacaaagcagggtctttgccggtactaatcggtgggggacataataatcattaccggcataatatatttatagattctcctgttgccattcatatagatgcgcgtatgcagggctggggcaaattcatgatagagaaaggtgcgataattgatcagcgtttgcaaacagtcaattataaaaatcctccttacagtacggcctatcctttgctcgctgcatattgggacaatgacacttcttatccaaaaggcaatgtgatagaaggaaacttgttttataagataggaaatgtggtgcgcggacagagcgaatggctggaattgtataacaattgggctaccggttcggatccagggtttgtggatgctgctgatccgttgaagggatttaaggatgatgcgctcatttatcaacggatcaatggattcccccggcttccatttgagaaaatcggatgcgatttatccaaatgaaagagtgtgatgataaactttcaaaccttataaaaaaatattttatttctttaggaacattcctttcccgattgccatataaatagagagtacctttgtttggcgacaaaggatcaacttatttttaaactttaagtcattaccattaatggaacatcaaaacaaattgatttatggcggactattggcgatatccgctctgaccggctgtatggagccggtaacagaaaaacctttgaatattgtctatattatgacggacgatcatacagctcaaatgatgagttgctatgacaaacgttatatggatacacccaatttggatcggatagccaatgagggggtacgttttacaaacagttttgtcgcaaactctctgagtggccctagtcgtgcttgtatgcttacgggcaaacatagttgtgagaataaattttatgataactctacctgcgtatttgattcatcgcagcaaacttttccgaaactattgcagaaagcgggttatcagactgcattaattgggaaatggcatttggaaagtttgccgacaggctttacttattgggaaatagttcccggacaaggtgattattataatccggatttcatcacacaaaccaatgataccattcagagacatgggtacatcactaatctgattaccgatgatgccatagactggatggaaaataagcgcgataaagaaaaacctttctgtctgcttattcatcataaggctattcatcgtaattggatggcggatacctgtaatctggccttatacgaagataaagaatttactttacccgataatttctttgacgattatgagggtcgttccgcagctgcggctcaggagatgagtattgtgaaagatatggatatgatatatgatctgaaaatgctccgccctgacaaggaatcccgtttgaaatcattgtatgaaagctttatcggacgtatggacgaaagacagcgtgccgcgtgggatgcattctacggtcctgtgatcgatgatttttatcagaagaatccgcaaggaaaggatttggctaattggaaattccaacgttatatgcgcgactatatgaaaacagtcaaatcactggatgataatgtaggacgtgtgctcaattatctggaagaaaacgggttgctggataatacattagtcgtctatacatcagaccaaggattttatatgggagagcacggatggtttgacaagcgtttcatgtatgaggaatccatgcgtactccgttgataatgcgtttgccgaaaggatttgacaggaaaggtgatataactgaaatggtacagaatatagactatgcacctactttcctggaactggcaggtgtaaaagtacccgaagatattcaaggcgagtctttgttacctttattgaaaggaaagaagcctgcgggctggcgtaaatcattatattatcatttttatgaatatcctgccgaacacatggtgaaacgtcactatggagtacgtacagaccgttataaattgattcacttctacaatgacattgatgcatgggaactttatgacttggaaaaagatcctgccgagatgcacaatgtaatcaatgatcctgcttatagtgaagtattggctgatatgcaggtggagttgaagaaattgcaaatccaatataacgatacagactttgtaaaataaagacaatgaataagacattcttattaagtgtcatactgggagttttatgctttccggtaaaggcacagaccttgcctgtacctacaccggtacaattgcaatggcagcagatggaaacaacggcatttgttcattttagcgtgaatacttatacggatatggagtggggatatggcaacgagtcccctgccatctttaatccgactaagttagactgtcgtcaatggatacggacttgtaaagaagcgggactgaaaggagtgatccttactgccaagcatcatgacgggttttgtttgtggccgtcggcttatacggaatacagtgtgaagaattctccatggaagaacggaaaaggcgatttggtacgcgaatttgtgaatgcttgccatgagtatgggatgaaagtgggattatacctttctccttgggattgtaaccatcctgattatggaaaaccggaatacatcacttacttccgcaatcagttgcgcgaattgctgactaattatggggaattgtatgagttttggtttgacggcgccaacgggggacgtggttattatagtacggattccttacatacccgaaagattaccgcagattactatccatgggaatctttgacagaaatggtatatgaattgcaacccaactgtgtggtgcatggtggaagtgcacagaacatccgctgggtaggcaatgaggaagggtacgctttggaagagcattggagtacagtgagaaagccggaattctatgataaggggataccaaatggtaaacagtggatgcgcggacatgcggatggtacgttatggattccttcagaaactgatgtatccatccgtcccggttggtattatcatgcttcggaagaccataaactgaaatcattgtcccaattgactgacatttattatgagagtgtgggacgtaacagtttgttattgcttaatctgacccccaatcaagaaggattgattcctgagcaggattccttgcgtttggtagaatggtatcggcgatatacctctgaactaaagaagaatctcgttaatcagaaaatgaaagtaacgggcaagaaccgtaagaagttgaaatatactttggatggtaatcgaggtacatattgggaagctgatacaaaaacgcctgtactggaagtggattttggaaaagaattaactttcaaccgtttgttattgcaagagtttattgagaaagggcaaagagtaaagcagtttgttgtagaatattttgataatgggaattggcagaaattggatgaacagactactatcggttataaacggattctgcgttttcccgaagtcactgcttcacgtctgcgaatacggataacagatgcatgggaggcaccttgtctggcagaaatacaggtctttaaagcggaaactccgctggatgctcctgtgattaccagaaataagaatggagaggtgaagttggtatgcagcaataaggatgcttctatctattatactacagatggtaaagagccacaacctggtgtaagccctcgttaccagtcgcctgttccggcagacggtgatcggattattaaagcgatagcagtggacggaaagaaaaagtcaacaactgctacgcgtacttttaccggcagtaaggctcattggagtaccttgcctgataaagccggtatgcttgtttttgatgaaaaccagcatacaacttgggttggaaaagatgtgcttgaggttgacttgcaatcagcaaaggaaatgaccggtataagctatctgcctgatcaggcacgatgggctaatggaattgttgtaaaatatatgattgagatctctttggatggaatccgatgggaagaggcagcccgtggagagtttgccaatattcagaacaatcctgtagaacagcaggtaattttccggcagacgcataaaggacgctacatccgtttccatgccttgtcaacagtggatggtcaaaagagcatgggggtagcggaattagacattttattttctaaaaactgataagtaatgaaaaagtataactatgtaggatggtgtatggccggtagccttggtttgtccgctatgtccggacaggctgcacaaccggaaaaaaagcaaccgcatatcatcttgataatgactgaccaacaacgttgggatgcattgggatgtgcgggaaatgaagctgtgatttctccaaatgtggatcgcttggcagccgatgggcatttgttttgtaatgcctatacggctgctccaagcagtactccggcacgtgcgggtatgctgacgggtatgtctccctggcatcatggcttgttaggatatggacaggtggcggagcattatccttatgaaatgccgcagatgttgaaagacttgggctatcatacattgggaataggaaagatgcattggcatccgcagaatgtgttgcatggattcgaagtgactattctggatgaaagcggacgtgtggagtctccttattttatgagtgattatcgtaaatggttcaatacgcaggctttcggcctgaatcccgacagtacaggggtggagtggaatgcccacggagcgaaagcgtatgctttgcccgagcgcttgcatcctaccgtatggacaggagacagggcagtggaggcgataaaaggttattcttctgaacggcctttgtttttgaaagtgtcttttgcccgtccgcatagtccgtatgatcctccccggcgaatagtggataagtatgagggcagaaaaatacccgctcccgttgtaggtgactggtgtaaagatctggcaatagatactcatcccgaaaaaaatcctgaagcggctgtaggaaactatggagtggaatatgcccggaattcccgtaagtattattacgcttcggttacttttattgatgagcaggtagggcgcattgtggatgaactgaaaaagaaaggaatgtatgacaatgcgctgatatgctttgttgccgatcatggcgatatgttgggagatcatcatttgtggcgtaaaacgtatgcttatgaaggttcggcagctattccttttattataaagttacccgaaaacatgaaaagtagcctgaaacccggtgaaaaaatagaggctccggtggagttacgcgacttgcttcctacttttctggcattgaacggctgccggattccggaagaaatagacggtctgtctttacttcctttattggaaaaagggaaagctccctggcgtgaatatattgatatagaacattccaccgcttattgggcggataattattggtgtgctttgacggatgggaaaataaagtatatctggtttttccgtacaggtgaggaacaattgttcgatttgtcaaaagacccatacgaattgcatgatttgtcaaaagccaaggcttccggaaagacattggaaaagatgcggaaagcgatggccggacatttgcaggaaagaggggaagagtgggtgaaagacggcaagttggtcatccgcaataaaaatcttttatatagtccgaattatccaacaaataaaaaataaaccatgaagaaatttattctaaccttttcatttttagtgttgttattcggcactttgcaggcatcggtttccattatcccgatgccgcaaaagtgcatcgaaaaaagaggcaattttacggtaaatgacaaaactgtaattacgttgtcagtagataacgaggagatgcgcaatgccgtatctttctggaatgatttgtttgatacggctgccgggttctcattggaggtctcttccactccccgttcttccaatgtgattcgttgccggcttaacacagctcttcccaatgaggaatcatacaagctgacagtctcttcatcttctatccatatagatgccaaaacccctaaaggcattttctatgcttttcaaactttgcgccaattattaccttctgccattgaaagtgacaagcaggtggcggaaaaaataaaatggaacatcccttgtgtggtgatagaagattcgcctgcattctcttatcgcggagtgatgcttgatgtttcccgccacttcattcctaaggaagatgtaaagcgtcacatcgacttgcttgcttttcataaattgaacatccttcattggcatctgactgatgaccagggatggcgtatcgaaatcaagaaatatcccaaactgactaccgtcggaggttaccgtaagaaaacgattgtgggatatatgtgggacaatcctactgaatggaataccaaacgctatggtggattttatacacaggaagatatcaaagaagtggtggcgtatgccaagaagcgttttgtggaaattattcctgagatagaaatgccgggacatagcgtggcggcactgactgcttatcctgaatattcctgtaccggaggaccttttgaggtggaaggccgttggggtgttttcaatgacatttattgtactaaggaatctacttttacctttatgcaggatattctggatgaggtggtggaacttttcccctccagctatatccatttaggtggggatgaggcccctcgtatccgttggaaaaattgtgtacactgtcaggaacggatgaagcaggaacatttgacaaaagaggctgaattacagacttatttcatcaatcgaattgagaactatctgaataccaaaggaaagaaaattatcggttgggatgaaatcttggaaggaggtattctgcaacgtgctaccgtgatgtcatggcggggagagaaagggggaattcatgccgcgaaagccggatatgatgtcattatgtctcctaatatttatatgtatttcaattgtcttcagtctaaagtcaatgaaaagaaaattggaaatcccaatcgggtgattactttggaaaaagtttataattatcatccggttcccgaagtcctgagtgcggatgaggccaaacatattaaaggagtacaggccaatttgtggacggagtatatgtctgcgctcgatgagatggagtatatgctttatccgcgtgtggcagctttgtccgaggtggcgtggagcaaaaaggaaaataaggattatggaagattctgtacccgtttggagagcatccgacggcattatgatgtgttaggagtaaattattgtaagaaaatcagtaatgaatgatctgtttgtgatgaatatgaaaagaaaaatactatttgtttgtctcgccttccttgctttgttgcaagggtgggcgcaacatacctggcaggccggtccggtcaatttagaacttattcaacggggcaattcggagttcccttccggtttctccgctttctcattgaaaaatcgttttatttggtgtggttcggctattcaggcagaggaagatggaaagtattatttattttattccgctatgaaatcaggaccgaagtaccctagatttatagatgcttggttgctaggttcgatgattggagtagctgtatcatactctccttatgggggatataaggatataggtattgtctataacaaagatggatatcgtccggacagctgttcatgggatgcacagtcggttcacaatccgcatatcaaaagatataacggaaaatactatttgtattattgtgctacggtggatccgggtggaaatgctcatgtaaagggaaaactaagcagaagagacaggctccagcaaaatcaaaagttgggggtattgtgctttaattccataaaagaattactggaaggtaaattttcatgtaatgagcaacctttacttgctccacgtacacgggtgaagcctgataatgtactggaaccctcacctgaaggaaccgtaaccaagcctgataatctcattttagtcaatccggcagtggtatatcatcctttgaaaaagaaatattatctttactttaaagggaatgtctatgatcctacttggcgtggtgtgcatggagtggccatagccgatgcccccgaaggcccttttattgtgcaggatgactatgtatttgagtttgaaacaggggataaccagaaattgaatgcggaagacccgtttgtatggtatcaccggaaagacaattgtttctatgctgtttttaaagatttcacgggaggatttacaaaaggtaagccgggattggccatcatgtatgctgaagatggtatacattggaaacttcctgaacattctttgtttatgaataaagaaataattctaaagaatggagagcggctagaggtagatcggttggaacgtcctcagctgttattggatgaaaatgatgaaccgattgtgctttattcagcttgttccattactccattgaatatgaaacaggatgggagctcgttcaatatccagattccaattcttcgaaataagtaagaaggatatggtataaaagcagtccggcatatggatgaatatctgtgccggactgcttttttatattgtaacggaagaaatggaacttttgataaacctttcggacacacgcttgtttatgataagttcatgtttttgacatgagtaacataaatctattgcaaagactaatgaaagaaaatagacctccttttttgccattttcgcaatcttgctttaactattttaaagtaaggggctttattggattttcggaactgtgtatcagaacatttcatcctgattcacaaagatatatatgtccctatttgtccgatgcgcatattttggagttccggcttccggcggcgactatagagtgtgttatcaataaacaaggtatatgcattgaggctatcatgtttaccgattagtaagtggttttggtttaatcttcctttttcatttcttaataattaagccaaagtttgaatgaagaaagtttttcttcactgatggtgatttggactttgtaaggaggaaggacactgattactatcttgccattaaaataaggttcggcacggtctatggaagcaatgctgataataatctaacggttggcgcgaaagaactgttcggaggctaactgctccatttgtttattcagagacaggttgattatgtgttcttgtcctttttgggtgacggcaaaggttattttgttttcagaatagaaataggcaatgtccgttacttgaagagaccagaaaaggccggctccataaaaaatcatcttctataatgattgcgtttagtttattcatatgctaaaggtacttttatggtaaacaaattgtttgctttggtgacttatcattgctttcggcagcacaggaagaaagtagtgcggcaaggcttaataatggcatggaatgtacgttaatcttcatgttttgtcttttaagtttgcgacaaaagtaaagatggaagggagagcagctgggaaagaaaatgctgaagccggaaaaagaagatcgaaaaaagggaaaatgcatcctgaataattttatcaatgaagtaaaaaaagatttattcaggcaactttttatacagaatagctgtttttatcagtaagatgattaattataaactctaaaaaacaaagcgtatgtattttatttggtacattattatcggaattattgctggttttgttgccggtaagttgatgaggggaggggggttcggtctctttattaatttattggttggtattgttggcggtgttctgggcggctgggtattcagtttgtttggtattgcagcaacaggtattatgggcagtcttgtaacctctattgtgggagctatatttttgttgtggattgtttctttgctcaagaggtctgatatttcctgaattggtagtaaaaaggaaccgtcctgacgacacgcttgtcggggacggttcctaaaccaaacaaatcaaaaaatataagtatattaactaattgcttccacctcctaaagcgcggtaaagcatgatatgcagtttacaagattccacattcagagcgatacgttccaattcacaatccaggaaacgttcatcggccgacagtacatccagatagcctgcgaatcctactttaaacatttcatttgcattataaatagatcgatgatggatacggctttcttcttctttcaactctttgcgctggtgcatttgggatgatgcagtaatgaggtttaatacttcttcataggcttttaataccgtttcgtgatatcctaacaaagcgatgcgttgctggcttttcgcatcattccataatgcacgtatagtattttgtttgaatataggtgctgtgatacctgcgccgagattgtaaaccagggatgcaggagctgtgaaccatttatccagatcaaatgcgttaaaacctccgtttcctccaatcacgatggatgggaagaaagcttttcgtgctgcagatacgtcggatttactagctaataattccagttcggcagcctttatatccgggcgatattgcaaaagttgtgacgggatccctgcatctgtgggaaactcataactacatgctgtttcaaatgacactcgtttcactttgaaaggcagtcgtcctaataaggtggcgatggcacgttccttttcacttatttgctgttcgtttgcaagcagcatttcttccaatttaaggcgtcgtgaccggaattggtctacagaaagtcgggttacttcaccttctttcatcagttcattggttaaattataagcatctctggctgttaggatggcttcgcgtagcacataccgctgtttgtccagtcctattaattcaaaatagtgtgtacctacttctgatatcaataaagtacgtgccagacgcatagcttctacagactgcatccagcgggatacggccgatcgttttttatcggttagcttaccccatatgtcagcttcccattgaaaattaagtcctagattgaaattccgatagggatctggaatatgtttgtctttttctaaatcgggagtgttggtggtgctgttaccaactccgtccatagtgtactcgccaaaacgttgtactccaccatcaatgcctaatgaaagatcgggcagcagcgctccttttcctactcgaacttgtgaacgggcaacggatatccgttctatagtttgaaggaatgtgtgattattatttaacgcttcggctatataactttgcaataacgtatctggaaaaaatgttttccatgacaaggaagagatagtggtgctgtccgtttccctatccatatagaactcgggtaactctatcttttctgtcggagtaagggaaggggctttgcaacttaccataatcagacagaaagcccccattattaaacctgttttgtttatattgttatttttcatcttcttcatcatagctgactttattacggttaagatgtgcagaccaactctcgaaaataaggtaaagtccaggtacaaggaagattcctacaaatgtaccgataaacatacctccggcggcggctgttccgatggaacggttgcccaaagcaccggctccgcttgccattaccaacggaatgagtccgcatataaatgcaaaggaggtcatcaggatgggacgcagacggcttacggaacctctaacggcagcatcaaaaatgctcattccctgcttgcggtactgattggccatttccacaataagaatggcatttttacctagcagaccaatcagcatcactaaagctacttgggcataaatattattctccaagcctgccagttgcaggaaaaaataagaaccgaagatacctgccggcaatgaaagtatgacggggaaaggcagtaataaactctcgtattgtgctgccagcaacaaataaacaaatagcaggcagataccgaaaataaaaacagtttgtccacccgagtctttttcttcacgagtaacccctgaccattctatatcataaccgcgaggtaatgttcctttggcaatttgttccacagcttcgataacctctcctgaactgactccttcggcaggttcacctgtaatcagggccgaggtaaacatattgtagcgtgtaatctggttaggaccgaatatacggtccatcgtcataaagttagagtagggtaccatatttccgtccttgttcttggcatagaacttatacagatcttcaggattcatacgatactctggagaagcctgtaacatcaccttatacatttgtccgaaacgaataaagttggatgagtagaaactgccgatataggattggagtgtttccatggattcatttaaatttactcctaatttagctgctttagcaatatccactttcagcagatattgtggaaaattaggattgaatcctgaggttgctcccacaatgcgcggatcttcattcagcttttctactaatgtattggcaacatcggcgaattctgcaaagctgcctgctgttttatcttgtaaacgaagttcgaagccgctggcattaccgaatcccggaactgtaggaggcaggaagaactgaatatccgcatctttgatatgtgaggtacggtctttgtatatctctataagttcggctgctgtttgatcgcgttcactccacggggtgagattaatcatacccataccgaaattggcgccttccgtttcagtcatcaaactataacctgctaatgtggagatgctttcaatttctttgaaaggaagcagtgcagcttgtacagcgttcaaggctttttcgctacgttccaatgttgctcccggaggcgcatctacattaacataaatcataccttggtcttcattgggaataaagcctgaaggaagtacttgactcatgccgaaagtggcaaggaagaaaataatcagtgtggcataagtgattattttccggctcaaatacttgtgtaatccgatattgtatttcttttcaaagcggtcgtaccgacggttgaagaaaataaagaaacgacgtagccatcctgcttttttcttcttttttccatcagcgggtttcagtaacaaagcacatagggcaggcgagagagtcaatgcgtttactcctgagataacaatggctaccgccagtgtcaatgagaattgccgatagaaaatacctactgttccctgcatgaagcccaccggaacaaagactgccgacatgactagcgtgatggcgataatggctccaccgatttcattaatagctgctacagatgctttataaggagagagtttctcatgatgcatctttacatggacagcctccacgacgactattgcgttgtctactacaatacctattgcaagcacaagggcgaataaggtcaacatatttatggaaaagcccagcatctccataaagaaaaatgtaccgaccaatgaaactggtacggcgatagcaggaattaaggtggaacggaagtcttgtaaaaatatatataccacaataaataccagtatgaatgcttcgagcagtgtcttcagcactgattgtatggaggcgtcaagaaagcgtgatacgtcataggagatattgtaatccatgccaggcgcaaaactgctttccttgatttctgccatttttgttttaatattttggatgacttcccttgcattggaaccggggcgttgtttgatcataatagatgccgatggtcttccgtcggtcatagaagtcatgttataatcttcagaatcgaattcgatagtggcaacgtctttcagacgtagcagtgaaccatcgggaagagctttcaatacgatctctccatattcttctgctgtgctgaactttccggtatattgtagtacatattgcagttgttggggtaatttgtctgaactgatacctgtcttgccgggtgctgcttctatattttgattacggatggcttcagttacatcttgaggtaccatgttgtaggcggccagccggttaggattcaaccatacacgcatggcataatcacggctacccatgatttctaccaagcctacaccgtcaatacgttttaattcgcgcaaaatattgatatcggcaaagttataaacaaacttttcggtatgtgcactgtccgtactcatgatgttcaagtacatcaacatactgtttacttctttttctgtaataactccggcacggattacctcttcaggcaattcgtctagcacggtagtcacacggttctgtacatttacggcagctacgtctggatcggttcccactttaaaatagatagtagtgagggacataccgtcgttggtacaaacagtggtcatgtaggtcatgccgggtactccgttgatggcacgctctaacggggtggcgactgttttagacatcacatcggcactagccccagtgtatcgggcggttaccgttacagatgggggtacgatatcgggaaattgagtgatgggcagtgtcaagatagacagcacgcccaagcagacgataatgacggagattactcctgaaagtatcggtctttttataaatagcttaaacataaactgtccgttttattttacgataggttgttttaattcaacttcttttctgattgcttccatatcaatggtatcggtcttgatggtaatgccgtctttcatcatttgcactccctcgtatacgatggcagtattaggagtgaaatcttgtgtcacgtagtaattattatagcgttccagcggttgaaaactgcgtacttttactacactggtactatcaacggtatacacataggtgaaatcttgaatttcgaatgttgatttctggggaactagacagatgttgtccatttgagtcatcatacgcacttttccggtcactccatgtttcagcagtccgtccgggttcggaaaacgaacacggaaggcgatggagccggttcctcgttcaaaatcaccttctactgtttccaacgtgcctttgtgggagtagatggaaccgtctggcaaaatcagttccacattattttcttcgtgttgtttttgtccgctaagttgttggcgcttgtattccagatactcgctttcattcactttatagtaagcaaagatctcggaaatatcacttacggtagtcagtaagctttgcggatttaccagacttcccgtcttatagggaatacggtctatgtagccgtcaaaaggggcagtgatagtggtgtaagaataatccatctgtgaacgttgcatttgtgcttttgcctgttccactttcatttgggccacttctttttctttattggcttggtcgagtcggatttttgataagatttgtttgtcaaccagccggcctattctctcggcttcataatttgccatttcatattgtgcctgtgcttgtttgtaattggcttgcgcctcttttaccgtttcgctatattggtcggaactaagttggaataggggctgtccttttttgactttttgtccttcgtctacatatattttttgaacaaaaccttccactttgggcttaatttctacaaactgtatagcttgcacatcagctacatacgagcgtggaaactcaatggttgtggggtgaagaatggtgatgggaatgaattctttgtgatgttcctgcttgttgtccgattgaccacaagagcatagcaatcctgtacatgtacacaggaccgcaattttctgaaaattactcttcatgaaattacgaatacaatttaaaaagattaataattgagtttgagtaaataaaagattcggcttgcattcagatttctcagaatacaagaccaatatgtatgaagatactttaatgtgacatattaaatgcggtatacacaaaagataatgtgatgatgtaccacttttcccagattttcactaacaggtgtataactctgtaccggaacttggggaatagcaaaaagattgataatcatgtcaatagtacagggtaaaaaacgactgttcggtagttgtgcacgtcccgacatgaaataataagtctcttctcctccgctttcttcattgttgtcagaaggcagggtgggctgttccatcgtttctaccatagccagattggcatcaattagtggagcgcatacatcaaattgtacgagtaataacataattacacatactattcttaccacatatttcttgataccgttgaacatgaaaaatattttgtttattaattcgtttgcaaatttaatataattgaacactgttttcaaaccaatcatccaaaattagtgagttttaatatatcctttctcttttttggaactactatcctttatactgactgaaatctgttatttttgtactcagtattttaaataatcagataatattacttatgttacaacccgaattgaaatttcgtcgagataaaatacgctatttgatggcccaacaaggtattgatgcagccctgatagcttgtaatgtaaatttgctttatacgtatggtgagatagtgaacggctatctttttttaccgcttcattcaccggcgcttctctttgtgaaacgtcctaataatattgtgggagaatttgtattccctatccgtaaacccgagcagatggtggacttgttaaaagaaaatggtatacctgtagcttcaaagacaatgttggaaggtggggaactgccttatgcggactatatgcgtcttgcatctctttttcctggatcggaggtagtggatggaactgctattattcgtgaagcgcgtagcgtaaagactccgttggagattgaactttttcgtcggtcggctgctttacatgctcgagcatatagtaagattcccgatgtataccatccggggatgactgatcgtgaactatctgttgaggtggaacgcctgatgcgactggaaggttgtctgggaatattcagagtatttggtcagagtatggagatatttatgggaagtgtgttggccggagataatgcagctactccttcgccttatgattttgccttaggtggtaagggattggacccgtctttgcccggaggaatgaatggaactttgttgaaagaggggtatagtgtaatggtggatatagggggaaacttttacggatatatgtgtgatatgagtcgtgtgttctccattggaaaattaaatgatgaggcttatgcagctcatcaagtttgtcttgaagtacaggataaggttgcttctatgacagcgcctggtgtggtatgcgaggatctttataatgcggccattgagatcgtgacgaaagctggatttgccgatcgttttatgggggtgtcccagcaggcacgttttatagggcacggcatcgggttggagatcaatgaggcaccagtgttggctccgcgtattcggagggagttggaggaaggaatggtgtttgcccttgaacctaaaatcgtattgccgggagtaggaccggtcggcattgaaaattcttgggtagttacagaaaacggggtcggcaaactgaccatttgtaatgaggagattatagagctttgattctttggatgcaaatattgaaccggaagaaattaaaagaagcgaaaagctttatggttcttgccctagtgtcattttgggcaaagtgaagagcctgaatataaaaaggatcccgaaactaaaagtttcgggatcttacatggtttgaaatacatttcttattcccactcaatggtagcatttggtttgggcgacaggtcatagcatacgcggttcacattctttacttcttttagaatacggtcggtaattttcatcagaatggaccagtctatcggttcgatagtagctgtcatagcatctacggtgttgacagctcggataataacaggccagtcaaatgaacgggcattgtcacgcacgcctactgatttgaaattgggtactacggtgaaatattgccatactttcttgtccaagcctgccagttggaattcttcacgcaagatggcgtccgattcgcgaacagtttccaggcggtcacgagtgatagcccccaaacagcgcactcccaaaccaggaccggggaacggctgacggtagaccatatcgtatggtaaaccaagttccactccgcaggcacggacttcgtctttgaacaactggcgtaaaggttctactaattcaaactgtaaatcctcgggtaagccacctacattgtgatgggattttaccattttggctgttttagtaccactttctacgatatcaggataaattgtaccttgtcccaaaaagtcgattccatttagcttacgggcttcttcttcgaacacacgaataaattcaccaccgataatcttgcgtttctgctccggatcagctacattttctagtttactcaggaatcggtctgtagcatccacgtaaattaaattagcgttcaactgatttttaaaaacttcaatcactgcttccgattcacctttgcgcattaatccatggttcacatgtacacataccaaattattgccgatggcttttagcaacagggctgctactacagaactgtccacacctccggaaagcgccaataaaactttcttatcgcctacttggcggcggatcaattcaatttggtcattgacaaagtttgtcatattccagttggcctctgccttgcaagtatcaaaaacaaacgattgcactgcattctttattgcttccacatcatccgtcagttgggggagcttcacttcgcagcatgctttgtcatgaccggcagccattacgggaactcctgctttgtaaatctcgggaagcacgtcaatatccactccgtcaatcacatggtttgggccaccattgataatgacaccctttacattgggcaatgctttcagctcggcggctgtgatatcgtgcgggtaaatttcactatatacacccaaagcacgaatggctctggcaagcacggtgttttcggtacttcccaaatccaagataacaatcatatcttgtttcattccgttatgttgtttttaagttattagttggttgtctattattcccactcaattgtggcaggcggtttggacgagatgtcatagcatacgcggtttacgccttttaccttattgatgatgtcgtttgaaaccttagccataaattcataaggaagatgagcccagtcggcggtcatggcatccgtactagttacggcacgcagggcaacggcacgttcgtatgtacgttcgtctcccattactcccacactttgtacgggtagcaagattacgcctgcctgccatacttgatggtaaagggatgtttcgtttccatccgaatctttcactttccagtctctcaatccttggatatagatatcatcggcgtcttgcagaatacgtactttctcgggagtgatatcacctaaaatacgtaccgcaagtcctggtccggggaatggatggcgtgtaatcagatgttccggcatacctagttcacgacctacgtggcgtacttcatccttgaatagcagacgcagaggctcgcatagtttcaaattcattttttcaggtagtccacctacgttgtgatgacttttgattacagtgccggtgatgcttaatgactcgatacagtcaggataaatggtgccttgtgccagccatttcacatctttaatcttatgagcttcttcatcgaatacgtcaataaaacctttgccgataatcttacgctttttttcaggttcttccacacctgccagttcgctgaagaatttttggctggcatctactccgattacattcagtccgagacattcataatcatgaagtacatttttgaattcgttcttacgcagcatgccgtgatctacaaaaatgcaggtaagattcttgcctatcgctttatttagtaatacggctgctacggatgagtctactccgccactcagccccaatactactttgtcatttcccagttgcgctttcagttcggctacagtcgtttcaatgaaggaggcagcactccagtcctgtttccctccgcaaatgttgactacaaaatttttcaggagctgggttccgtcttcgctgtggaacacttccgggtggaactgtactccccatactttctcttcctttatttgataagcagcgatggctactttatctgttgaagcgataattttgaaattctccggaatggcggtgatggtatctccgtggctcatccatacttgtgagtgctcacgaacgttcctcaatagtgggttttcttggtcgaaagtggaaaggtgcgcacgtccgtattcacgtgtgccggccggttctacttttccaccgttcgtataagacatgaactgtgcaccatagcagatacccaaaataggatactttccgcgaatgtcactcaaatcgactttaaaggcgctttcatcataaacagagaaggggcttcccgaaaggataacgccgattacggacggatcattgtgtggaaatttgttgtaaggcacaatctcgcaataagtattcagttcgcgaacgcgacgggctatgagctgtgtggtttgtgaaccgaagtcgagaataatgatcttttcttgcatatattattaagatatgtaaatgatttcgtgccgcaaagatactcagaaaaaataaaaatccgtcatgctgttgaggctttttataattgaattggaaaaactttgttcttcctgcttccttgtgggaaaatatgcaaaaaaagattggaaagtttaggaaatgtcggctagtatgtagatcacgggctgtccgacaagcgcttgaggggcagtccgtttttttgtgaataatattttattttttgtcagtttgttctttcaacaaatcacggatttctgtaagtaatacctcctccttgctgggggcaggcggggcagcgggagcagggacttcttctttcttgcgattcagtttggcaagtaatcttataaataagaatatagaaaaagcaatgatgataaagtcgaaagtggcttgtaggaagttgccataattcaacgttacggcagctttttcaactccatccactacttcggccggctttaattgtagtttcaaatctgtaaagttcacgccacctaccagcaatccgatgggaggcatgatgacatcggccacaatggaagatactattttaccgaaggctccaccgatgatgacaccgactgccatgtcaatgacgtttccgcgcattgcgaacgccttaaaatcttgcaagaagctactttttcccatttttttttattttaatatgaatttatgtgcgaatataaaaacaaattcttatttttgcaccgcgtttaggaaataaatactaaacgtttaacaacattccaacgtagagtgtttaaaagctatattataaaacctttaaaatttaaacaaaatgattaaagtaggtattaacggatttggtcgtatcggccgttttgtattccgtgcagctcagaaaagaaacgatattcagatcgtaggtatcaatgacctttgcccggttgattacttagcatatatgttgaagtatgacactatgcacggacaatttgacggtactatcgaagctgacgtagaaaatagcaaattgatcgtgaacggcaatgcaatccgcgtaacagctgaaagaaatccggctgacttgaagtgggatgcaatcggtgctgaatacgtagttgaatctactggtttgttcttgactaaagaaaaagctcaggctcatatcgaagctggtgctaaatatgtagttatgtcagctccttctaaagatgatactccgatgttcgtttgcggtgtaaacgaaaagacttatgttaaaggtactcagttcgtttctaatgcttcttgtactactaactgtttggctcctatcgctaaggtattgaatgacaaatggggtatcactgacggtttgatgactacagttcactctacaacagctactcagaaaacagttgacggtccttctatgaaagactggagaggtggtcgtgctgcttctggcaacattatcccttcatctactggtgctgctaaagctgtaggtaaagttattcctgaattgaacggtaaattgactggtatgtcaatgcgtgttccgactttggatgtttctgtagttgacttgacagttaacttggctaaaccggctacatacgctgaaatctgtgcagctatgaaagaagcttctgaaggtgaattggctggtgttttgggttacactgaagatgcagttgtttcttctgacttcttgggtgacactcgtacttctattttcgacgctaaagctggtatcgctttgactgatacttttgttaaggtggtttcttggtatgacaacgaaatcggttactctaacaaagtattggatttgattgctcacatggcttctgtaaactgctaatcagttaaaaaccatatagtgaaagccgtctgaagtaattcaggcggctttttttatgtagttttgcgtggtaagttgcacattttcgttatctttgtgcgactgttacaaaaacttaggatggaaaagtacgatttgataacgatattaggacctaccgcttcaggaaagactcctttggcagcggctttagcttacaagttggataccgaaattatcagtggagatagccggcaggtatatcgccggatggatttaggtacgggaaaagatttggaagactatatcgtgaatggacagcaaattccttactatctgatagacattgtagaccccggatacaaatataatgtatttgaatttcaacgtgattttttgaatgcctatgaccaagtgagatggaaggaaaaaattcctatattatgcggaggtacggggatgtatcttgaatccgtgctgaaaggatataggctgcttcctgttccagagaatcctaaacttagggactcattagcgggtaaatcattagcggaactcacccggttgttgtcaacttacaagaaacttcataactctacggacgtagatactgtaaaacgagctatccgggccattgaaatagaagagtattacaagcaccaatcagcggaatgccgtgagtttccgcaaattcatagtttgatcattggagtggatatagcccgtgagttacgtcgtgaaaaaatatcccaccgtttgaagcagcgtttggatgaagggatggtaaacgaagtaagggctttgttggatagtggtatttcttccgaggatttgatttattacggattggaatataagtatttgactttatatgttttgggtgaactttctttcaatgaaatgtttcatcaattggaaatagctatccatcaatttgccaagcggcagatgacctggttccggggcatggaacggcgaggggtcactatacattggctggatgcttgcctgcctatggaagataaggtggaaaaaatcattaatttgttacacactaaaaactaaatgttatggctgtagaaccaaacagatgggggattatttataatccgaaagccggaagccgtaagactcagaagcgttggaatgagatacgtagctatatggaaaaccgtaaggtggtttttgactacgtacagtccgaaggttttgggtcggtggaacgactcgcccgtaccttggctaataatggttatcgaactattgtgattgtaggtggagacggggcgatcaatgatgctattaatggtattatgacttctatggtggaggataagacaaatatcgctttcggaatcattcctaatggcattggtaatgattttgccaaatattgggggttggatgaggataattataaagcggcggtagattggattataaatcgtcgtctgaggaaaattgatgtggggcgttgtaattattttgatggagagaaacatacttcccgctatttcctgaatgccatatatataggtttaggtgcgcgtattgtacagatctcagatggtacccgccgtttttggggaatacgtgagttgtcttttgtcgcttccatgttcctgttgctgtttgaacgtaaattgtaccgcacgcatctttgtatcaacggcgaacatattcgtggacgtatcatgacggtatgtgtgggaagtgcccgtggatacggtttgacacctagtgcagttccttataatggctggttggatgtgtcggtcatttatcgtccggagttaattcaacttttctcgggtatgtggatgctgttacagggacgtattctaaatcataaaatggtgaaaccctatcgtacacggaaagtaaaagtactacgtgcgcagaatgcttctgtcagtttggacgggcgtattttagaccgccatttccctttggaaattacgatccagcctgaagctataactttgattatccctaattaaaaaatatagatatccatttcttgttttaagagtaaaagcagagtagatatctcaacgaatagacgtaagataatgacaatttcagatttaagaaagacagataatttttttttattggctggtccttgtgtgatcgaaggagaggaaatggctctccgaatagcagatcgtattgtgaaaataacagataagctgggtattccctatgtgtttaaagggtcttatcgtaaggctaaccgttcccgtttggattcgtttacaggaataggtgatgaaaaggctttgaaagtacttcgtaaaatacgggaaacttttgatattcctatagtaaccgatattcatagtgctggagaagctgctatggccgctgagtatgtggatgtgttgcagattcctgcctttctttgtcgccagactgatttgctggtggcggcagcccataccggaaagattgtcaacatcaagaaaggacaatttttatcacctggtgccatgcgttttgctgctgacaaagtggtggaggcgggtaatgatcaggttatgctgactgaacgaggaacgactttcgggtatcaggatctgattgtagattatcggggtattccggaaatgcagactttaggttttcctgtgattctggatgtgacacattctctgcaacagcctaatcaaactgctggtgtgacaggtggtatgccgcagcttattgaaacggtagccaaggctggcatagcggtaggagtggacggtttgtttatggaaacccatgaagacccttctgtagctaagagtgacggagcgaatatgctgaaactggatttattggaagggttattgaccaaactggtgagaatccgtcaggtgttataaatgttatttgttggggcttcacaggtaagatgggttaatttttatttggactgtggggcaacttgcatgaatagtataaaataaggccggttcttgcagtagaaatcggccttacctttctttctccattaaaacagaagaaagaatagaagcagatgtggattatttttttagaatataagccttcatgcgggctatatcatttaagtaatcttgcaaatcttgttcatggtcctcttcttctgccataatatgtttggcaatatcacaagtggtgaagtcaattccgtttgtgaattcggcaatttgctgataacggtagatggcacaacgttcggattctacattttgtttcaacaagatttccgaaccgaaatctacgggcgcatcatatttgcagcgagctaaatcaaaccattgtttagggtcaagtacgggtacaccttccaattcaatgatacggtcggccaataattttgcatggttatattcctcggctgcatgttcttgaaactcgcgttgtacatcaccgcgcatagcgccttctactacgaacgaacctacccaatactggtagaaagccaaccattcttcagacagagctgcattcagctgagccaacaagtccacaatgtcaattttatccttcaggatattcacagattctttagccataatgtaaagtttaagttagtgtttattattatttagtccacagcgggtatagtcatgtcgtctaacacgcctacgccttcctggtctacatctttttttacgtcagaactggtataaagccagataccgaatcccagcacaaataaaataaggaggatgattccccataatttacctttactcatagttttttggtttttagtttctctaataacagatggtgcagaaaaaggtttttataagtcgcgaaaaaaacaggcgtctgttatggaaaaacggacgcctgtgtgtgtgaagtatgaattgatattagattttatcctattttgctgattttttttagtttctcttcatcaatgattttaatttttctaccgtcgatggtaattagtttttcagttgcaaagttagaaagcgtacggattgcgttcgaagtagtcatatttgataagtttgccaaatcttctcgtgaaaggtaaatgcttagtgtagattcatcttcttctactccataagtatctttcaaaaataacagagattctgccaatcgcccacgaatatgtttttgtgtaagatttacggttctttcatcagaaattcccaaatcgatagaaagttggcggataaagaacaaagctaattctgagttgtcttttatcagtttcataatggccggcatgggaataaggcagatagtgcaaggttcgaaagcagaagcagctgtcacaaagttcccttcggcaaaaaaggctcggtatgcgaaatattctttcgtctttaatacgcggataatctggctacgtcctcccacaccttctttgtagatttttacttttccactaagaagacacataaggtgcatcggagtttctccttcgcagtatatcgtctcattctttttatacttttgtatcgtaaagttctgagccaagaactctctttgttcctgtgttaaaggttgccataagtctggtatactttcagcaatctcagtttctgataattcttttctaaccataaacgtgctataaaaccgtgttatagagcacaaatataagaagaaaaaataaaaggacgaagtaatcagaagaaaaaagaaagatatattattaatttatcttcaaaaaataacaaaaggataggtttttatctcctatcctttcttttttgtgtgaaattttatttggtgaacagtaattcacgatatttaggtaatggccaaatctcatcgtctatttctagttccaaatggtcaatatggtcgcggatttcttccaaatatggacgcacttgttcctcgtaactgaaggctttctctacttggcttcccaaatgatttgctacttttcgggcttctgtcatgttgtgcacggcttttttaatagcaagtatgcggttttgaatttcacgtaccaaattcttccggtcctcggtcagtttttcatattcttcggtggagaatatctcttttagaccacgaagattttctaatagtctgttctgataaattacagctgtgggaacaatatgattgatggccaggtcgcctagtacacggctttcaatctggacctttttagtaaacttttccagttccacttctatacggcaaaacaattcattttcattgaatattttttcgcctatcagtactgcacgagattgtttatcgttgaacttcaggatggcttcgggtacatggcagatattagtcaatccgcgtcgcgcggcttctgctttccattcttccgagtagccgtcaccttcaaaacggatgttttgtgaagcgataatggtttcttttaataccttgtatagagcttcttcctgttccatccctccgtttactaatttatctatctgggtcttgaactcattcaactggtgtgccatagcggcattgataacaatcattgatgcggcacagttagcagatgaacctgcggcacggaattcaaaacggtttccggtgaaggcaaaaggagaggtacggttacggtctgtattgtcttgcaatatggcaggtatgcgcccgatacccaattgcaatgctttcttttcatcaggggtcagttcagcgtcattcagacgtgccactacttcgtctaacatatgggaaagatgacgtcctaggaaaatagacagaatggcgggaggtgcttcatttgctcccaggcgatggctgtttccggcactgacaatagaggcacgtagtaaatcctggtttttatagaccatcatcagtacgttgactatgaaagtaaggaaaagcatatttccttccgcagtcttggcaggagagaacaaattgatacctgtgtctgtacaaagtgaccagttgttgtgtttgcccgatccgtttactcccttgaatggtttttcgtggagcagtacagtaaaattatgtttggaagcgatacgcttcatcaggtccattactagctggttgtggtcgttggctagatttacatcttcaaaaataggggctagctcaaattggttgggagccacttcgttatgccgtgtttttaccggaattcctagtttgtgacattctagttccaactctttcataaagctggttacacgtggagggatggaaccgaagtagtggtcatctagctgctggtccttggcagacgagtgtcccattaaggtgcgtccggtcagacaaagatccggacgtgcattatatagtgcggtatccactaaaaagtattcttgttcccaacctagattggcgaatacgcgttttacgtttggatcgaacattctgcaaacttcagttgctgctttgtctacagcacctaatgccttcaataaaggagttttatagtcgagtgcttcgcctgtataagagatgaagatagtaggaatacaaagtgtgctgtctacaatgaaagccggagaagaaacatcccatgccgtatagcctcgggcttcaaatgtgttccggataccgccgttgggaaaactggacgcatccggttcttgttggataagcagtttgcccgagaagcgttctataacattaccgtcatcaccgaattcaataaagccgtcgtgcttttcggcagttccgtcagtcagaggctggaaccaatgagtgtagtgggtaacattaaaggtctttgcccaattcttcatgccattggctatcatgtcggccatttcacgattgataggggtacctttctcaattgcgtttattactgctttataagcctcactaggcagatattcctgcatttttttacggtcgaatacgtggttaccgtaataatcagctaacttttcagaggggtagtcaactttaacggggcgtctgttggctaactcctgtagagcaaaaaatctcattttggacatgttgtctttcttttactggttgttggctgcaaaaatactgctttttgattaataattcgctatatcgctaatcatttttcatttctgttaaggatgttaattaagtattatcatgcatcagcctgttggtttttgtttatatttgctcttcaaatgatgaaaagaaagtacattgatgcactatatacggattgtcagactgattatattttgtcttttgttacctttagctgttcaggctaagagggaaaaggttgatatgcccgacaagccggtggtgtctgattccattcttcagtgtattttccagttttcgccgttctattcccgtatcattgatgagtataaggctgatttatatataaaaggaaaagtgaaggtacataagcgcaatcaccttatccgctatgtaccgtccatgttccgtttcgaaaaacacatcaatgattatcttatggagtctcttagtgagttgcattatacggcccctgatatatacgaccgtaagataaaggcggtatctactacatttccacgtaacaggggacagataacggatgtgatggattatttgaacatgaatatctattcttcttcattgatgtccgataaacttctttctccgttggataagaaatctagcagatattatcattatttattggattctatagctggttcttccgactgccagcggtataaaatactcattattcccaaattccgtggtacgcaattggtcagtggatatatgtgggttagtgatcagatatggactattcgtgaactttatattgagggcgtttatgatgtgatccgcttcaaagttcgtgtcaagatgggggaggagggcgatgtggagtttctgccggtgcagtttgatttgaatcttgtttttaagtttctaggtaaccatctggaaatggatataggagcctggttgaagtacaatgagattaaattttatgaaggagccgcccggcgtaaatctcaaaagaagcatcaccatgatctgacggaatcctacaagctgacttgtgattcggaacagctgataacagataaggaaaagttcaatgaactgcgtcccattccgttgtccgctttggaagattctttgtacagaagttatgctttacgtcaagatacgcttttacgcgtaccgaaaaagaagaagaatgaacatttggagttttggggagagttgggtgatatgcttatcagtagttacaatgtgaatttgtccagcatggggagtgtgcgttgttctccacttattaatccggtgttgttggattatagtcacagcaggggtttttcatataagcagaagtttaaatacagtcggctttttcatgatgggcgtgtacttagaatcagtccgcagataggttataattttacacataaggaactttatgtgaaagcggatgccgattggcaatattggccggaaaagcaggctagttttgaggttagtgtaggtaacggtaaccgcatatatagtagtgtcgtattggatcagctaaagcaattgcccgatagtacctttaattttgaccaattggagttggattattttaaggatgtgtatctcaatctgttccataatatagaaatagtgaatggcttgtttgttaaagcaggtgtttccgtacattggaggtatctgataaataattcgaaagtcattcttgaaaagccgttgcctgataaggattgggcggcattgcgaggtatcagatcagaatacaatagttttgcacctcgtatacgtattgaatggactcctggtatgtattattacatgaacggtcgccggaagatgaatgtaggttccagtatgcctacttttatgctggattatgaacggggtattaaaggtgtattcaagagtacgggtgctcatgaacgttgggagtttgatatacagcaaaacttgaagctaagcggaatccgaagtatcggttatcgcattgggggggggatgtttaccaagcaggaagatatgtatttcgtggattttgccaactttgcccgtcgtaatcttcccgaaggatggaatgatgatattggtggcactttccaattgttggacggacgttggtataactcctcacgtcagtactggcgggggaatttcacttatgagtctccctttattctcttgaaacccttaaaccgttggctggggttagtccagcaggagcgcttgtatggtggtatcctgttcatgccacatcttaatccatatatcgagttgggttatggcatcggtacacatatatttgatgtgggggcttttgtaagcactatcaacgggcaatttgatacctttggttttaaattcactttcgagttatttaataaataatcctgttcaaacaatctgtttggttttctgtttattacaacataacagaaactaaacagtgtatgcattataaaatatttttatgtgtccttttgttcccggtttcattatcagctcaaaacggggaattatctttaacattggaacaatctgccagcctgatgaacaagggcagccacacgttgcaaatggcggataaggctatagagatagcacgcagtgagcgacaaaagatgaatgctttttggtatccgtctttgaatgcatcgggggcatacgtccatttgtccaacaatattgaggtcaaggaacctttaaagcaatttaccgatccggcaaaagactttgtacattccattgtgcccgatgataaatttatttcttctattcttgataatataggtgcgcatacccttacttttcctttgttagaacgtaacctgacaaccatagatgctaatgtgatgtggccgctttttacaggcggaaaacgaatctttgcgacccgtattggtaaccgtatggtagatttggccaaagcaggtagggaagaggcgggagctactttgcaatcggagctggtggaaacttattatgctttgcgtctggcgcaaagagtggtggatgtacgcgagcaaacctttctaggcttacagaaacattaccgtaatgctatgaaactggagaagaacggtatgataaataaggccgaacgcctctttgcccaggtcactatggatgaagccagacgtgagttggaatctgctcggaaagatttaaatgtagcgcaaaatgccttgaaagttttgttgaatgtggaagacgctacatccattaatcccagttctcctttgtttatgaaccatgatctgcccgatgaactttatttcaagaatctggtaagtaccggcaactatatagtaagtaaattgcgaatacaggaggtgatggcagataatcaattgaaaatcagtaaaagtgcatacatccctaccattgcattgtttggaaagcagacactttatgcagacaatcttccgaaaaacttgatgccccgtactttgataggggtgggctttacttggaatatattcgacgggctgaaccgtgaagccaatatccgtcaggcgcgtcttactaaacaaactttgcaactgggacgggaaaaggttcagaatgaattgggagttctggtagacaagttatatagcgaaattcagaatgcaaaggatgatgtcgccgcactcaataccacgattgagatgagtcgtgaactggtacgtatccgtaaaaagtcctttcaggaaggaatggctacctctactgatgtgattgatgcagaaaccatgttgtccaaggtgcagattgcttttttgctggcttattataaatatgatgtggcactggcatctctgctctctacttgcggaatgcccgaaagcttttggcagtatagccgtaccggacaaactgagaactttatattcggaaaataataaaaaaagaaaacaatatggaaaaagagaagaaacagttaggagtcgcttttatcgttgttcttgtggccattgttatggtgtctgccattgggattatagctatgagcgataaaccggttgtattgcaagggcagatagaagctactgaaatacggatttctggaaaacttcccggtcgaattgatacctttttggtccgggagggacagtatgtaaagatgggcgacaccttggttgtgattaacagtcctgaggcttgggcgaagttccagcaggtaaatgccttggaagatattgcgaaatttcagaataagaaaattgacgacggtacacgtcggcaaatagtccgttcggtagaagaattgtggaacaagtcaaagagtgacttgcaactggccaaggtgacgtatggccgtattcaggcgctttacaaagatagcgtggtcaccagtcagcggaaagatgaagtggaagccatgtataaagctgctgttgccgccgaacgggcagcgcatcaacaatttttattagtgaaggacggagcgcagaaagaggataaagagagtgcccgctccttggtggatgcggctcggggcactgtgaatgaggttcaggccttgttgatggatgcccgcctcacagctcccgaaaacggacagatatcaaccatctaccccaagcgtggagaactggtaggagcggggactcccattatgagcttggtagtattagatgattgccatgtagtgcttaatgtccgtgaggactatatgccttatttccgtatgaacaagaatttcatgggagatattccggctcttgatgtaaaaaacaaggtatttaaaatcaattacatcagcccgttggggagttttgctacttggcgatctaccaagcagacggggacgtacgatatgaaaacttttgaaattcatgcgctgcctgtagagccgatggaggggttaagaccgggtatgtccgtcttggtaaatttggatgaattgaaatgatagaaggatagctgtgttattctgattgcagtgaatggtaaatataaatgaactacttgaatgaaagaatctccttttatagcggtattgaaacgtgaactggaccgtatggtttcccggcgcatttattttgcgtcgtgtatcgtcttgcctttgttctctatcttctttatggctacaatttttggtaacggacagatggagaatctgcctgtgggtattgtggatggtgataatacagccacttctcgtgagataattcgtatgaccgaggctgttcctactttccgcattactcggcattatgctgatgaagtggaggccagggcagatgtgcagcggaaaagtatttatggatacctcagtattccgtctggttttgaagcaaaggtgatggatggtaaggaaacagctctgacttattattaccattatgcattgatgagtgtgggaagtgagattcacggagcatttcaaagtttgttgaaaagcatttcggtagttcccattgtcactcatgctgtggcactgggtataaatcaggaagagatagaatcttttctgttaccggttaccacacagaatcatccgttatttaatcctgatatggattattcggtttatcttacacagccattctttttcgtttttctgcaagttatcttgttgttggtcaccacatattccattggcagtgaagggaaattccatacttcagccaactggcttgcggtggcagatgggaatatttgggtggcggttactgccaagttgcttccatatagttttatctttatcgttatgagtattctggcaaactatgtcttttttggtgttatgcatataccgatggattgtggtttttgggcgttgaattttacttcggcactattggtcattgctacgcaggcactggcggtttttctgttctctctttttcctgcgttgagtattattatcagtatagtttccatggtagggtcgttaggcgctacccttggcggggttacatttccggtgcctcacatgtttgcaccggtgtactatgcctcttatctttttcctgtccgtcattttgtcgagattggacagaatcttctttatggcaactatggttatgcgtatatgtggggcaatgcagcctgtctgctgttgtttcttattccccctttattgttgttacctcatttgaaacgctctttaatcagtcggaaatatgacgatattgaataatatattagctgtatcttggcacgagtttcgtgtaatatgtacccgctattccattttattggtactcagcggtggcatctttgtgtatggattactttataactatatgtatgctcccaatgtggtacgcaatgctccggtggcagtagtggatatgagtcgcactccgttaagccgcagttacatccgtttgctggatgccactccgcaggcacgggtattgacaaacaatgctgatttgcctgctgctaaggaattgatgaaatgtgatgaagtggtgggcattgtttacattccctcggattttgacgctcgtgtggggcgtggtgaagaagcgatatatattatgtacagcaccactacggcttttctttattttgcttccatgcaggaggcgtctgctggagccatgcttgctgtgaatgatgatgttcgacccgagcaagtggtttttctacctcaggatgatatacagtctgtggttcaaacaaagtctgtcgatgtggtgggtaccgccctgtataattataccgatggttatggtacttatttgatacctgccgttttgatggttgttatttttcagacgttgatatttgttatcagtatgttgagtgggaaagagcgtgaaactggagatatactgatgtttgcaggccctgaaggaagggatctttcttttttacgtatggcatccgtagtgataggaaaatcatttacttatttagccttttatgctttattctctatctttttgttggggcttcttcctttagttttccaattgcctcatttagcatatccgtggaaaattgtggcacttatgataccttatattcttgctaccagtttctttggattggcctgttcgttatttttcagtgatagtgatgctccattgttgttggtagctttcttctctgtaggattgattttcctgtccggagtttcttatccgctggagttaatgccttggtattggcaatggattcattatatggttcctgcggctcccggaactttggcctttgttaagataaattctatgggagctagtatgtctgaaatcagtcagcaatatattatcctatggatacaatgtgcgatatactttgttttggcttgtcgagcctatcgctacaatataaagaaagcaaagtgtgaaagacaataattttatgtgtgattgttttttatgtaattcgttttgctgattctttattttttataagatctgtttggaactggagcgaggagcctgaaagttgttgatattttaattcttggtgattattctcttgttgtttcttttgctttttcagctccttttatgagatgatgcaagggggaaacttgcaaacttgcacaacttgcagtctttccacacacacacacgagcgcgcgcgattacgcgtatgcgtacatcatagcgatggattattatatcctggtaaagtaatgacggacaatccgatgagagtgtgaagggtagagtggaggaagagatgaagtggtgtgttagcttccatcttttttcctagttctaggtagtgaatggtatggttctatcctgttttttgtaatggggggatgaagaaaatctttctggaggttatggtaaccaatgagcggtaggtgaacagcagccggcagcttttctgacggagtgtctgggcattggacgggatgctatgtgcttttgtatagtttgtgtgttccgaagggttagtaatgtgtgaccttgtacgttactaacatagaggcctgtatgttagtaacgtaccttgtttaaagtaggtaggaggtttttcgcatgcaggatacgtgtcttccgcagaattatgtgaattgtattggtaaggttaaagtgtgtggttgtcgcagattcagggagtcggtcctttacggtcagtgtctgttttgttctagtccttgtcttccgctttcttattttctccttgtcaggctttcctgctcttttccaccggaagtcttgtcacgtatctccctttccgccttttgcattctgttatcctgtcctccgttgtagttctctccggtatcgtccgtctgtcttccactctcttttttatgctttattattttttcctattataatgtgcgcgcacgtgtgtgagtgtggaagtgctgcaagttttgcaagtttgcaagtttaccttccgttttttctttttccgttttttccggctttttgtttgcgtattcgtttttttctttttccgtttttttttacgcgcgtgcgaatattataatgtgtctgtctttttcctcccgtgtcctccgttataaaaaccttctttgtaacgcatctgtgattcagcgtattacaaaaaagtttcagggaat

SEQ ID NO: 14447 - DNA, 71649 bp, Unknown
  gut microbiota DNA sequence
aggtgaaaggacaatctaccgttaaggtaatcttggaggaggatactgaaacactggatgaggttgtggtagtaggttatggtgttcagaaaaaaagtgatgtgactggtgctatggcacgtgttggttctgaagaattgaatacaagacctgtgaacaatgcttttgaagccttacaaggcaaagctgccggtgtagatatcacctcaagtgaacgtccgggtactgtaggatcaatccgtattcgtggtaaccgatctatcagcgcatcatcagaccctctgtatgtagtagatggagttcctttgagtgctggaggaattgaaacgatcaatccgcgtgacatagaatccattgatatcttaaaggatgcctcttctacagctatttacggttctcgtggtgccaatggtgtcatattgataactaccaaacgcggtaaagcgggtagactcgctttaaactactcaggttctgtcacattagaaaacctaaaagacaaatcacctgccatgagtgcaagcgattatattacctggcgccgttgggcttattataactcagatccggtaaacaatcctcgcggtgaccaacctaactacgataaagaccaaatttatttcgcagcatcaggtgatcccgcagctttggcaaatgtaaataaaggttggagtaacggtacttgggatggaagtaaagtaacagataccgactgggcagacatagtgacccaaacaggtatcactcatgaacacaccatcagtggtagtggcggtaacgaaactgcgcaagctttcttctctgttggttacctgaataatcaaggaactcagaaaggacaggaatatgaacgttataatttttcaatgtctgtcgatttacaagtaaaaccttggtttaaaatgggcggatctatcaacggttcatgggcggttcaagactatggttattcccgtaccggacaatcttcaggctcgggccctgttgatatatatagcgcggcaaaagctattccacgctttggtgttccttatgatgaagaaggaaatatcattaccaacccctgtggctccaccaccaatgtttatactgtaattgacgaatggaataagtcaaccgataaccgccaaactttccgtgcactaggcagcttttacggacaatttgattttgggaaaatatgggcacctctagagggactaagctataaaatctctttcggtcctgatttccgccactatcgtcaaggtatttttatcagcaaagactctgccgtgaaaatgggctcaaaaaactatgctaaatatgcaacagatcgttacttgtcatggacactggataatcagatcaactataacaagacattcggcaaacataacttaggcgtaaccttattgcaatcagcttccaaatataataaagaaagtggttccgaaagtgctaacgccatccctaatgaaaattttgaatggtataacatgggcagtgtagatattactgatgcagcaacttatggtgctggtatgagtactggtatgtctgagaatcagttggcatcgtacatggcacgtgtaaactacgcatacaacgaccgttatttattgactgtatccggacgttatgacggttcttccgtattagcagacgggcacaaatggagtttcttcccttctgccgccttgggctggcgcattgaccaagaagacttcatgaaagatatttcttggataaaccagttaaaacttcgtttcggtttgggaacaactggtaactcagctgtaagtgcatattctacattaggtaacatccagtcattctatgtaccttttggctctactctgacccctgcttatgctactaatgaaccttattacacttcttctcaagtaaaaatggcaaataaaaatttaggttgggaaaagacaacacaatataactatggtatagatttcagtttcttgaatggacgtatcagcggttcaatggatatttatcactctaacaccaatgacttattattaagcatgactattccaaccttaactggctttaattctacttatgccaatgtaggtaaaacaaaaaacttcggtgttgacttatctttgaacctggttcccatacaaactaaagactttgaatggagttccactatcaatgcagcctatcaaaaagatgaaatcttagaacttgctaacggtaagcaggatgacatttccaatgcctggttcattggtgagtcaatcaatgtttactatggtattgccaacgatggtctgtggcaggaaagcgatgcggcagagatggctaaatttaatgctaatggacataaatttgaagcaggcatggtgaaacctgttgatcaggatggcaactatattattgacagtaatgaccgtattattcttggcaataaaaatcctaaatgggtgctgggatggagcaatacattcaactataaaggtcttgaactaggtatcgagctgaacggacgatttggttatatagttgatacgggtggtgaaggccaaaacggtatgtataaccaacgtgaaataaactattggactccagacaatactggtgctgattatcaaaaaccaatttacagtacagcgggtggtgatgcttattcaagtctgctaggctttaaagacgcttcattcatcaagatccgtaacatttctctgggttataactttaattccaaagcattaaagaacatcggaatcagttctcttaaattatatgcacaagctaagaatataggcaacctctattcttcagtagattttatggatttggacttaggcactacttattacaatagaggctttactttcggtttacaagttggtttctaatttgataataacacattaaactgtttttaaaatgaaaaatttaaaatatacattattcacagccgccctgtctgtcgcaatgactgctagtttcagttcttgtagcgatagtttcctagatgaaaaaaacaagtcatcctataccactgactatttcaaaacgtcacagggcattcaagatctggctaccgcactgtacggtaacatccgttggcatttcggttatgaatgggcgtatggtattaccctttacggcaccgatgaatttacaaacggctctgacctgactgcagaaccatggaacacttatgacagccgtctgaacccgttggactgtacaacggcgaacggtgccgccaacaacaactgtccgggtgtatcggctctttgggatcagatgtattacggcatcgcctctgcaaatcaagttatcgcatcagctgactatgttactgatgcggaagtccgtgaaaaatgcctaggggaagcttatttcctacgtggatataactactatcgtcttttcgcacaatatggtggtgtggttctgcaaacccaagttactgaaggtgtggtcagaacctttactcgcgcttctgcagaagaaacattaaaccaagtgattgatgacttgcagaacgcttacgacaaactgcctacagatagatggcgtggtacaggtacatggactaaatacacagcagcacacttcctggcaaaagctttgctgtaccgtcagtctgaacgttgcagcgactggaactcaagttatcctgctgatgctgatttgaaaaaagcgattacattatgtgatgaagtcatttcaaaatgtccgttagaaagtgattataataacctttacgccaaatggactggtatagactgcaaagccgaagaatctaatgaaatattaatgtcatgccaacacacttcttcggcaaccggacgtttcggaaaccgtacttataattacttcaacccacaattctccaacttctccggtggttggacacaacgtggtcaatatatcggtggtatggacttccaacgttgccgccctacagaatacgcttatgctatcttcgacaatgtgaatgactcacgtatgtggaaaacattcaaaactgtctacggattgaataatattgcatcgaaagcagatgatgtagtggctacaaacggtattacagccgatcaggttccaacactaggcgaccaaggcatcatctttattcttaataaaaaaagtgacaaccgttttaaagacgccacaaactccgattatggaacagtaggtcgtggtggtatagcccactcctttgtaaaccccgaaacaaataaatgggtgccgaatgtattccctatatatgccggtggtcaatatgtattgaacacctatggtgttagcggaaatccagcacagtccaatgtattctgtggtatcaataagactgacgacggatcgcgtacagcagagaaaggtgacgcacatcgtgatgtcattatggcccgtacaggcgaaacttatctgataaaagcggaagctcaagtacgttccggtaacttccaggatgctatctctaccatcaaccagctccgtgcacgtgccgaatggaaaaatggtgaagaccgcgaatactacaccgatggttctatggctttcttgaaaagcgcaggcggtgacgaagataattcaaccgcactaagcactttaggcaaatgcaaagatgccaatggtaccaagatcaataacacagaggcattcaaggcttctttccttcaaaagaacacttactatctttcaactggtatagaacgcacaacagatgcttccagtctgcaaatttcaagttattcatcattaccagccgaggatgaagctattctatcagctatgggcgtaaatggggacaaagaccgtttgatcaatttcattttaaacgaacgtacccgtgaatgcttaggtgaatggaaccgatgggaagaattgagccgtaccaagactttggttcaacgtgctaaattattcaatccggaagcagctgccaatatagcagacaaacatttgcttcgtcctattccacaaacattcttagaccaacttcaacatgaagacggtacgaatttaagtgatgaagaaaaagccgcaatgcaaaatcctggctattaacagactagatttttgcagtcaataattaataaaggggagtgccgaattcagcactcccctattttccacaccataaatacttattttataatgaaaaaaatcggtcggtttatatgcttcactacactattcttgttaatagcgggatgcaaacaacaaaaaactatacgctatgaacttgtagatggcaatccacaaatagattacatagatttcctgaacgacacgctatgccgatttgtcgcaccaggaccattggttctaacaagccactacacaaaaaaaggagatatttatataatacaaatcaacgatatagtaagcgcacggctatataaaacagaagaaggaaagctacgaggtgaggctcctttttttgaaggaatatggattataaaagaaaagtgatatcaacaagttctgtacagttcatttactcatttcttttcatataaagaatctatctgtcagtcccccccaatcaataactaaaatccaatacaaatccaacacgacgaataaagattgttatccgtatatgaaaaaagaacagaaagaagatgaacaatattccatgtaaatgaataaaattccataggtaagacaccttcttcgtctatatttgcataaatcaaaaatcaaagatactatggaactattaccagcaatcagaaaaagcataattgcattcgctctgttacccgcacttctatatgcaggtatccctcccaccctacaaagcgatgcctcacaaagaatgaccaaagatatcatggaccgcgcttacatcacccccaaacgtattgttaccaaatatgcaggatgtaagaataatctaataaaaaacgaacactatttgttagagcgtggaaacggccaatcggaaatgaacagaaaaaaatgttgcataatgacctctactgaaacagagaaggcatccttattactggatttcggcagtgaactgcatggaggattaaagctcgtcatgggcagttccaaccgtagggagccttctttggtaagaatacgtttcggagaatctgttggagaagccaacagtaccacttcaaattccgaatggaaagtgggattttcaacagacgatcatgccaaacgtgatatcatcatggaaattccccgtgacggcatgattgaaataggtaataccggtttccgctttgtccgcctcgacttgctgcaaaacaacgccactatctctttaaaagaaatttcagctatcctgcgctaccgtgatattccttatctgggatcttttgaatgcaacgaccaacgtttaaacaaaatatggattaccggagcctatactgtccacttgaatatgcaggagtttttatgggatggcatcaaacgtgaccgggtagtctggctgggcgatatgcatcctgaattaatggctgtcagccgtgttttcggatacaatgaggtaattcccaacagtctggacctggcctgcaaacaatttccgttacccaattggatgaatggcatgagtgcatacagcctatggtatctgatcaaccaatatgaatggtatcaccagactggtgatattgattttttaaagaaacattccgactatatcagcggattaatccatctgataaatgagaaagtggatgatgcgggaaatgaaacgttagcacctgcccgctttttggactggccatccagcggaaataaagccggagttgaggcaggctatcgcgcactgatcgtatgggctatgcaagatgcacatcaattgtctttaaaacttggtaacacttctgatgctcaattatgtctggacattatcaaccggatgaaaaaaaagatattacctcacaacaatctgaaacaggcagcttcattaatggccatcgctggattgatggatccccaacaggcttgcgatgaagttgtctctgtaggtggtggaaaaggtttttccactttttacgggtattatatgctggaaacattagccaaagcaggtgagtatgagaaagcaatagatatcattaacactttctggggggccatgctggatttgggagcaaccacgttttgggaagatttcaatctggactggattcctaatgccgctcctatagacgaacctgttccagccggaaaaaaagacatacatggcgatttcggcgcctattgctatcccggattccgtcacagcctttgccacgggtggtcctcaggacctaccacatggctgtcagatcatgtattaggtataaaaatcgtgaacgtggaacgcaagcagatcagtattgagccacacctaggtaaattagaatgggctaaaggcacttatcccaccccttggggcgtgatagaagtcagccacgagaagaaagccgatggtaaaatcgcaaccaaagtgaaacttccgaaaggtgtaaaacaaatttaattataagaaatcgttatcaaacttctataaaaactggatcttatgaaaaacataatgatatggattatgctcctcttgagtataacttatactgacgcccaaaatgggaagtctcctagaaaagactatgccaaattagctaattatgatgaaagtaaggttccgcaatataccttaccttccgtattaatgtgtcacgacggagaaatggttcagaccaaggaacaatgggagcaaaaacgccgccccgaaattttaaacctgttcacgacttacatgtttggcaaagcacctgtattaaaacacaaactgccttgtacagtcagtcggatcaatgaaaaagctctgaacggatgtgccacccggaaagaaataaccatccaattaacagacgatccacagggtccccacattgacttgcaactgtatcttcctaatcatgtatcaggaaaaattccggtttttctaggtatcagcttcatgcccaattacacgatatatgatgatcccgatttatctgtccccgaaataacagatgaaaaaatgaagaaaagatctttcaggggatcaatggacaaatcctggcagcttgataaaattttggaacacggatatggtctggccactttctgttataatgatgtggatcccgattttgacgatgacttccaaaatggtgtgcatccttattattatgagaaagggcagaatttcccagatccggatcaatggggttccattgcagcttgggcatggggcatgagccgtgccatggattatctggaaacagacaaaaaagtggatgccaaaaaaatcgccgtgataggtcattctcgtcttggcaaaaccgctgtctgggccggagcctccgatccgcgttttgctttagtcatatccgggaattcaggatgttgtggagttgccatctcacgtcgttgttttggtgagactgtagaagccatgaatgtacgttttcctcattggttctgcggtaattataaacaatttaacgaccgggaaaaatacttgcctttcgaccagcacgaactcgttgccctgattgctccaagacctatatatatcgccagtgcagaagaagacaactggtccgaccaaaaaggtgaatttctaggaggtaaaggagctgaacctgtatatgccctctatggcttaaacggaataggttgtgaagaaatgcctcctgtggatacaccttacatgaatggctctatcgcataccacaatcgcaaagggcctcacgctattcttccatacgattgggaacaatttcttcgttttgctgacaaatattttaaaaacaaataattaatatataaatcaatgatgaaaaacaagaacctacttataggattatgctcggtactgctgttgcttagcatatcaataaacatgacagctcaggactcgcgtgaacgtacatattattatgaaatactagaaccacgccatgagcccaaaccgaaaatcaaaggttttgcaacagaaagagtaaaagagaacttagacagagggttaacggccaccccatctgtagacgggaaaggtatctacctcagttggaggctattggaacaagataaaacagacactcccttccacctctaccgttctgcaaacggcaagacacagcgcctatcaaaaaatccaattaaaaacacctgtgactttgttgaccaaactcccgttgccggaaaagcaacctattggatctgtgcattagataaaaagaaaaaagtgattaacacatcttccaaattggatgtggactgttctttattgaaaaactatcaatccattaaattgaaccgtaatataaaagcaggcaaaatagccgttgctgatttgaacggggatggtatttacgattatatcattcgtaccccagaaaaaaatgtggatcccggaatgcccggtactctggatggttcaacttaccaaattgaggcttatttaagtgacggcacttttttatggtctaaagatttaggacaaggtattgagcccggtgtttggtactcccctttcatcgcatacgacttcaatggagatggcaaagcagaaattgccttaaaaacagctccggaaacgaccaaacgaaatgaaaaaggacgggtagactccggtgaagaatatctaagtgtatgggatggaatgaccggaaaagaaattgcccgcgtggactggcctgaacggaatgacaggtatggaaatctggtccggcaaaaccgtaaccaaataggaatggcctatctggacggcaagactccttatatattggcatgtcgtggcacttacaaactgatgactgtagatgcatggcaactgaaagataacaaactggaacgtgcatggcgatgggacggtgatgaagaaaatcccgtagtaagaagcatgggttcccataatatggtatgtggtgatgtggatggagatggaaaagatgaaattctattaggctcatgcatgcttgatgataacgggactttactatggtctaccggattaggacaccctgataaaatctatctgactgatatcgacccggatcgtccgggtatggaagtgttcctttgtctggaaccttggcacgagaacggacgtggcgtttgtgttgtggatgccagaacaggacaaccggtatggaatatcggtcataagacattccatgtaggcgatgggatggttgctgattttgatccggtccataaaggtctggaatgttttgccagcgaagaccgtaaaggaggcagcacagacaaatatctactttcggctgacggtaaacccttaggtaaaaatgaggaagtgccctcctgccgtaattggacctggtgggacggtgacttattgcgtgaaacatttaaaggagatgataaccgatggggggcaagttcctcttcaaacggtcgttcactaagtattgtaaaatggaaaggagaaacactaacacaagatattgaaggtgatatcttaatgattgcagacttatatggagactggcgtgaagaaataataaccgcattacccggtgaaatacgtatctacacaaccaatcttccggcaaaagaccgtcgtaccacattgatgcaggacggaatatatagaagctatgtagctcatcgttccatgggatacccacaagctcctgtcccctcctattatttaggagaataatattaagattagcatgaaggattcctctaaaaactgtaacggatatccttttgttgtaggggcgctttgatgcgcccttatgcatataaaactcaactctaatcataaacatcatgcaaaagatactattatttattgcttcccttttttatttcaacttcttattttcaaaaaatgaaataaaatcctggcaaggcattcatgaaacacccctttcccgtctagaacaacaatttgcagaacctcctgtggaatttgccaaccatgtaatatggggttgggaagggaaaatggataaaaagactatttgcaatgacttggattctatcaaaaagaaaggattccgtgccgtaatatttgaagcaggttacaaactacctttcaaatatctttccgaagaatggtttaaagcaattcgcaccggagtagttgaagccaaaaaacgagacatgaaagtctggattattgatgaaggaaaatatcccagcggatttgcaggaggaaaattctcacaggaacgtcccgatttgagaatgcaagctcttgtgataggtgataccatacagataaaacggggagaagtaatgacaaaccataaaatagcaccggaaatcatcagtgcggtagccgtcagtacatccggcgctcctaacagaactatagaaattaataatggaaaaataagtttcaacgccgggctggatgactggaagatcctattagtcaaaagcgactttcggacggctgtaacccgagccgttaataatcccaatggcggtaaagatgccactaattctctgtgtgattatctgaaccctgttgccgtacaacaattcattgattggacacacaaacagtataaaaaatatcttggtaaagagctgggtaccaccgtacttggtttccggggagatgaacccgattatgcacatttaccttggactccttccattgtccaaacattcaaagatacaaaagggtacgatccgactccctatctagcctccttttttaccgcttcgcctaccatacaggaacaaagagtaaaagccgattattgggatgtctggtccagcttgtttgccacccactttttcaaattacaagccgattggtgtgcagccaatggagtagcccatattacccatcttaacaaagaacatgaaatgcccgcatgtgtaaaagctgaaggagactattttcgagccttaagtaaagttcaaatacccggagtagatgcaatctggaaccaaatatggcccagtacccttaatgatttccccaaactagcctcatctgtagctcatgtttatggaaaacctagagcattcagcgaaagttttgcagcttaccacatctctcctaccattccccaagccaaatttgttgtagatcatcagattgcccgagggattaacttctttgaattcatgttctggctggcaggatccaaacatcgcaattggatgagtgatcctggtatgaaaggcctgaatgaatatacaaatcgcactacttacctgatgagccaagggaagccgggagcacggattgccatgtattaccccacatctactatgtggctgggtaacaatgaagtttataaggatatcgtcactcttacccaacagctgttaactcatcaacgagattttgactacataaacgatgatgcttttacggaagcactgaccataggtcccggctatctggaaaataaaagcagccaaagatatgaaacattgattatcccatcatcagatgttatttccgtatctgcctggaaagtaatagaaacattttcctcacgtggaggaaaagtcctgttttggggaaagaagcccacttctttcattgacaaaaatttcactgctcctggttccctatcagatttaaccaacagcaggattgagccatccaccagatggacagcacatgtaagctcttcccttccggaaccagaaatgaaaatcatttcacctgacaatgattctatccgctacacacgcagagtaatgcccgatggcgacctctacttcatattcaatgaagggaataaagctacagaatttacagcagactttgataaagtaggagttgtaaaagaatggaatgcaacagatggcacactccaaccgataaatgcaacaattgtcaataatcgcacccgtctgaccattaaactggaagcatgggaaagcaagctcatatctatcggaaaaaataacagagaatataacattaaagaatatggcgtaaaaggaaatggctattcggaaacagccactttacaacgtatcattaatgaagcagctcacaatggaggcggaacgatagttattcctgccggggagtatctaagcggcgctctattcttcccacgtggtgtagatttacgtatagaaaaaaacgccaaactaatcagcactgtcgaccccaatgaatttcctgtcatccctacccgttttgaaggcatagaaaaaaggtggcgatgtgctttcttgaatttcgaccattcagacggagttaaagtttatggtgaaggagttattgatggtaaaggagtagaatggaaaaaaattccattcggaaactccggacgccccagactggtatgtttcacagattgcccgggaggtaagatttccggtttaaaaatgataaatcaggcctcatggtgtcttcatgtactttacacaaacggattcactatagatggaatcgatatccgtgcattggaatatatacccagttccgatggcatagatatcgattcgtccaatgatatattgattacttccacccgcattgaggcacatgatgattgtatctccatcaaatccggacgagacgaggacggacgcagagtaggacgtcccagtgaaaacattctgatagagaactgtcatttcgcatacggtcatggtggagtggctatgggcagtgaaatatcaggcgacatacgcaatgtgaccatacgttcctgcctgatggataacgaaaactggagtcccttacgttttaaaagccagcccagccgtggcggaactgtggaaaatatcacttttgaagatattatcatcaaaggagcacgcagtatctttgatatcaatatggaatggcgtatggttcctccgcttctacctgcacattatccactgacctgtttgcgcaatatccatttcaagaatataaatggagaagcacaatcagcaggaaccatgtatggttttaaagaggctccattcggaaatgatacattcttttttgagaattgccatatcaaagctcaaaaaggattaagtatctcaaatgtggccaatgttaattttaaaggtttggaactagagataaaagaaggggaaaagatttatgaacgatctgcaaataaagacaaatagcccaataagaacactgataaataaaaaacacactcgaaatgcgtacacatgcataatattcaaggaagatgtacacatttccattgtagaaaatcccagaccatcctatttttgcgctaccattaaaacactaaaacaacatgatgaagaaaaaattaatactatcattcttttttgtcgcattaggttttggagttgtaaaagcacaagacttgccggacaaaaaagaaacgttgaagactgttataaaagtcaataattacttcatgaagaagtatgccgattatcgtactccttcttttgtaaaaaatgtaacgcgtcctagtaatatctggacacgcggagtatattatgaaggattaatggctctttactccgtttatccacgcgatgaatattataaatatgctgtcgattggtcaaattaccacgaatggggatttcgcaacggtaccaccactcgcaatgctgatgattactgtgccagccagacttacattgatttatataacatttgtcccgatccggaaagaatccgtaaggtcaaagctaatatagatatgctggttaacactcctcaagtaaatgattggtggtggattgacgccatccagatgggaatgcctgtatttgccaaacttggaaaattgaccggagaacaaaaatatttcgacaagatgtgggatatgtatgaatatacccgtaacaaacatggcgagaatggcatgtacaaccaaaaagaaggtctgtggtggagggaccaagactttgatcccccctacaaagaacctaacggtaagaattgctattggagtcgtggcaatggatgggtatatgcagcactggtacgtgtactggatgaaattcctactaatgaaaaacatcgtgccgactatatcaatgatttcctgaccatgagtaaagctatcaaaaattgccaacgcacagatggtttttggaatgtaagtatgcatgacgaatcaaacttcggaggtaaagaaaccagtggcaccgctttatttgtatatggcatggcatggggggtacgtaacggactgttggacagaaaagaatacctgccagtcttgttggaagcatggaatgctatggtgaaagatgccgttcaccctaacggcttcctaggacttgtacaaggaaccggaaaagaaccgaaagacagtcaacctgtcacatacgacaaagtacccgattttgaagattttggagtaggatgtttcctgcttgccggaagtgaagtttacaaattaaattaataatatgattggttagtgaatcgatttttcatagactatgatttaaaggttagatttaggttaagtaaaaaggagcgactgtgaagccgctcctttttgttctatcaatcatacgttttcaatcagtaatagaaaataccaatactcctgctgtaggaattaccggctctcctatcaacactttggctcccgagggaagtacgaatttataaggtttatctgtataattcaatacaatccccataccattgcggtactctaaagtaacaccatatggtaaatccatcacaggaatattcaattgcgcatatagtttcttcaaaatatctttctccaataatccgtccgtactatccactcccacgtaagtaacagtaccttttcccaacttatgagtagtgactgccggttttccttcataaaattcctgtgtataagtagcccatacttgtgaatccttacccggtttcaatatctccccccaagtattccatgtatattcttttccatccatccgtaatttgccaggttcttcaggaagtaataaatcataaaactccatttcattaccggtcagttcattaatcatggaaccaaaaggagcttcgggtaaacgtccatggcgatctttttgggctgtacggcaagttaagaccaaattaccacccttctttacataatcagtccatctatctaccaatgccttgtcagccaattgataagccggagctatgaccacaggataagaggaaaactccttgctttcattgataaaatctacaggcgcaccaaaagatttcaacgtgcgataatatttctcaatatgccccaatgtattccatgtacgattttgcttctggcgctcaatgctccatgaattttcatgattaaaaagaatggcagtacgacgcgccaaataatcggccggtttcacctcacgagcagcaacctgtccccgcagctgtctgatttctttcatgaactgctcatattcacgtccaccgggagttaccgttgttccgtctgtacctacaatgccatagtgatattgttccgtgccatacagaggctggcgataacgataagtacagataaagtcgcctccaccggcaaatacgctccacatccataaacggacagctccgggcagcggttgaggattgatactcccccaattcacctgtcctggctgaagttccattactccataagtaccttgtatgggtctgaaaaagtcattggcaaaagcaatacgcaacggatttcctactcgatatccgcggcgaccaataccttcattgtctccatacaccatatagcgagtataactttgaaaatcaagtgcagggctgccacctatatgtccttcctcataattaggaatatagttagtagtcacccattggttctttgcatatttttttatcaacaaacattgttcattcaaaaagtcgtttgtctgactggcagcgaaacggcggtaatccaaaatctgatgatgattcataaacatctgggcagttttaggaagagttatttcatcaaaagaagaataaacctcactccaaaaagccgttccccaggcatcattcaatgctttaatgtcatgatgatatttttcacgcaaaaaatccaggaaagccagttcggctttcggattataatcaaattgtacggccggctcattatcgagctgccagccgattattctggaatcatttccataatgctgagctaacttctctatcattttataagccagttctctataaacgggagaagcaaaagaagcatgttgacgtgctccgtgatcaagcacggtaccattttcatttttaatcaaaatttcagggtatttacggctcagccataccggtggagttgccgtagaagtacacataatgactttcaaatcatatttggcagccaaagccaccgctttatccaaccaggaaaaatcatattttccctcttccggttccaattgcgcccaagcaaattccgcgaaatgggtgaattcaaaacccaaatcgtgcatctgtttaaaatctctctcccattgactctcatcccaatgctcaggataataataagcaccggtcaaggtcaaatccttgtctttaaaccaaggctgttgtgcaaaaagtcctccggccaaagaacaagccaaaagaacggtcacaaatcgttttttcatgataaaatagtaatttaatagattttccattcccataatccggctgcacctttatctatgtgcaaacgcaaataacgtactttatctcccaccgttgccacatgaggtgaacatgccttcacctcttttacttcggcacaaggttgccaattagtgccatcattggatttttcgagatgccaggcatgaccttcagcagggtgtacaaaggcaaattgacactccgttacttgcatggcttcacccaaatccaccatcagccaaggatgatcatcatttgtttctgccatccagcgtgttccattagactggtcgcctgcatttccagggtgatatatatgtgtgcgttccaccttgacaagcgaagttttatcagccaaaggacaattaggctgagtttctatttcaaccttagaagtacggggagaacgtacgctggatgcactgaaagaagctttcagcgccttattttcgcgctgttcctggctgacagccaagtaaccaactcccttttcatcaggaacaagtgtctttatagtgccatcctcattaaattccatccgattagcatatacttggcgggtagttcctccgtcaccgtactccaaatatacgaaaatataatcgtctgtttcttcattataaaatacatttccatgtcccggcccccaaacattattggcaatggatgaaaaaagaaaaatatcattgccttcgggcttttcaaagcccgacaaaggggactgccggctcatcatgtaagcatttacataattctgattccctctcaaagtataaatgtaataataaatacctttacgtttaaacataaccggcccttccgaatacccttgacgagctgtactcatcacaatagtatcaccggttaaatgctgccaatcgtcagtcatacgggcagccatccggcggcgccagaataaataagcagttccatcatcatccacaaaaggttccccatctatatccggagcaatacaagattgatcaaacccatccaaagaatgagaagatatagaattacgtccggcaaaaaggaaaggaccttcgggacggtcggacttcagcacataggtacgtgcattctcatccggttttacaaaagtggtataaagataatattcaccattcttctccactactctaccgggtgcccaataacgaaaatatcccgtctttttctctcctttagcattgacatattcatgtcctttatgccaatcgaatcccacaatatgtgacccgtcaaaactccagtttacaaaatctttagatttccataccacaggagtacctgcttgtgacaaccctttatcaatatcagtagtaccataaagataataagtatcaccaaatttggataaagaaggatcagcaatattatccggaacaagaggattaaagttatggatacgaagcaatttatcaagtacagccttctctacggtaaaagcggttccgtgacggattccttttggaaaagatacacgatcagacacatcttcccacgtctttccatgatcacgactgcaaactgctccatattgatgattacggtatttatcaaaatagacataaagaacatcatctacaaaaagtggcgcaggtccctcgcaccaataatctcctgtaatagaaggagaaacagtagtaggaaatccatcctctattcgtgttgtccgtgttattctcaaattcttctctgccggcaacgagttttcattcttcaccaccataatcaagtctttcatcaccggatcgcgtacaatagctgcatcaatcacactaaaatcaggattaaagaacagtttggtttcagaaaatgtattaaaatccttcgtcgtaacatagtaaatacgatggttcaaccctttctcactctcaatgaccggcacttccttgtgacgtccgggaatggtcgttgcccaaaaaatataataagtttgcgaaggttcatcataaaacaattcaggtgcccagcaattatgtgcagcaggctcatgcatcattaccggaatagaacgctgctcactccaatggattaaatcgggagaagaagcgtaacctataatccggtctgtccaactggaagtccacaccatgtgaaaggttccgtccggcgcctgacaaatactagggtcacgcatcagacggttcttcccgaccgtgggtatcaagaatgattttccatgattcaggggagtccatgtcagcccatccaaactataagccaaatgaagaccgtcccgactgtcattaatgaaataagagaacaaataagccgtatcaccggcaaataatccggaaactgcccctaacaagcagagcaaactgaataatcgttttttcatgtatacaatgatttaattgtgagcatacaaagataaaaagagatttggacttttttctgcacatacaaggcatatccatgtaaaatcgtacaaatatatcgcacattacccttattttatacgaatttccatctatatgtacttctttctatttacatgcaaatgaaaagaccttaatttagcaacatcaaattcaaagtaaaaagatactatgaaaaaaacgttattgacaatctgcctaacatggatgtgcttctcgttaagtgcacaaaaaattattgacttatccggaaaatggtcattcagtatagaccgtcaggataatggagaaaaagaaaaatggttcagccacacattgaatgactgcatcaacctgcccggctccatgcccgagaaactgaaaggtgatgaggtcaccgcaaagacccaatggacaggcagtctctatgacagttcttactattataatccatacatggaaaaataccgtaaagaaggtaatattaaatttccattctttctgactcctgacaaacattatgtaggagctgcttggtatcagaaagaggtgaatatacctgccgactggaaaggtgaacgtattttgttgtttctggaacgtccccatatagaaacaactgtatgggtaaacagacaaaagacaggaatgcagaatagtctttgcgttccccatcaatatgatataacccgttatgtccgtcccggaaaatgtactatcaccatccgagtggataatcgtatcaaagaaatcaatgttggaccggattcacacagcataaccgaccaaactcaaggaaactggaacggtattgtaggacgcatctgtctgcaaacgactccgaaaacatatttcgatgatattcaaatatatccggaaccggaacaaaaactggcacgtgtcaaagtcgtcatcaaaggtgcaggcattacaaaaataaaattatcagcggagagtttcaatacggataaaaagcatatagttcccgccatacaacaagaaatcaaacttaacaaaggagtaacggaaacagaaatggtattacctatggggaatgatatgctgctatgggatgaatttcatccggccctgtacaaactgaaagcagaagtcaccaatgggaaaaaaactgagataaaagaaatacaattcggtatgcgccgatttgaaatcaaaggtaaatggttttatgtaaacgggcgtaaaactcagcttcgcggaacagttgagaactgtgacttcccgttgaccggttacgccccgatggatgtagaaagttgggaacgagtattccgtatctgtcgcagttatggactgaatcacatgcgtttccattcattctgtcctcccgaagccgcttttatagctgccgaccgggtaggattctatctgcaacccgaaggtccgagctggcccaatcatggtcctaaattaggtttgggacaacctattgacacctatttgatgaacgaaaccatcgcattaaccaaagaatatggcaactatgcctcttattgcatgttggcatgcggaaacgaacctagcggacgctgggtagaatgggtgaccaagttcgtagaatattgggaaaagaaggatcccagacatgtatataccggagcatcggtaggcaacggatggcaatggcaaccccgcaaccaatatcatgtaaaggcaggggcacgtggcctgacctggtctagaagacagccatccacccaagacgattatcgtttccagaatcatcttgacacagtgaaacaaccttatgtatcccatgaaacaggtcaatggtgtgctttccctaatttcaatgaaatacgtaaatatacaggtgttaataaagctaagaacttcgaaattttcaaagacattctggctgataaccacatgagcgaccaagcccatctatttatgatggccagcggaaagttgcaagccctttgttataaatatgaaatagaaaagacactccgcacgcctgattatgccggtttccaattattggcactgaacgattattcgggtcagggaactgcactagtaggtgttcttgatgttttctttgaagaaaaaggatatatcaactctgcagaatggagacgtttttgctcacctactgttccactgatgcgtacagataaatttgtatataataacaatgagattttaaaggcggatattgaagttgctcattttggtgccaagacattaaaacaagcagaaattgtatatacgttaaaagacgaatatggcaaagtatatgcgcaaggcacattggcaacacaagacatccctatcggaaatttaaatcacactggtagccttgagtttccgcttactgatatccaagaggctaaaaagctgaatctggaaatacgcattacaggaacagaagctgtaaatgactggaatttctgggtttatcccgctcaagtgacaatagccgaaggaaaagtatacactaccgataccttggattcgaaagccttggaaattcttcagcatggtggaaatgtgcttattacagctgcgggcaaagtgagttatggtaaagaagtggttcagcaattcactcctgtattctggaacacctcctggttcaaaatgcgtcctcctcataccacaggtatcttagtgaaccccaaacacccgttattccgtcagtttccgacagaatatcacagcaatctgcaatggtgggaactgctgaatcatgctcaagtgatgcaattcacccactttccacccgctttccaacctacggttcaaagcattgacacttggttcataagccgcaagataggtatgttattcgaagccaatgtattaaatgggaaagtgctcatgacaagcatggacattacctcccagccagagaaacgcattgtagctcgtcagatgcataaagccattttggattatatgaattcggaccagttccgtccgcaatttactgtaacacctcaacaaatcagtgagttgttcacaaaaacagccggtgacataaaatcttataccaatgactctccggatgaactaaaaccgaaaatcaattaataacaatctatatcaatcatgaaacagatagccctattagctcttggacttttagcgacattaggagtcgaagcacaaacttacaaattcgattttaccacaggtaaaaaaactaaagacggttataccaaaataactcccgccgacagatactcggaggaaaagggatacggatatgacagacagccctctccggaaggtaaaagtacagccccattctttttctctattacggtacccgatggcaactaccacgtcacagtcgtgataggaaacaaacgcgctgccggagaaacaacagtgcgaggagaatcacgccgccttttcttcgaaaatgtgaagacaaaaaaaggggagttaaaaccttgtacatttgtgatcaacaagcgcaacacacatatttcggaaaaagaaaatgtacgcatcaaaccgcgtgaacgccaaaaattgaactgggatgacaaactaactttggaattcaacggggatgccccccaattgtccgaactgattattgagaaagtaaataatgtacccacagtattcctatgcggtaactctaccgtagtagaccaggacaatgaaccttgggcaagctggggacaaatgattccccgcttcttcaatgacagcatttgttttgccaattatgcagaatccggcgaaagcgccaatacttttatcggtgcaggacgactgaaaaaggcattgacacaaatgaaacccggagattatatttttatggaattcggtcataacgaccaaaagcaaaaaggccccggtaaaggagcttattattcatttatgaccagcttgaaaacattcattgatgaggcaagggcacgaggagcttatcctgtactggtaaccccgacacaacgccgcagtttcgatgaaaacgggaaaatcagagatactcacgaagattatcccgaagcaatgcgttggctagctgccaaagaaaacgttcctttgatcgatctcaacgaaatgacccgtaccctctatgaagcaatgggagtggaaccttccaaaaaggcattcgtacattatcctgccggaacctatccaggacaaaacagggtattggcagataatactcatttcaatccttacggagcttatcaaatctccaaatgtatcattgaagggataaagaaagcgggattacctatctctaactatttgcgcagcgactattccggttacaatcctgcacatccggatgctttggacagtttcaaatggaatgacagcccgtttacagaaattgaaaagccagacggcaattaatttaaaagtaagaacaaatgaataacaaaacattattattaaccctatcatttaccttaggtaccctctttaccaatgcccaatccctctccggattccaatggggagaagggatgggaactcctgacctttcgtggactgcccaagtaggagccaaaacctatcctgagggaaaaatattccaagcagccgattacggattgaaaaatgacagtacccagttaagcactgccgccctgcagaaagctattgacgaatgccaccgttccggaggaggaacagtggaagtagccccgggatactaccggattggtgccatctacctgaaaagtaatgtaaacctccacctcaaccaaggtacgacgctgatagccagcgaggatatagatttataccccgaaatgcgctcccgcgtggcaggtatcgaaatggtatggccctcggcagtcatcaatattctggatgcagaaaacgcagctatcagcggagcaggtacgttggattgtcgtggaaaaatattttgggataaatattggaccatgcggaaggattacgagaaacgcaaactgcggtggatcgtggactacgactgcaaacgagtaagaggaatgctcatctcgaacagccgccatataacactaaaagactttaccttgatgcgtaccggattttggggttgccaagtgctgtattccgaccaatgtaccttgaacggactgaaaatcaataataacgtaggggggcatggtcccagtacggatggtattgacattgattccagcaccaatatcctgattgaaaactgtgaagtagattgcaacgatgacaatatctgcctgaaagccggacgggatgccgacggcctgcgtgtaaaccgtcccaccgaaaatatcattgttcgtggatgcattgcacgtaaaggtgcgggacttattacctgcggcagcgaaacttcaggctgcatccgaaatgtcttgggatataaccttcaagcatacggaacctcttccaccctccgtctgaaatctgccatgaaccgcggtggaaccgtagaaaatatctacatgacccaagtgacagcagacaatgtccgccatgtactggcagcggaccttaactggaaccccagctatagttattctaccttaccggctgaatatgaaggaaaaaagattcccgaacattggaaggttatgctgactcctgtcacacctaaagaaaaagggtatccgcatttccgtaatgtatggctcagcgatgtaaaagctactaatgtgcaaacctttatcaccgctgcaggctggaatgaggaactgcctttgcagaatttccatatttccggcataaaagccaaggtaaataaagcaggaagcattatctttaccgaagacttccacttggaagatgtccggttacaagtagaagacggcagccgtgtggaagaaaaaaacaataagaacgcacaaatcaatatcagctatgaaaacaacatggaattatagccggtggctacttccgttctttctctgtatgctgttgtctgtctttagcaacaacgcccagactcttcccttccgcttatccaaaggtgcgggaactttccgtctgggagtggtttgcggcaatgaaagttgctggctggaccaatgcagtgtcaagaaaaagggacaggcttataccattaaagataaattatggaaagaaggtgaaataaagctgattgtatgtccattgacagatagtaatggttttatcatggagatttccggtgagcgattacccgaagagctcaaactttgctgggctttcggtgcatgcgacggtgcagacgaccctgccgtaacagacaacagtattccggcagcctcctgcttccataatgtattcagtatagaaggaaacgcttttactacctattatggtgaaagcatgaaactgagaacggttcatggggtatctcccatcggttccgatattcgtctgtccgacggacataaacaagcatccccgcttgctttattcaactccggtaaaaagacagatgcccctgtcatctctgccctatacccgtggaaaccgcaagaaaagctctacttttgtttctaccaacgagcagattataattatttcatgctacccggattattcgagaaagaacataaaacccgatcaaaatgaaacgattgtatctatacctgttcttccttttcctatgcctgtctgcccaggcacaggaattcaaggtgtaccaatttccggcagataaggttcctgccatagatggcaatacccacgactgggattgcgttccggctgattataagataacggaaacagctttaaaggaagacgagggaaaacatgcacagccagataccaccaccttgaaagtcagtgtcaaagtaggttggtgtgcagaaactcagaagttgtattttctatatgaagcatacgataattattggcggttcagtgagaactccttgaacacggatatttttgaagtagtggtggatggcgattgttcagggggaccgttcatcgaccgttttcatcccacagctcccaaagacgtatggcaggcttggttcaaatttcacggatgccatgcccagaactatcacatcttcaccccggctcacggcaatgactggtgtatgttatggggtcctcaagtatggctgaaacaaaagccatacgctgattatgcctatcagtactctttcaaggagggtgaaccgggtaagctgacattggaattttatatcactccctttgaccatgcggatgccgatggtcccgaactatcttgccctactttattaaaagaaggaaatgaaatcggattatgctgggcagtgattgactgggatgcccaccctacctccaaagacggattctggaatttatccgatgaacataccatgtatggcaatgcatcttatttacacaaattcaaactaatgcccattcagtaaaagcaaagacagaccatgaaacaactcatactcttccttttatgcctcagcacatggacagcacaggcaaagatatacaatgtaaaagattacggagcgaaagccgatggtactaccattgacacccctgccataaatcgagctattgaggaagctgcctctcagggtggaggaaccatttacttccccgccggagaatacgcgtgctattccatacgtctggccagtcatatacatttgtacatagaacaaggagcacaaattgtaggcgccttcccatcagcaacggaaggttatgacctggcagaaccgaatgaacacacccaattccaggatttcgggcacagtcattggaagaactcacttatttggggaatcggtctggaagacatcaccatcagcggaccgggactgatttatggcaaaggactcacccgtgaggaaagccgcctgcccggtgtaggcaacaaagccatcagcttgaaactctgcaagaacgtgacactgaaagacttctctttgttgcattgcggtcattttggtctgctggctacaggagtagataatctcagcattctgaacgtgaaagtagataccaaccgggacggttttgacatagactgctgcaaaaatgtccgcatcagtcattgtacagtcaacgctccctgggatgatgctatcgtgcttaaagcgtcctacggattaggctatttcaaggatacggaaaatgtaaccatctccgattgttttgtcagcggatacgaccgtggcagtgtattggattgtacctggcaacgagacgaaccccaagcaccggatcacgggtttgtaaccggacgtatcaaactaggaacagaatccagtggcgattttaaaaacatagccattaccaattgcatattcgaacgttgccgaggtcttgccctggaaacggtagacgggggaaaactggaagatatcgtcatcagcaacatcacgatgcgcgatattgtcaacgcccctgtcttcctgcggttaggagcccggatgcgcagcccgcaaggaacgcccgtgggcacaatgaaacgcatcctcatcagccacgtcaatgtatttaatgccgactcgcgctactcctccattatcagcggaataccgggagcccttattgaaaatgtgacactgagcgatattcatatctatcaccaaggaggatatacagaagccgacggacttctgactcctcccgaacaagagaaagtatatcctgaaccgtggatgttcggaacgattcccgccaaaggtttctacatccgccatgcacgcaacatcaccttggacaatgtaaatttccattacgagaaagcggacggacgtcccttgtttgtcacagaggatgccaatgatatcagatacaggaacatcacagtggatggaaaagaattcaatgcagcaaacttataaaaaacaaatagaatgaagagaaaatatttattgttcagcctattactgaccggaagcagcctttatgcacaagaatggccggcagtacaccccgaaacccgtccggctacccgctggtggtggctgggaagtgctgtcgatgcaaccaatctgacctacaatctggaggaatatgccaaagccggactgggaggtgttgaaatcactcctatttatggtgttcaaggcaacgataagaataacctccctttcctcagcccgcaatggatgaatatgttgcaacatactgaaactgaaggaaaacgtatcggtattgaagtagatatgaacaccggtaccggatggcccttcggcggtcctcacgtgagtatgacagatgctgctaccaaagctatttttcaatcttatcaagtagagggtggaaaagaaattacgctagatttgaaagtagaagaagaaaaacaacgccctgtagccactttaagccgggttatggcctataatgcggacaataagcaatgtcttaatctcacttccaaagcgaagaacggacaattacaatggaaagctccggcaggtcattggcatattattaccttatatataggtaaaacattccaaaaagtgaaacgtgccgctcccggtggagaaggctatgtgatgaaccacttggataaaggagccgtaaaacgttattttgccaactttgacaaagcttttaaagaaaacgagaccaattttccacatacttttttcaatgactcttacgaagtatatggtgctgactggactcctgatttcctggaacaattcgcccgtcgtcgtggctataaactggaagaacacttccctgaatttatagctcaggatcgtaatgaaaccaccgcccgcatagtcagtgactatcgcgaaacaatctccgatttattgattgagaatttcagtacccaatggactaactgggcacacggtcatggcagcatcacccgtaaccaagcacatggttcccctgccaatctgatagatacctatgcctctgtggatattcccgaatgcgaaggattcggcctgtcgcaattccatattaaaggattgcgccaagattccctgacccgtaagaatgactcagacctttccatgctgaagtatgcttcttccgctgcccatatcgccggaaagccctacacgtcttcagaaacattcacctggctgacagaacatttccgtacctcactttcccagtgcaaaccggatatggatttgatgttcgtatcaggtgtaaaccacatgtttttccatggaaccccctacagtcctaaagaagccaaatggccgggatggaagttttatgcctctattgatatgtctcctaccaataacatttggcaggatgctcctgctttctttgaatatatcacccgttgccagtctttcctgcaaatggggaaaccggacaatgattttcttgtttatctgcctgtatatgatatgtggcaggaacagccgggccgtcttttgctgttcagcatccatgatatggcaaaacgtgctcccaagtttatagagaccgttcataccatcagcaattgcggctatgacatggattatatctctgacaactttgtgaaaagtacccgttgcgtaaatggcaaattactgaccaaaggaggaacttcctataaagccatcatcattcctgctgtaaaattaatgccgtccgaggtactcggccatttactaaagctggcacaagccggagctactatcatctttaccgaaaactatccgcaggatgtacccggttatggaaaactggaagcacgccggaaaggctttgcgcaattacaaaagcaacttccggaaattgcttctttcgatgagacggtagcaactccttatcaaaaagggatcatcattacaggaaataactatcaatctgccttggaaaaaagcggtgttgttcccgaagagatgaaaacgcggtatggcttacaatgtatccgccgctcccatgccgatggacatcattatttcatctcctcattgcaggaaaaaggagtaaacgactggataaccttagccgttcccgcagaaagtgtcatgctgttcaatccgatgacgggagaaaaagggaaagcacaaacccgcaagcaagaaggcaaaacccaagtacgcctccagctacattccggcgaaagtgtcatcctgcaaactttcaaccatgccctgacagacgttgccgaatggaaatacgttcaagaacaacctgtcagcctcagccttgatcacggctggaaacttcattttgccaaaagtactccccagatagaaggtacatttgatatcgatactccgtcttcgtggactgaaattgctcaccccaacgctccgattaccatggcgacgggagtatatactaatatcatcactgttccccatattcccgccgatgactggatactggatttgggtgatgtgcgggaaagtgcccgtgtgcgcatcaacggacaagatgccggaacggcatgggccgtaccttatcagttgaaagtaggcaaatggctgaaaccgggagataacaagatagaaatagaagtgaccaatctgcctgccaaccgcattgcggatatggatcgtcggggtgagaaatggcgtatcttcaatgaaatcaatgtggtaaatctgcaatacaaaccggtaccttatactgattggcagccattgccatcgggattgaatggtagtgtaaggttgataccggttacttataaataagatatccgatagtggtagcctattggcggagttaatccagactgtatttgaaagactgaattaattccgccaatgttttttacctcatgctcagtgaggcacctgcaaccgatcaagccgcagcgagacagcattttatagcaaagcggcctatttacggatagtatccaaacgttcctaagcgtctgatcattaccagcctgctgcatattatattccggttacagccgcatcagcgaaccggcaggatatccagcatcgcttcaaacatcatggctgtaggagtagtcaagcctcaattgaatgtatatcactccctaccctatagcataagccttttctttcttcaggttaagcctttttatacggatatgttctatctccatagcctttggagttatctccataagctttggagttatctcccaaggttatggagttaactccaaaggcttgcggagataagacaaacaggtagaaaagccttaaccatacgtcaggaaagggttagggatacggatgagattctttaaggacgaatctgatgccaaagtcttttgcggatgcctttttcttacggatgaaagccccgctaaaattctactgctccaaaacttctccgtcagtgaatagtcaagatatcatccgtaccggttcccgataagcataccaactgtccgtgtcattaccatacaacctatagctttcaaacggttttgtctattccaaggggtaacgaagctaagacaaaatgtgacaggaattcccaaactatcagaggaaagggaagtgataacagataaaaagtggtggtagcagatgttttttcatgctactaccaccacctttgaaacgccctgttcatgggtgtttacgaaagagggtggtagtagtgggtagcagttttgcaaaactctgttgcaggtgggaggaaaattcaaacaggaactaaaattataaagttttcatcttcttccctatgcccactgctttagaaattttgcctgttcctttttccttatacaagtagccacggaacatgcctccactattaaacggcatggcaaaattacctttcttgtccactgcaatcaatccaccatttccctccttggtattcagttcctgatggataatataatcggcagcctccccaacaggctggtgcagcaacttcacacgagtagaaagattataagctacaacatgacggataaaatactccccatgcccggtgcatgacacagcgcaaccttcattatccgcataagtacctgcgccaatcaccggagaatctcccacacggccccattgcttcttgaacataccaccggtacttgttcccgctgtcaggttaccttgcttgtccagtaccacacagcccacagttccattcttcttgctctcctttttcaaatcctctatccacttcaatgtcttaggagtagcaaaatacatattatctacaatttccagcccttgtgactttgcaaaccggtcggccccctcacctgccagcatcacatgaggtgttttattttttaccgcataggctgcattaatcggattcttcaccgttttcaacccggcgacagctcctgctgtcaaatccttaccttccataatagaagcatccagttcaaaagtaccggtactggtacaagtagcccctttaccagcattaaacaaggggttattctcaaaatagttaacaactgccattaccgcttcaggtccttcaccaccagcatccaatatagcatttccgatactcaaagctgaatctaaagccgcataatacaaggttgatttctccttatcgtcctcaaggttttccatagcaccggcacctccatgaacaacaattacgtattctctctcctgtgccagcatgcggcacaatggtaataagagtagaattgtgataaataagtgtttcataatagtagtttaatatcaatagtatggtgcgaatgtaacaaaacaatttgtaaaaaggaaacttttatgcagagatatagacataaaaaaaggagcaacgccttgctccaacctttgttaaccttaaatctaatactatgaaaaacacaatgcaaaggtacgaacattattgaaatttgcaaattcaacaaaaagaaaattatgttctctaacatgatttaaggagatccaccacttgtgttaatgaacatttccctgtcagattataagtgacatttttacagctatatttcttaacgtatactaaacaataagataaaatacacattaaaagttaaataaagcaggttaacactatgttttaaaacataaataggaattttggtgttatctttgcagtagtaaaagagaaaacaaaaggtttttaggaataaccagttctccaaacgggagaacataaaaaagatgtaattatgaaaagaacaaatgacacaatcgagatgttgcagtatcagttaagaagatacaaagcaatgagaaaaggagctgcttgccaatctttgcaatacaagcttcagaaattaatgagccaacaggcgaatgcctgatgagctttaccataaagaacacaagtttataattttataatataagaaaaggatatgatttttatcatatccttttcttattattatctagaatgaaagttattcatatagataaaacattctatccatcaactgccatttttcagccgaagacgctcccggctctgcctgttgaaagacagacatatactcttcccattctgcctggcgaggcaacgtagccattctggccatggccgtatcccaatcaaaatcgagaggagtttccactatcataaacaaattagtccccaggatataaatttccatttccaaaataccgacttcacgaatagctgccaatgtttccggccaaaccttgccttccgaatggcgctttctatactcggctatcaaggccgcatcgtttttcagattcaacatctggcaataacgttttaccggtccctgatatttccgaactttatatccttgctttttgttttccattattctcttacttcccaacctaatgcactagctcccaacacggcggcatcagcatccttcaattcagaaatcaacaatttagtcttaccttcgtaaattttcaagatattatcatctatagctttacgaatcggcttcatgatataatcaccggattttgctaatccaccaaacagaataatcgcttccggactggagaaagcaatgaaatccgccaaagcctcacccaaaatacgtcctgtatattcaaagatatcttgtgctaatttatcccctcttacagccgcgtcaaaaacatctttagatacaatatcttcagccgggatgtctcttaacaaactaggttcgggacgggcaactagaaattcacgtgccgtgcgtgccacacctgtagccgaacaataagtttccaaacagcccttacgaccacaaccacactgacgtccgtcacgacgaactatcacatgtcccaattctccggcaaaaccatcgtgtccgtaaaccagttgtccatttattacaataccactaccaacaccggttccaagagtaatcataataaagtctttcatgccacgagccgcaccataagtcatttcgccgatggcggcagcattagcatcatttgtcaaagcagtaggaacacctattgcttcttcaaacaaagcagccaagggaatcacccctttccaaggaagatttggagcaaattcaatggtaccgttatagtagtttccattaggagcacctacccccatacctttaattttttctacgccaccgaacgattcaatcaacggacgcaactttgaactgaccgcctctacataatcctctattttagaaaatgattgtgtcttaactgaatcggtagccaatacgttaccacgcgaatctacaatgccaaaaactgtattagttccgccaatgtccatacctactacgtagggtttttccatgcctgttaccatgatatattattatttagggttagttattttgagcaaatgtacacaatgcgaaaaaagagagcaaattttttttcaattatttcatatagcattgcaactttttgtatcttcggcacgtctaaccagacaaacacaagttaaattcatcggtaatgatacatttagagaatatcaacaaaacctatcataacggagctccgctacatgttttgaaaggtatcaacctcgacatagaacgaggtgagtttgtttctattatgggagcttcgggttccggaaagtccactttattgaatattttaggcatcttggacaattacgattcgggagaatattatttgaacgatgtattaatcaagaatctgagtgaaacccgctctgccgaatacagaaaccggatgataggatttatctttcagtctttcaacctgatttcttttaaaaatgcggtagaaaatgtagctcttcccctcttctatcaaggagtgagccgaaaaaaaaggaatcaaatggcattagaataccttgacaaactaggtcttaaagaatgggcgcatcatatgcccaatgaattgtccggcggacaaaaacaacgtgtagccatagcacgtgccttgatatccaaaccgcaaatcatcctcgccgatgaacctaccggagccctggacagcaaaacatccgtggaagtgatgaatattctgaaagaactgcataaaaacgagggactgacaatcgttgtcgtcactcatgaaagtggagtagcaaaccaaacggacaaaatcatccatattaaggacggactgattgaacggattgaagaaaacatagaccataatgcctctcctttcggcaagaacggattcatgaaataactgacacacatgattgatcttattcaagaaatattcggaacaataaagcgcaataaattacgcacgttcctcaccggctttgccgtagcttggggtatcttcatgttgatcgtactgctgggggcaggcaacggactaatccatgctttcgaaagctcatctgcagatatggctatgaattccatcaaagtatttccaggctggacttccaaagcatacgatggattaaaagaaggacgccgcattgaactggacaataaagactatcggataaccgaaaccgatttcctccaaaatgtcatcagtgtaggagctaccgtacgtcagagtaatgtgactttaacatacgggcaagactatgtatccaccacactggaaggagtataccctaatcataaagatgtagaaagagtaaaacctgcaggggggcgatttatcaatgacattgatatccgtcaacggcgaaaagtaatcattcttcatacaaaaaccgcagaaatgctctttaaaaaagacgcagacaaagctatcggaaaatttgtcaacgccaatggagtagtatatcaagtagtaggcctatttaccgacaagggaagtttccaacctaatgccttcatcccattcaccaccttacaactcatatataataaaggtgacaagctgaacaatttgatatttatgacacgaggactcgatacagaagaaaaaaatgaaatctttgaaaaggagtaccgcaaagctatcggcatacaccaccggtttacagctgatgacaaaggcgctatctggatgtggaaccgtttcactcaattcctgcaacaagaaaaaggtatgcgcattctgactatagccatttgggtaataggcatattcactttgctgagtggcatcgtaggtgtaagtaatatcatgctgatcacagtaaaagaacggacccgtgaatttggtatccgcaaagcgttaggtgccaaacctatatctatcttatggctaattatagccgaaagcgtaacaattaccacctttttcgggtatataggaatggtggcaggtatcgctgccacagaatacatgaatacagtggcaggaaaccaaactgtagacgcaggcgttttcaccgaaacagttttcctcaatcccacagtagatatcagtatagccatacaagcaaccatgacattggtgatagccggtacactggcaggcttctttcctgctcgtaaggccgtcatgatccgaccaatcgaagcacttagagcagattaaaattatgagaatagatttagacaggtgggaagaaatattcatcaccattaccagaaacaagacacgtagcctattgaccgcttttggtgttttttggggcatattcatgctggtggcccttatggggggtggccaaggactacaagatatgatgtcggccaactttaaaggattcgccaccaattccgtttttttcggaagtaataaaaccagtgaagcctataaaggatttagaaaaggacgttattgggatatggaatttaacgatgtggaacgtatccgccaagccgtaccggaagtagaagttatcactcccaatatcagccgatggggctctactgctattttcggagacaagaaaagctcctgtgccgtcagaggattgcagcctgattatgaaaagatagaagctcaaaatattacaatggggcgctttatcaatgacgtagacatactggaaaaccggaaagtctgtaccataggaaaacgtgtatacgacgaactgtttccccaaggaggaaacccatgcggacaatatttgcgtgtggatggtatttattatcagattgtaggtgttagcttatcaaccagtaacatgaatatcaatgccggaacagaggatagtgtaactcttccatttactaccatgcaaaaagcatacaactttggaaagcgcattgatttagtctgtattaccgtaaaaccgggagtaactgttaccagtatagccgacaaaatagaacaagtaatcaagaaagcgcactatatccacccggacgacaaacaagcggtgatcatggtcaatgcagaagcaatgttcagcatgattgacaatctgttcacaggcatcaaaattttggcatggatggtaggtttgggaacattactggcaggagctatcggagtaagcaatattatgatggttaccgtgaaagaacgtacaaccgaaatcggcatccgccgagccattggcgcacgccctaaagatattctaaaccaaattctttctgaaagcatggtattgacaacttttgcagggttaatggggattagtttcggagtcttgatcttacaaggattagaagtaggaacggcagcttcgggtacagaggctcattttcaaatcagcttctggatggccgtcggggcttgcattttattgatggtcttaggtatgctggccggattagcaccggcctatcgcgctatggccatcaaaccaattgaggctataagagacgaataaaaccatccgacgtaacggataaagtttccatgcaagaacaaacaagaataaaaaaataataaaacaaacagatatgaaaaagtatgtaaaaattgcactattagtcatcgttgcactgatattcatcggaacatttgtatttctctatcaaaaatcacaacccaaagccagcgtgtatactatattaaacgcagaaatcaccgatctgaaaaagaccactgtagctactggaaaaatagaaccacgtgacgagattctgattaagccacagatttcaggtatcattgacgaggtatataaggaagccggacaaaaaataaagaaaggagaagtgattgccaaagtaaaggtgatccccgaactgggacaactaaactcagcagaaagccgtgtaaggctggcagaaatcaatgccagacaaggggaaacggactttgcccgcatgaaaaaactgttcgaaagcaaacttatcagcagtgaagaatacgaaaagagtgaagtagctgtaaaacaagcacgtgaagaattacaaacagccaaagacaatctggaaatagtcaaagaaggtatcactaaaaacaaagcttcattcagtagtacccttatccgatctactattgacggattgattttagatgtgcccgtaaaagccggtaactccgtcataatgagcaacacattcaatgacggaaccactatcgccaccgtagctaacatgaatgatctgattttccgcggcaatattgatgaaacggaagtaggacgcatacacgaaggcatgccggtaaaaataactttaggagccttacaaaacatggaatttgatgcacaactagaatatatatcccccaaaggtgtagaagaaaatggtgctaaccaatttgagatcaaagcagccatcacagtccccgacagtattaccatccgttccggatatagcgcaaatgcggaaatcgttctggcacgtgccagcaaggtactggcagtacccgaaagtactgttgagtttaaaaacgactctacttttgtatatgtattgactgatagtgtaccttcacaaaaattcagccgtcgtgccgttattacaggtatgagtgacggtatccagattgaaataaagaacggtctgaatgtcaatgaaaaagtacgcggagcagaaaagaaataacagaatatcattatgaagaaacaaatcattatagccttggccaccctgactgcattaccggccgtttcccaagaaaaatgggatttacgtaaatgcattgattatgctatagaacacaacctgagcatcaagcaacaggaagcagcaagagatcaaaatgcagtggatttgaatactgctaaatacagccgtctgcctaatctgaacggtaatgtgggacagtcatttaacttcggccgtgccttacaggcagacaatacgtatggcgaccgtaataccaaaaataccaacttctcactcagtaccagcatccctttatttacaggattgcgaataccgaacaacatcgctctcagcaaactaaacctgaaagcagctatagaggacttgaacaaggccaaagaagatatcagcatttctgtcacctctgcctatctacaaattctttttaatgaagaattagcaaaagtagctcacaaccaagtagagttaagccgggaacagctggaattgaaagaagcttatttcaaaaatgggaaagcatctgaagccgaagtctacgaagcccgcacacgtgtcgcccaagacgaaatgtcagcagtacaggctgacaataactatcagttagctttgttagaactgagccaactgttggaacttccgactcctgacggatttggagtagtatctccccgtgtagaggataatttcactctgctttcacttcccgaagatatctatgcacaagctgttctgaacaaaccaagtattaaagcagcccaatttcgtctggaaggtgcagccaaaagtatccgtattgcccaaagttcctggtatccgcaattaaacttcggtgcaggtataggaacaaactactataatatttcaggagtagaaaatgcttcattcagcagtcagtggcatcaaaattttaataaatacctgcaattctcactcagcattccgttattcaaccgttttgacacacgaaataaagtaaagaacgcacgcatccagcgcactgctttatcatggaagttggaagaaagcaaaaaggctcttttcaaagaaatacagcaagcatactataatgcagtagctgccgaaagcaaatataaaagcagtaatacagctacggatgcttctgaggcttccttccgtctgatgagcgaaaaatatgccaatggtaaagccaacgctactgaatacaatgaggctcgtaccaattggatgaaagccgtttcggatatgcttcaagcaaaatatgattatctgttccgtaccaaaattctggatttctacaaaggagttcctcttactttagaataatttcttaagattcaccacagattttcacagtccattcataatcaaattctgcgttgacctgtggtgaatcatcataaaaatgatctttacaatccggacaattcattgtatctccaactcttatttacatcaattttcgtcgtttttcaaatcatactataccgtacgcatacgcactacagttctctccttagaattacttttattgcttcctcctgaacgttccgaatctttctctttcttaccatttcctcttctcacatccctgccggatggagtaatacgcctattttcatgacggtccttatcaacctgtgagttctgtccacgtcgtgaagggcgcccatcatgcttgttattatgatccttcttcggtctgtccggccttgcctgtggaacagacggacgatgatgatcacccgacggcctgtcaggacggatttgaggtctttttggactaacctgaggaggagtggctgggcgatgatgatccttttgaggaggacgaacaactatattaaaatcacgacgacggtgcatatcatacgtcattctatcatggcggatacgataatgtccgtcgtacacatcatggcgataatggtcacgataatggatcttataataactgacattattgaaatgagtacgataatgccctccgcaataactagcatagtgatgcggtttgccatagtagaaaaaattcacattattatataccagatagatacggaactgccatttgttctcatgcgcataaatgggacggtagaaatgctcagccctcataaaacgacgatattgcgcactggaaagtatccaacgaagatcatcattacgcacatccaaaaaatcataataacgttccaacgcataatcatagcctcttaccacatcatccatcagataacggacattattgataaaatcataattcacctcatatacatcattgtattgctgcggagtgagtttcagttcgtatgccatacggtcggtaagaaaacgagtgttctgtctcattttgctgatactcatggcccccattgcgggaatagttatacctagcatacaaatcactatcagtaatgtagtccatcttttcatagctgttacgtttttagtttgttagttctatggcacaaaaataggggaaatcactttcccccacaattgattttccccataaattcatagggcttttcctatatctggtagggaaaagctccactaagtaaggcgtatcccctcagcttctaaaacaaccagacgttttttatataaatcccccaccgcttttttgaaagtttttttactgacaccaaaagcatcatagatatcctctgcagcacttttatcattcaatggagtgaaaccttcatgatctttaatatattgtaataacacttctgaaaaatcatccaccttctttgcgcctaacttttgcagaaccaaatctatcttgccatcctcacgcacctgctttacataagccttcagccgcataccggcttctaaaggttggaaaatctcattatcgtaaagcaaaccactgaacttattttccacaatagctttaaatcccaaatctgttttctgccatatcaggatatccacttcctgccccagccgataatcgggatgttctttagaaagataatgctccactttagcagatgccataatgcggtaactatcttcgtctatatgtgcgtgtattatatactttctccctttctgcattttcatcttttgttcacggaaaggtacaaaaaggtctttcattaatccccaattcaaaaacgcaccaaactcattaacccatgccacttccaaacaggcaaactcgtccacctgcaccaatggctgtaaagtggtagctatcaacctttcctcattgtcgaggtaaagaaagacattcagcacatcgccaggcttacagccttcgggcacataacgcgtaggcaataaaatctctccgtcatcgcctccatctaaatagacaccaaagtctacttcttttacaacctccagctggttgtattttcccagttttacgttcattagctaaattttttctcaaagataaataaaaagcactatctttactcgctattaacaaagaaaaccccaattagttatggataattttatcttttacaatcctacacgcctcatctttggcaaaggcatgattgcccaattgtcccaacagataccggccaacaagagaatcatgatcactttcggaggtggcagtgtaaaaacaaatggagtctatgaacaagtaatccaagcccttgaaggacgtgattacacggagttttggggaatagaatcaaatcctgatatatctaccctgaaaaaagctatagaatcaggcaaagaaaaaaacatcgacttcctgctggcagtaggtggcggctcagttatagacggtaccaagttgatttccgctggtattccctacgacggagatgcctgggaactagttaaaaaaggcagtgcacaaaatactattcctttaggaactgtgctaactattcccgccacaggttcagaaatgaataacggagctgtaatttcatgccgtgaaactcatgaaaaatatccatttttctcctctcatcctgtattttctatcctagatccgacagtaactttctcattgcccgactatcagatagcttgcggactggcagacacttttgtacacgtcatggaacaatacatgaccaaaacaaacgaatcttatctaatggaccgctggagcgaaagcatccttcgtacattggtacaaatcgctccgcaaatcaaagaaaacaaacaggattatcacttgatgagtgaatttatgatgtccgccactatggctttgaacggtttcattgctatgggagtatccgaagactgggccacccacatgatagggcatgagctgactgcattacatggcatgacacacggccagacactggctatcgtatttcccggaactctacggacactcgccgacaaaaagcgtgacaaaatactacaatatggcgaacgtatctggggggttacttcaggagttcccagtgtacgagtatcgctaaccatagaaaagactgaagaattctttagaaatttaggacttaagacccgtttggatgaagcaggaataggcgatgataccatcgaagaaatagtacgccggttcaatgagagaggcgcagcatacggagaggacggtgatgtaactggagaagtggcacgccggattctgcaaaactgtaaatcgaaaaaagaaacaactgatacaggaggaacgagtatgaaaacagttattcttacttctttcaaaagtgatgtccgagcacacatgttacaggatcttctaaaaaatgaaggtatagaatccatgttgcagggagagtatacagcccaagttttggcttatattccgggaatggaaataaaggttctagtcttcgaaaaagattatgcccaggcatttgaaatcctgaaagccagttttcccgagaaagtataagcataactttcttctacaccattcaaactttctcatccatatcttgttatagggagtattcaaacctaaactaaagatgtacatgagaaagtttttatttttacctttactggcactgctagcttcgtgcggtaaagatgaggattatgacagaagcaatcccaaacctgaagagatggtgactcccgccttatatgccaccattcaacaaaatacgaccgatctttataacggtcctttggaagtattaccttgccggcctgatggcagtatttatgtaggaaattacacatcaaccggaaatcagacccctgtccccgcatattattccatagaaaacggaataggaaaatctaaaaattcccctctaagactgcccgcaggcacctataatatcatttattggggatatcccacctttttcaatactacagacgccgcactgagcgaccctaccctaattttaggagaaaaattactcgacacttcattaggattacgaaaagtccccgtagatactgtttactatcctgtacacgatttagtattcggcacacaagagatcaatatcggtcaagatgaccttcaagcgcatctcattcgtgctaccgccgcattaggagtaatcactaccgaaacaaacggtaacgctttcagcgaaagcatagactctatgtggatttatatcagcaatatctatagtaatctgaattatttctccgcccaaccggaaggaactgtcaaaaccatacgtttcgggttgatccctaacgcagatcgaaaagaattcagcaataaatttgtatctgtattcccatcccagccaaatccaatgatccaagtcttcgtgcaaatgaaaaacggagatttaaagcattaccaacaaaagctaaccacacaacttagtgccggaacaaaaacaacagtcaacctgagtatggacggtgtactactggaagaaggagggaccggaggattccaagtagaccaatggaaagagcagaatgacagcatccatataccattaaactgatctctgctctattaaattttcaaagaaatcctgccatctaccatgtgaatagtacggtccgtcaaacgagccaaattttcatcatgagtaacaataacaaaagtttggcctaatttatcacgcaaatcaaagaacaactgatgaagttcctctttattgcgggtatccagactgcccgacggctcatccgcaaggataaccgccgggttgtttattaatgcacgcgctaccgccacccgttgcttctcccctcccgacaattcagccggtttgtgcgaagcacgttcggacaaccccaaaaaagctagcgtttctttggctttccgcatagcttcggaagaagatgtacctgctatcaacgcaggaatcatcacattctctaaagccgtgaactcgggaagtaactggtggaactgaaacacaaagccaatctgccggttacgaaaagccgacaactctttttccttcaaacaactcacttctgtaccattcagtaaaatagtacccgtatccgccttatctaacgttcctataatctgcaataatgtagttttccccgcaccactgggacctacaatacttaccacctctcctttttctatcatcaagtcaatacctttcagtacctgcaatgtcccgaaactcttcgttattccctgtaattctatcataatcaaattcttcttatcacatactccgccagataacagccaaagactgccggcatataactcacggttccggcagtagatttcttatttttctcatcatctaccaatatcaccgcatcctgatcggcctgctctgtactaaatacaaccggaagttttcgcttcatccccattttctgcaaacgcttccgcacggctttgcttaatccgcaatggtaagtatcccataaatcggcaaaacgaacctgagtaatatcccatttagcaccggcccccatactactcacaatgggcagacgacgttgaagcacattatatataaggtaacatttaggagctaccgtatcaatggcatccaccacaaaatcaaattttgcactgtccagcaattccggaatacgctcatctttcagatactccaccaatacagtcaattccaaatcaggattaatatcacggaaacgttccgccaaaatttccgctttgggacgtcccatagtagagtaaagggccgaaagctgacgattaatattactgggctgcacaatgtctgcatccacaattgtcatacggcctactcctgcacgacaaatcatctcggcagcatacgctccaactccacccaaacctaccaccagcacatgagcgtgacgcaggcgtttcatcttatcttttcctagcaacaactccgtacgttgctgccactctatattaatttcgttcatcacctttcttaaaccatttgtagaaccattttcctacattatcatatactcgtgtttccgattgtccgcgagggtcagaaaaagaaacaatctcttgcggatcgtcccctaactgatccggatacacaatcaacaaactgttattggcaaagtacttgctgatttgtgacggcagacgttcaaaagaagtctgataagagatggaacctttacgcgaagatacaaccacaaacagatggtcataattcacctgtccggtcaataaaagcagatcatcccactcttccaataaagaaaactccgtaaaagtattcgcctcctgtttttctgtcagggcacgcaaatgcttcaatgtatcttctgtagcaaagaaatgcacgcggcatcccaattgtttacccatacggcagagctgtgtcatccatttcaagaaacctttttcatattccgccttatcgggaaccgccaccacaatccggcgcaacgtattgacaggcatcaataatttagcgatcataatctggcggttcgtacccttcaacaagttttccgtcattgtaccaaagaaagaatccatcaaattcgtcttacgatgcaaacctattacaatatccgttaccgcatattctttctgcgtatgaataataccttgcgcaatattcaaatcataacgcaacacagtctttacagacgcatcggcagcagcagcaatcatcgccgtacgctccaagttgcgcttgcctatcagttccttggtttctgaagtattattatcattgatcacactcagtgccaccaatgactctttttgtttaggatgcctcatcatcaaagccatgcctaccaacccttctatggtttcaggattagctaccggaatcaagatgcgttcctgttccttaccttcgctgccctccatcagattttcctgagtcaccattttgcgtgcggcacgttctgtcacaacagaacttataatacaagtgaacaaaatcatgaccaccgtaccattcaaaacatcatcattcaacaaccgctctccattttccataataataccatgacctatcaacacagcggccaaggtcgcagcagcctgtgcattacttaatccgaatatcaagctgccctccaccttcttcattccatatatcttctgggttatccatgcagccagccacttactgaatgtcgccactacggtcattacaaccgccactttcagcgcttcaccttccgtaaaaaggcaacgtacatcaataatcatccccaccccaatcaagaaatagggaataaacagcgcattacccacaaactccagccggttcatcaaaggagagacatgaggaacaaaacgatttaataccaacccggcaaggaaagctcccaaaataccttccatccccaccaattccatcaagcctccgcccaagaacaccatagccagcacgaatataaattgcatcaccgcatcctcatacgtacggaaaaaccatcggctgatgcgaggcattaaaaatatgataagtccgaacagcaaaactaccttggcaaccaacagcacccaaaacagtccgcctacgtcctcacctttatacataccaccaataacagccagcaccatcaaagctagcaccacagtcaccgccgtaccaccaatagtgatactgaccgtccgttgccgcgacaagccataccggctgataataggataagcaatcaaggtgtgactggcatacatactggccagcaacacagaagtcaaaaatccatagtccagcatactcatgctgctccatatgcccagccccatcgggatgaggaaagtaaacataccaaagatcaatccttttgtcctgtttttcttgaaatcgtccatatccatctcaagaccggccaaaaacataatgtagtaaagtccgacctttccaaacaattcaaaactgctgtcacgttccagaatgttaaagccatacttgcctaccactaccccggcaagtatcataccgatgatatgcggaatgcgtaaacgccccaaaatcataggggcaaacaggatgataataagtaccaggaagaatatccaggtaggatctgtgaccggaaaatgtatgttaaggtcgaataattccatctttttttgagttttataccattatatcgacaaaattacgaaaaaactttcttttttactgatttatattctaaaatgttctaattttgcacgcagaacatacttacatgctgagagatagttctaaagtattactaaattttatcttataaaacaaaaaacaaaatgaaagtagcaattgttggtgcgagcggagctgtaggacaagagttcctgcgtgtgctcgatgaaaggaacttcccgttggatgagttagtgttattcggttcttcacgcagtgcaggacgaaaatacacattccgcggtaaacagattgaagtgaaactccttcagcacaacgatgactttaaaggtgtagatatcgctttcacatcagccggcgcaggtaccacaaaagagttttgtgaaaccattaccaaacatggtgccgtactgattgacaactccagcgcttaccgtatggacgccgatgtgcctttggtagtacccgaagtgaatccggaagatgctttgaatcgtccccgtaacgtgatagctaatcccaactgtacaactattcagatggtagttgcactgaaagccatcgaaaatctttcacacataaaacgtgtgcatgtggctacttatcaagctgccagcggtgcaggtgcagcggctatggatgaattgtatgaacaatatcgtcaggtattggctaatgaacccgtgactgtagagaaattcgcttatcagttggcattcaacttgattccccaaattgatgtatttaccgacaatggatataccaaagaagaaatgaagatgttcaacgaaacacgcaaaattatgcactccgacattcaggttagcgccatgtgtgtacgtgttcccgccctccgttctcactcggaaagtatctgggtagaaactgaacgccccatttctcccgaagaagcccgtgaagcctttgccaaaggtgaaggcctggtattgatggataatcccgaaaagaaagaatatccgatgcctttgttcctggcaggtaaagatccggtttacgtgggccgcatccgcaaagatctggcaaacgaaaacggactgactttctggatcgtaggcgatcagattaagaaaggtgcggcattgaacgctgttcagattgccgaatacttgatcaaagtaggaaacgtgaaataatttgtgaaataattttttttataatctttatctttgcgccaatcattgatttaatgaattgaccaagataaagattatatcgtttattacagttattcgtccgtcaaactatccccacaacattatgctgaaagaaaaaacacttcggataccgaaaggacgaagtttttttattctgtccccgataaaataaaacaatctccttgttcccgtcaagacttctttttgatataataagccttataagccttttatcccccgacctttaaaccattccttacagataatggaacgtagcaagcgggcatataaagcacttaaccatatgaagaaaaacagttagtcataccccaaaaaacatttcagcaaacaaaaaaatggtttgtcccacaaataagaaaacaagatcgtcaaataaaacccgattcattcaactgccatagctcaaatcatccataaaaaaagagtatcacaataactgcaatactccttttaatcttttatgataactgtttattcagcaactaatacatcatcaacacttctttccgtacctttcaacggggatatgccaaccaaatttacattaaatatcaatgtggaatatccgggaatatcactatatccatcctttccatatcccaattgataaggaatataaagttcccattgatctcctactttcatacctccatatcctttcatcaaggcagtgctccatccggcaatcaccccacctgcaacaaatgtctttggagtagctgtttccggatcaagttctccttgataactttggtcaaagactgttccattaataaactgaccacgataattcaccgctaccgtatccgtggcaatcggacttgtagtaccatcaccaatcttaacaatcttgcagtaaacattatcattcacctttcctgtctcattcaatcccaaaggaggaagtttatacgatctgataattttccattgtcctacctcattgccttgattagcttccgccactgtagcgatggagtcaatatatctctgattacgttcctcccagtttgcatacgggtcttctgttccatctgattcactacatgaaacaatggacagagaagcaacaaacagcagactaatcagccaaagaatacttttattcataaattcctgtttattattgcaaagtcttcagcagacttgttatacttactttatcggcaatgatattgttcagttccgaaatagccacacgctcctgctgcatggtatcacgattacgcaatgttacgcaattgtcctccaaagtctggtggtctacagtgatacaatatggagtaccgatggcatcctgacgacggtaacgcttgccgatgctgtctttctcatcatactggcagtggaaatggaacttcaagtcattcataatctcacgcgccttctcgggcaggccgtctttcttcaccaacggcatcacggccagtttcaccggagccagagcagcaggcaatttcaacacgacacgagtttcaccactttccaatgtttcttctgtataagcagcactcataatgctaaggaacatacggtccacaccgatagatgtttcaataacatacggagtatagctttcgttcaattccggatcgaaatacttgatactcttgccactgaacttctcgtgctggctcaagtcaaagttcgtacggctgtgaataccttccacttccttgaatccaaacggcatcaggaattcgatgtctgtagctgcgttggcataatgtgccagtttgtcgtggtcatggaaacggtaatgatcatcaccgaaacctaatgctttatgccatttcaaacgaatttctttccatttggggaaccactccagctcagtaccaggttttacgaagaattgcatctccatctgttcaaactcacgcatacggaaaatgaattggcgggctacaatctcgttacggaaagctttaccaatctgagcgataccgaaaggaatcttcatacggccggttttctgtacattcaggtaattgacaaaaataccctgcgctgtttccggacgaagataaatcttcatggcaccatcggcagtagaacccatttcggtggagaacatcaaattgaactgacgtacttcagtccagttcttggttcccgaaataggacaaacaatctcttcatcaatgataatctgacgaagttcatccaaatcattgtcgttcaaagcttttgagaatcgttcatgtaaagcgtcacgcttggcctgatgctccagaacacgaccgttggtgctacgaaactgagcctcatcaaaagcatccccgaatctcttggcagccttggccacttctttgtttatcttctcgtcatatttggcaagctggtcttcaatcagcacatcggcacgataacgttttttagaatcgcggttgtcaatcagaggatcattgaacgcgtccacatgtccggaagccttccaaatagtaggatgcataaaaatagcagaatcaattcctacgatgttctcgtgcagcagcaccatactctgccaccaatattgcttgatattattcttcaactccactcccatctgaccgtaatcgtatacagcgcctagtccgtcatatatatcactggacggaaatacaaaaccatactctttacagtgcgatactaatttcttaaaaacatcttcttgtgccattttcttatctgtttattcttacacttttgttgttttttcctgttttcaacctttaataagggcgaaataatatgcaaagtaaatgatttttttcaataaaagtcgtatttttgcgtgcatatcatcagaacattaaggaatttaaatatatatgagcgacgattttattgataaagaggaacaaaacgaagaaaatatccccacaccggagaacggacactcggactataaacctaccgataccaaaaacacaggggtgaagcaccagctgagtggaatgtatcagaactggtttttggactatgcctcttacgtaatattggaacgtgccgtaccgcacatcaatgacggtttgaaacctgtccaaagacgtatcctccactctatgaaaagattggatgacggccgatataacaaagtagcaaatattgtaggacataccatgcagtttcatccgcacggcgatgcttccataggcgacgcgttggtacagctaggccaaaaggatctgttaatagactgtcagggaaactggggtaacatactgacaggagatggtgccgctgccccccgttatatcgaagcacgtctatccaaatttgcattggacgtggttttcaatcccaaaaccaccgaatggcaagcgtcatacgacggacgaaacaaagagccgatcaccctacctgtcaaattcccgctcttgctcgctcagggagtagaaggtattgctgtgggcctttcttccaaaatcctaccacacaattttaacgaactgtgtgatgcctccattgcctatttgcgtggtgaggaattcaaactctatcccgatttccagacaggaggctctattgatgtatcccgctacaacgatggagaacgcggcggaatggtgaaggtacgtgctaaaatcaataaaatagacaacaaaacattgtccatagccgaagtgcctttcggaaagactgtcccgggggtatgcgactctattgtcaaagccagtgaaaagggaaaaatcaagattcggaaagtagaagatcttacttctgaaaaagtggaaatcctagtgcaccttgctccgggagtatcctcggacaaaaccttggacgcgctctatgcatttactgattgtgaagtaagcatatcccccaattgttgcgttattgatgaaaagaagccccacttccttactgtcagtgccgtccttaaaaaagccacagacaacacgttgtccctgcttcgtcaagagttggaaatacacaaaggagaattgcttgaaaaccttcatttcgcatcattggaaaaaatctttatcgaagaacggatttataaggaagtaaagttcgagcaatccgaaaatacagacgccgcctgcgagttcattgatgaacggctgactcctttctattcgcaatttatccgtgaagtgaccaaagaggatattctgaagttattggatatcaagatggcccgaattctgaagttcaacaaggataaagcagatgaaaacatagcccgtatcaaggaacagattgaagaaataaacaatcatctggcacatatcgtagaatataccattgactggtatcagatgttgaaagataaatatggcaaacaatacccccgccgtacagagttgcgtaacttcgataccattgaggcggcgaaggtagtggaagctaacgaaaaactctatatcaaccgcgaagaaggctttatcggcaccaccttgaaaaaagatgaatttatagccaactgttcagacatagacgatgtgattatcttctataaagacggcaaatataaagtagttcgcgtaacagacaaaatgtttgtcggcaagaatgttctctatgtcaatatcttcaagaaaaacgacaaacgtaccatatacaatgtggtttatcgtgatggaaaagaagggtttcactatatcaaacggttcaacattacctccatcacccgtgaccgtgaatatgatgtaacgcaaggtacacccggctcacgtattgtttactttacagccaatcctaatggagaagcagaggttatcaagattaccttaaaaccgaatccacgtatcaaaaaaatcatatatgaaaaagatttcagtgacatcaatatcaagggacgccagtccatgggcaatatcctgtctaaatacgaagtacataaaatagccttaaaacaacgtggcggctctactttgggtggaagaaaagtatggtttgaccgggatgtgctccgcttgaactatgacggacgcggtgaatatctgggagaattccaaagtgacgaattgattttaatagtccatgaaaatggagaattctatactagtaacttcgatttgaataatcattatgatccgggaatccgcatcattgagaagttcgacgccaacaaggtatggtctgccgctttatttgatgccgatcagggatatccttatctgaaacgattcacttttgaatccacttcacgccgtctcaattatttgggcgagaacaaggaaagccgttctatattgcttacttgtgtggtttatccacgcatacaagtcatattcggagaacatgatagtttccgtgatccattggaaatagatgtggacgaattcatcggaattaagagtttcaaagcgaaaggaaaacgaatcagtacttacaacattgaacaaataaacgagctggagcctttacgttttcccgaacctcccaaagaagaggacggtgcggaagaggggactgataaaaatgaagaagctgctgaaattgaagatccggatcatggtaagagtgaaacagatatcattgatgaaattaccggccagatgaaactgttttaagaaatgaaaaaaattctcctattattactgtccctgtttcttggtctgccttcacaggctcaggaagacagcttacgagcaaaccgctacgttatgagggctactctttacggtgtcggttttacaaatatattggacacctatctttcaccgatggaatataccggacccgaaattcgtatcctgcgtgaaagtatgcgcatgaccaaactgatgaatggcaacgtatctgttcaaagtctgttccaagccaatctgtccctgactgagaataaagcagaaacaagtaacgaaatgtcaggtatggtcaattggaattatgcactgcattaccagttccggctgacagaaaacttgaagatactggcgggtcccatgctggacttgaacggcggattcatctataacatgcgaaattctaataatcctgcccaagccaaagcatatgtcaatctggcggcatcgggtatggtcatctatcggttccatatcggtaactatccgctgatagcccgttatcaagccaatttgcctgtcatgggggttatgttttccccggaatacggacaatcttattatgagatattcagtttaaagaatggcggcaagaatgtgctgttcacttccctgcataaccaaccttccttgcggcaattggttacattggattttcctatccggtcagtcaatatgcgtttcggatacctatgtgatatccagcaggcgaaagtcaataatctgaaaagtcatatatggtcacacgcctttatgataggtttcgtgaaaaacttctatttattaaaaggtaagaacaaagtggcgatgcccagccgggtcagcccttattaatatagagaatgaaaagaaatagttatttttttatcagtctgttattgtctgttgtattatttacttcgtgcatcacggaggacgaatacgacaactcccccgaaggcaacttcgaagcgttatggcagactatcgaccgccagtattgtttccttgactataaaaagcaggaatacggattggactggaatgaaatatatagccagtacaaacagagaatatcaaaaggcatgaataatgaacagttattcgaagttctggcagatatgctgaacgagttgcgtgacggacacgtaaatctgtcttccaaactggagtactcccaatatcgtgaatggtttgacagctatccggccaatttcagcgacagcatccaacgtgtctatctaggtaaggactatgcccaatcctcaggcatgaagtatcaggtattcgaggataacatagcctatatttattgtggcagtttccaatcaggtatcggcgaaggaaatctggacgagattctaaacaagctggctatttgcgatggattgattattgatgtgcgaaacaattccggtggtaaccttaccacagccgagaaattagccgcacgtttcacgaatgaaaaagtgttggtaggctatatgtcccataaaaccggaccgggacacaatgatttctcaactcctaaagctgtttggctggaaccgtcactagatcgcgtacgctggcaaaaacaagcggtagtgctgactaaccgccgctctttcagcgccaccaatgattttgtgaacagaatgaaaatactacccaaagtaaccatcatcggtgacaaaacaggtggcggttctggtctgcccttctcttctgaactgcccaatggctggtctgtccgcttctcggccagtccaatgtacgatgcgaatatgcaacatctggaatttggtatagatccggacatcaaagtcaatatgacctcagaggatatgcaacgcaatgtggatacaattattgaggctgcacgtgaatatttacataaccacaaagaataatttcctaaaaatctttggtacttaagaaatattccttatctttgcacccgcttaccgaaagcaatgtcgcgcgtgtggcgtaattggtagccgcgccagacttaggatctggtgtcgtgagacgtgtaggttcgagtcctatcacgcgcacataaaaaagagttctgaaaattcagaactcttttttatgtgtattattcatataaatagaacatcctatccattaatctccatttttgagcagaagaagcatcggaattgcataactgaaaagctgatacgtattcctcccactctgattggcgaggcaaggatgctaattgttccattgccacattccaatcaaaatccaatggagtctcaacaatcataaacaggtggttcttttctatatatatttccatctctaaaatacctaccgaacgaattccctttcttatctccggccatgattccaccttactatgacacttccgatacttcgctattaattccggattatctttcaaatccattgtttgacaatacctctttaccggataatcatacctttttatttcatatcctttctctttcattttattatatatacttttatacacaaaagacattctccccatacaaccaataaaatccaatgaaataataaacaacatcaaagtctttattaaatctcaactttaacaactgatatattaatattaggattttctgatgggagtactatttccaatgcttcatccgtttgaacaaacttgatatgcttatcatatccaagtaactctaccttttttatcttaccaagatttacaatattgaatgattttataacaactttacctcctctccatttcatcatataagcataaaatgtactcttatctttttgagtgaaacgccaatcaaactcagatttattcttttccacagtgggaccttcaccatacaccatccacgcatgtgtaccataaacagcctcaccattgattttcatccaatgacctatttgacgtaaaacctcttgctgattctcagggatagtcccatctgctttaggggatatattgagacaaagattaccattcctagaaatattttcaaccaatttgctgattatttgtgatgaagattgtatttgtaatccttcaatgtaaccaaatttattaccaatgggttcatccacttgccaataatgtgaagttatatctttaggtgcccttccttgtcgttcatagtctgtaatagttccatatagataagcatcatgttttgtacttaaagacaccggcttatcccattgtgcggccctattataataatatgcagcaagacgtaattttaacgggtcaaggctacgactattgattccattgtcaaaccaaagaatatccggttggtatttatcaattatttcttggcatcgtgccagccattcttccagaaaaccttggtcttgtggagcttccttgccttccataacttcttcggcagacggtcccatcgcggaagctttgtttttatcaggtttctgtgggggaccataaaaatcagcatactcaggatcatacaaatcatgttctgttgctgccgtcggatacataaaatcccaatgttccatgcgatgattagaaactccaaatttaattccttgtcttcttacagctttagccaaatctcctatcaaatcacgtttcggtcccatatcctttgcatcccatcgggtaagtttgctatcatacaatgcaaaaccatcatgatgctccgctgtcggtattacgtatttggcaccagcttctttaaaaagtatagcccatgtatcaggatcaaatttttctgcggtaaacaaaggaataaaatctttataaccaaattttttcggatttccccaattttccgtatgatgtttcaataatgcaccatacatatgacgtggataccattcacttcctgtagcagcaacagaatagactccccaatgtataaagattccgaactttgcatcaataaaccactggggagttttataattatcttttaaagactcccatgaatcagtaaaaggtcctacaggaaaatcagcagctctacctccagataattctatagatttacgaggaggaggttcttgctgagcagaagcagttacagcgacaaatgtcacgattaatattaatagttttttcatggctttatatttttagttatttatattttcaattcgttctttcattatttttctcccattaatagtcaaattcttgacatcaattgccataattacagggcgtacatctttatttatagtagttatattcacattatttataataacattttcaagatgtctcagatatataccgtatgccggaacagtccctccaaggtatccatactccggccatcttcgtttatcctgcaattcaaaccattctttagaaaattctccaaaaatattattagcatcttttactgttccaccaccagctgtacgtattataatatctgacaatgtgatatttcagatatagtttccaggtatactagtcattactattgccgaatttttatcaaggccagtattgtctacatggatatcactaaaggtcatatcacccatagttttcatttcaggatactcttcctcaccgtcaacataagctcttaagctagtatgagtcataaatatgggacgtggaacattaatcattaaaagattggtaaaaagcatattcttcatttctgcaccctcattcatctgtatcttcagccccgaatcatttgtatttcgaaatatacacgatgatattattacattttcaaaattagctcttgaaagcaaccctattcgacccccagcccaacgacttgaaaattgacaatttgtaatagtaatatcctgacaagaatgatctttacttgaagtttggaggcaaattgagtcatcactggtatcaaaagaacaatttgaaacacgtacatttttacatccatcgaaatcaagaccatctccattgcctctaactcgcgcccaaacagatattccttcaattactatatctctgcaataaagccatgctgaggtccatccactaggattttggagcatgatatcatgcatacgaatattttcacaatttgcaaaacgtatgagcataggacgatatttaattcctggtattttattgggaaaggcctctccattaccatcgattattcctcctccttctataccaataaatttctgattgtgagcaaaaacaagacaacgatccatataagattcatcacgatacatgtttttcattacattctctgcataatcttttatatctttacttcctgacagtacggccattttttcaatacgcagtgttactccactcttcataaaaatcgttcctgttacataattgccaccttgaatgagaactattcctcctccttcggcactacactcatcaatagccttttgaatagctttagtattaattgtcaagctatcaccaatcgcaccataatctcgtatatcatagattttcccaaaagataatgttgaaactgttactaataaaagtaacaagactaagttcttcatatttttattttattcattgtattcatttttccatactttcatccatttagccacccattcctcctttttctcaagagttacgaaaggctgctccttcgcgacgaataccctaccatccgaagtaaaatcaacgcgcacaaaacctactttttctctgaaatgtgattgagagtcattaccaaaatagctacaccaccaatatctttctttatctctaaaatatcccgtgccacccccacaaggaactccttcatggcgcttcttatacggaccataaatattatctgatatggcaaggcaggttgaataccttccttcataattatccgcagcaccaagataatatttaccattacgtttaaaaagcacagcaccttcatgcccgagatcattcattccacgtggttcacatttggctgcatgatgatggggattattatcgggctcatcaaatataatttgttcaaatggtccggcaaatccactcatatcatccttcatcaatgcaatacgtgtggcagcaccataagtgaaatatactttgccatcctcatcttcaaacaaggtagcaccaattcctccactaattattggcccgtttacattaaaagcatctacataaggtccttccggttttcccgttgaactttttagcattcctattccatccggacacatactgaaaacaataaaatagtttcttttaatataatgtatttcgggagcccatattgatctcactgctctacggggatgtttacgccaatcttttacccattggtcagcttctttatctatattccatacgagtcccatatattcccattcataaagatcagaggatttccagagttcaataccttgagtccaagcccatatattatcccctatagatcctgtcatataataattgccgtccccaccaagagtcactactacatctcgtatatgtaattcaagcgctggtttaaaaggaggtatcaggcctctctcaaccgcggaaccggtagccattccactccaagtcatattcagatttaggatataagcctgaatattttactccatcaataccacttctccaaccgccccaaccatcacctactattggacaaccggggccactgatacccgaaaattgtttcgcccattctacttctttttgagaaggaacaaattcagtttgagcaaacacgggattcataatcgtccaaactaataaaattataattttattcaaacctttcctcatctttccaatttcattatcgaattataaaaataaaacctctttcaacgttccaaaagaatctggatacatcacgtacacagattcttcagttctgtcaacatttgaatataaattcaacatttctatttaattcaataacttgacaggctttctaacttttgttttaaacttaggcattcaacatagactttgcaaataccttataaatttattttcaagaaatataaagcaaaaaaaattatcttttaccacaaatgaactaataacctagattattcttccatgaagtatgtacattcatcacagtcaatggtataggcaatagcatatctttttcagatggaacacttgctcccatattagcaacatgtccataatgatctgaaaaagttttaagtgtatttaagaagatctcttttccacttcttaccagatcaaaataccgttttccttctcctaaaaattcacatctacgttcatacataatatcatccattgtcggaatatgatccagttctggtaatcctgcacgccgacgaattgcattaatccattcagcagcctcatttgctttaccgttattaattaatgcttctgcatacaacagataggcatcagcaggtcttaaaagcggataattcaatggataatcattccaagcctttatagtattattcgtattatcctttgttaaaaatttaaccataattgatcttaccacataatgctcaatactgtcttctgtagtatatccatgatctatcgtatcccaaaagccatctgctacagatgtttccaatctcttatctcttgcattcttcatttcttgaactaataatgtatccactctaaaatcctgcccctgctgattatatccctgataagcccattccggaaaacatgttcctgtagagcctgaggtagttatatacgcagccaatgaagatcccaatccttgattacctgaggcaaattgtatcgaaaataaatcataagtattctctttatttacatcaaatatatatgaataatcaggtgcaaaacgctttttagcttcaggcataatctcttttaatattttttccgcatttacatatccctgattatccaacaaaggataacctgccattgtaacatatacctgtcctaataaacattttgcagccacagcaccaactcttcctagctcctcctcgtcataaaaaggttccaaattagcagcggcatattctaaatcagagataattagtttatatgcatcctcaataggttgacgttccatctgcctagcctcattattagttataggtctgtcaaaaacaggttgtggcccataagctctcactaattcaaaataagctaaagcacgtaaaaatttagcctctgctctatatcggctatattcttcagatgcttttgataatagcatattagcatcatttataagttgatacaaacgtgcgtatattgtttgatttaatccagtaacatctgttacttgaaagttcctcaaatctacctgatcacgttgtgctgtcgccaaagttgcataatataaattatccgaacgactttcagatgcttgataataaaaatccgtaggaaagtccgtgtttgtcttattacgtcccaaacgagcatatactcccattacagcttgctgtatttcatattcattagaataaaattgatctgttgtattattctcaactggatagatatccaaaacatctccacaagaagataaacccaacaatacaactatgtatttataaccatagaacaaccaaaactaatcagaaatatccgagtgtaaatctttaattaccagcatattctaaaatttaacacttttcggttgccatttgtcgcttcccaaatttccacatatttttgagacgtatttctgacgtggagaatttgcggggcttgttttttgtcacaccgtgcagacagttgacaagggtttacaaccgtttacgacaagcgacaataaccgccccgatatgcggaaacagtcacactgtgtagaaaagcgacaatggttgacttccgttcacatccgtttaccatttcagagatataggattgaagaaatgaaccattaaacgataaaacggtatgaaagcaaccagaaaatgcagtttttgcggcaagtcctttgtaacccgaagcggtatgcaaagatattgcagtgaggcttgtcaggcagaagccaaacgagccagagtgatgcagaagaacaacctcttcaaagtcgcccaacccttgatggagatacagcatcaggagtatctcaccttttccaaagcagccatcctcatgggctgttcccgacagtacatttacaaacttgtagccatcggcaagctgaaagcctcacgcatcagcaaccgcatggcattcatccgcagagccgacatcgagcagatgttggagggcaatccctatcaccgcatcctgcccggcaacacctccacaccaaggaaatcatcttcatcttccttacctgccaaaagagaaaaaagggaaaaggaaagcgaagaagtgttggacttctattcgggcgaggaggtgatgtccctttttaaggtaaagcagtcatggctttacacttccgccaagcgtaaccatatccccatctgccgtatcgcaggaaagaactattacagcaagaagcatattgacgagtttttcggtgtggcagttgatattagcgaaattaccgactggctactgaccgaggaggtggaggaactgttcggcatgaagccgaccgcactccgtgcctacacctatcgccataagatacccactaaaagagagtacgggcgtacctattactccaaatcacatttgaacgaactccgcagaactgaccttgtgaacgatgaacgctactataccgttgagcaggtgcagcaaatctatggtctttcgtcagccaacatctgccatatcgtcaaggtgaagcacatcgaaaagataaaggtgggtgtgaaaaacctgcttttgcgctcagatgtggagcgtgtcatggctgaaaggaacaaataaccgtgaaaaatcgggattatcgaaaattatttcaaaatgatgtatcgtggaggtattcacggatatttcacgttgttcctttgccatcggaaacatggatacaactccaaaatgtatacaaccaattaaaacataattattatgagtaaatgcaaaacagttaccttgcgtaagcgcaagattaagaacgggacacagtattcactatgccttgactactatcccggctaccgtgacaatgtcaccatgagagtgattacacgtgaagccttaggaatttacatcttcgccaaacctgcaaaccagcaggaacgggacttcaacgcacgcatgatgaagaaagcggtcatcctgcgcaaccagcgctacgaagccattttcaatgaaaacaacggcttttttgacaagaccaagatgaagggcgatttccttgcctatttcaaaggactggctgaccgcaagaatatcaagtggcagcacgtatacaagcatttccagcggttcgtgaacggcaaatgcacctttgaggaggtggatgtggatttgtgccgcaagttcatggaatacctgcttgatgcaccccaatccatccacaccaaccaaaagctgcacatcaactccgcagcaggctattggtcaactttccgtgccgtgctgcacaccgcttaccgtgacaggaagataaaggagaacccaaacggcttcttagaccgcatcgagtgcattcccaccatcagggagcatttgagccaagaggaactgatacggcttgccgaaacaccctgtgaggaggaggtcttgaaaaaagcttttcttttcgcctgtcttacgggactgagaaagagcgacatcagacagctcacgtggcagcagatacaaccatacaccaacggcaggatgttcgttaccacccgtatgcagaaaaccaaagaaatagtgcataaccccatcagtgatgaagcctatggactgctgggagaacggggcgagggacttatctttgaggatttcaaggacaagatgctgcaaggaccactccaacggtggctcacggcagcagggataaccaagaaaatcacctttcactgtacccgccacagcttcggaagcctgcacgtggaaatgggaacggacatggctgtcatccaagcctatctcggacataagaacattaccaccacacaaatctattccaagatagcagcgcagcagatgtgtcaggtggtggacaagataaccttgaagcgcaaggaggcataaatgtctcacattgacaggtattcagaggggcggttatggctacaaggctataatcgcccctctatgtttttggcttgatgccaccatttataagcccctcagagtatgaaacagagtatgatatgatgacatttcgtgaaatacattgaaaaagaccgttctaaccgcaaataacgggcagtaattgggaaaaatagcattaactttgcacaaaataatacaggaacattcaatctctcaacgaaatatggaatcatcaatcaaggacaaatacatcatcttgggctttgtcggcttcgccatcgtcctaatatcttccattgccacgctggtaatagcggacagcttcaaccaagacaactttgtcaggtggatagtattcgtatgctgtaacctgttgggatggttgctctatctctcctttcagacacttatctttgatacatacgaaatctacaaaatcaagttcggcaagaaagaaacgattgccgaagccatagaggtgcaggaagaactgtcacaaaatacacttgaagaagccacatctgtgcctggacctacatcagtccctgagcctgtacccgaatcatccccgacaaaagaagagacacttatccaaacacaaccgatagagcttactatcgccccggatcttcacgaaaagaaccgtgccaattacgcaagcagagagcaacgggaaaaggaagagcgcatccgcatggtcatggagtattgccattattacctgcctcgcattgccgaccaagaaaccgtgaaccacatctgtactgaggtggacaaatggatgaatcttaacacttataccccgaagcccatacaaagaccgtttaccaaagacatcaacaacattccactccgtcacttcgtatggaatatctctgagcgtttcctgtacaagagatactacaatggggataaccgtgccaagttcatcaaagcccttttcccgaaatcgtttgctgatacagacttatcaaccatcaagaatttcaaggtagagccgttaaagacggaaattcccattgatgaacccgaaaacggcaaacttgatttccactatcccgaggattatgtgcggaattaggataatcacgacaccaacgacaaccatccggtaactcataaccgcctgttttacatcgtttcccgagtaattttacccgtcatttatggctgggcttaattattcgggaattattttgcaatgacgtgtcgtggagatattcacggatatatcatttcagtcctttgcgccaagtcttacaaaagagacgagtacgcgaatggaaaaatcaattcttaccttcaacgacctccccgaggttgtcgctcagcttcgagacgaagtgatgagcctgaaaagcctgctcgccgagcagcgcagtgtgaacaatgccaaaacggtggacacccacgtgcccatgtctgtggacgaggcagcagagtatttaggtatccctaagggtacgctctacatgaaactgtcagaagggacaatccctgccaccaagcccggcaaacgctattgcctttaccgtgacgaactggacaagtggctggaaaccgcccgaaagaatcccataccgttgtcagacgaggaactgaacaagtccttatcctcttcccaccgtcgcaagcccaacccacgtaactggtgaatgatatggaagaggataagaactatatcaacctgatacgtggcgacctcacaaaagcatcccaagcgcataacggtatgcccgacagtgtaggcatgatgaatatcaagacggcaaaccaaaccattcttgaagcatcgttattgcctacgccccgtgcgctgtgggacagcttttggtacgagggggaactctcctgcttgtttgccgattccaacgtgggcaagtccatccttgccgtgcagatagccgaccgcatcgcccgaaccgacaatgtgctgtatctggactttgaactgtccgaaaagcagttccagctccgctataccaacgagcatggagagctctacacctttcccgacaaactctatcgggtgtctattgactgcaaccagcttttggatgccaactttgaggaagctatcataggcggcattgaacagatggctgtgcagaccgactgcaagattttcatcattgacaatcttacctacctgtgttgcgccatggagaaaggcgatgccgcaggacggctgatgattcagctgaacaatctcaaaaagagatatgcgctctctatccttgtcctagcacatacgcccaaacgctctttggattgtcccatcacatccaacgaccttgccggaagcaaacggctctacaatttctttgacagcgtgttcaccattggaaaaagtgcccaagacggagggcttcgctatgtgaagcagcttaaagtgcgctatggcacgttctctcatgatgcggataatgtaatcgtttacgagattgacaaggtggatgctttcttgcagttcgtgttcaggggctattccacggaaaaggaacacttgaaaaaattgggcgacaatgaatcaagccaaagggattgccaaattctgcaactctcccaatcgggcaagtccgtcagggagatagcctcacaggtgaattgtggcaagtccaccgtaaaccgtatcatccagcgcagcaaagagagtaaaaacgcaggtgtcccaagtgtcccactgtcccaacccttagagtgtgggacaatgggacaggatgggacagccgacaatcaaccatcaaaaacggactaagctatgggcaattattcattacagaagtataaaggaacggcaacacggcatacctgccccaaatgcggagacaggcattctttcgtctattacgtggacgaaaataatgtgccgttgcatccatcggtcggcagatgtaaccacgaaagcggttgtgggtatcactacactccgaaagagtattttcaagagcatcctgaacacagaactaccaatgatttctcttttgacaggcaaagagcagagcagaagaaagtgaagcagcaaagtaagccgacagccatcggctatattccccctcactatgtggagaagtcgcaaagcgagcgtagcaatttcttccgtttcctcttcacactccttacttcctactatggcgacaaggcgaaagaggtgttgaagcggttgttggaggaataccgtttgggggctacccgtgacggctctgttatcttttggcagatagacaggacgggcaaggtacgcacgggaaaggtgatgcagtacaatcccgaagacggacaccgtatcaagggaggacagacatcggcagtgaactggatacacagcatattgaaaaagcagcgtgtgttggcagaggattggcaactatcccaatgccttttcggggaacacttgttgaaaacgcatcccgacaaggtggtggtcttggtggaatccgagaagagtgccgttatcggttctgctatcttccccgattatgtatggctggctacgggtggtaagagtcagatgagagaagagaaactccgtgtactgtcagggcgaaccgtgcttctctttcccgatgccgatgcttatgccgagtggaaacagcgagccgagagcatgtacttttgtaaggtggtggtttcggacatcatcgaaaggaatgccaccccgaaacaaaaagaagcccatatcgacatagccgattggattatctttcagatacgggagggcaaggtgatgagtacagccaaccacttggtcgaggctgagagaatcctccagcggatgatagagaagaatcccgtcctgcaaaaactgatagacgatttagaccttgtgctggtcggtgcatctccaatcggcaacgatgatgaaaaacctccctgacggaggagagcggaagccgtaggctggagtttgcagacaatggcttgccattgatatagcccactataactacacgctccgcttacgtagttgtgggctctcccgaggggattagggttttaccctaatgacccactcagggcgtttctcccctgagaacccagagcaaagagtgaccctctctttgcaatctccgcttatgggttgcacccctaagaaccccatgcgtttacggacagcggaaaagcaaacaataaagtacaaacccaaaaaacaagtatctatggcaacaaaatcaagcatacatatcaagccctgcaatatcgcatcgagtgaggctcacaacaggaggactgccgaatacatgcgccacatcggagagtccagaacctatgtggttccagaactctccaccgataatgagcagtggataaatcccgacttcggcagtccggatttgcggatgcattatgacaatatcagacagatggtaaaggaaaagaccggacg

SEQ ID NO: 14448 - DNA, 79760 bp, Unknown
  gut microbiota DNA sequence
cggcataagtccatataacgaagcccatccgccataaattcacatcggcgctcacgacgtatattatagagagttgcgtctattaacttaccaccggaatacgctccccaatcattttcagcctctttactcatatccgttaaagcaatagtcttttgaaaatcctcatctacatgagaacgacggcggataattttccaatattcggtcgctgctccgtccaaggtaccattcttttcataactggcttccatgtaattcaacaaggcttctgtcgcacgataagcaatagaggcggtatatccttttgaattggaataatatttctgatggaaagctcctcctttgcgtaaggcatacccagttacataacggcgtgctccgtctgtaatggtaatcaatggataagtttcttcaacattggcagtctcaccaaccacatcttttattaagatgttatgttgtccgggttctttcagaaagataaccaatcggctatctctgttttgacgaacgtcgtgtatggttttgtctcccatataatatccatctccgttcatataatcaccatgggtataaacaggagtgccgtcagccatcaaaaagttattcacaaagctgcgagtgacacccacgccattgtttccccagctggcatatacatttacgttgtggtgcactaagttataagcgtatctacgccataacagaacttcgtcgactgaagataaatcttcttgagcaaacatgtcaaaataagggttagcatcttcgttagttgactgctgcagaacgcctgtattttctgtaagtctgtttttatagcgttctgcgatatctttagaggcagtcatggcgatttccaagaaataatctatctcactgtcaatattcccactgggatactgataagtggaattataatcttttgtcttgccaagccaaccgtcaccattgggtacaaaagccgtattcttaaaatatttcaaccaagtaccttcaaatagagccacacgcgactttaataaaatagcagcatccgcatttattctggttgtcggcatatttttagcttttaacaaagtaatagctttatccaaatcacttagaataaagcgagccacttcattgcgtggtgatcgtttactggcttcactcaatgcttctttgtcgtccagcaatgggtgggtaattatgggaaaatctccaaacagctgataacgtttaaaatattcacaagcacgtaaaaaaaataattcaccaatataatgttttatgctgttaagatcaccattgatggtattggcattgccgctcaagtcgtttccatcagcatttttatctccaaaattaggcaacacattcgataatacaaaattgattttgtatattttatcaaagttccaattgctggtttccgcattgtccactttccacaaggtggaagtaaaacgattgggggctgtaacctctatttgattgtccgttgttgcatcatctttgtagatgccatatgtatttcctgttccgtgagagggaagaatatcagagtacaaattatctgcagaggcttgaatatgggttgcctctgtaaaatatacttctggggaaatagatgcctcaggtacttcatccaaatagttatcgcaagcagtaaatataaatcctgatgaagcgattagtacagataagaatatatgttttattttcattgtatatgtattattaaagtgttaaacttaagccaaaagaccaggtgcttgataacggataagcattaccaccattacctccactaattgtttccggatcaaacaaagaagacaatgatgttccagtccaaagattttctccggaaacaaacacacggcatttggtcaatcctatatttttcatccatttggttgggagagtataacccaactggaaattctttaaacgaatataggatgcatcttgtaaataacggctttgggtttcttggtttttagctccttccttaaatacaggtcgtggataataagcatctaggtttgccggaagttcgtgtccgtcgatacctattgcctgagcgcggaaataatcttgatgttctaccaagccacgggcatgccacatgtctttatctcctcttgcaccaaatagataaccgcagaaattatcttttccccaataatcccgtttcattactccttgaaagaaaagacgaacatcaaaacctttccaatctgcattcagatcaataccaaaaaaatatcggggagtgctgttaccaataactttcaaatcgccatgatcgtctaatgtgctggcacctttagatatttttccgtcaccgttcaaatcacgatacataatatcaccggcagaccatttggagccaatcgcttcttgtcctcctttgggtaatgaagatagatgagcttgcatctcttcttctgatttagctattcctattgtttgcaatccccagatttcacctatttctcgtccttcaacatatttgttcaaaccaatagtgttagtggcattgcttggatagctagtgacaatagtcttagcatctgaaagggtgaaagtggcactatatcccaatccactatttaaacggtctctccaaccgatagataattcccaaccgtttgttctcaaattacagttattggttttaggggcagaggtacctagtgtagaaggaagctcaggagcaggtcccaccatgccgtctgtataacgaatgtagtaatcaaaactacctgtcagacggttgttaaagaaaccatagtcaaaaccgacatcccaagtacggactttttcccatgttaaagagttgctgactaaatcaccaggttctgctgtattaggtttttggttgtcttgcaaccatgttccgttagatgattttagtatcatgtcacgataggtaggataccatgctgtagtattctggttacccaattcaccataagaaacacgtaattttaatgtgttggctatatctgtcagtgactcccagaatttttcctgagcgatgttccagcctaaagagaatgaaggagaccattgccagcgacttcctcgacggaaacgggaagaaccgtcgtaacgcatgttgatttctgctaaatagcgacccatataatcgtagtttaaacgaccgaagaaaccagctgttttccacctcttaccatttccgttagctttagttgccttgacattgcctttcccgtccaatccggttgtgatatcaaaataaggcatgtcccctatcatgacaccatatttttgtgtggatgaaaattcgtgttgcatactttcggtttggaaaccaagcataattttcgtgttatgaatgttgttaaaagaatgaaagtactcgctataaatattcaaattcaaataattctcttttgtctggtcttgataaaggtaagaatctttatttgtatttatcacatttccttctatatcatggttataaacaggaagagaagtttcttttactgaagagttttttatactatagttgaattctacatgggtagtccaattctttattggttcaatgattaaagaagcctgctggtaaagacggtctgtttgcgcattacgctttcctccttcagacaggttttgaacaggattggtccaaccattgtcaagataatatccattgggatctttaaccggtaaattgggccaagtagctcttcccaactgatcataaaaagaactgttaaagctggtaggacgccatacatcattgcgagtaaagcgtgtgctgtagttgaattttaaccatggagtcagattggcattgattttagctgtcacattataacgttgaagtccgtcatcgccggcttttaacaaacctccttgatctaaataattgaaggaagcataataggcaacaatatcacttcctccgttaaggctgacattatgttcttgagaaaaggttgaagatttataaacttcatcataccagttagtgtttgcccaagctgttgtaaacggatcatattcaggcttgccccattgaccgttggatgaagccttgactcctcccgtactgcctccaccagcagcttgccaattcaacatttcccgcatcaggtcttcggtaaagataagtccgccaccttggttaagagaaccactgttcatgaaattggcaaatgtataagagtccatcatttccggcatatttattggagtagatatacggaaactgttattataatttatgttggtctttccttttttacccgatttggttgttaccaaaatgaccccaaagggagcacgggaaccatagatggatgatgcggcagcatctttcaatacagaaatattttctatgtcttgaggattgactgtattcaaatctccttccattccatcaattagaataagaggtgcaccgctggaaccctcaccaatagttcctgtaccacggatactgatatctgcggtcttgtccagttcacccgtacttgttgatatctgcaaaccaggtaccaatccttgtaaggcttgtgtagctgaagtcacaggacgagattctaattctttagcagtagcaagtcctacagctcctgtcagattcactttcttttgcgtaccaaatccaaccaccaccacttcatcaagagtttctgtatcttccttcaatactacattaatttctctctttccagaaactttcacttcttgagaaacatacccaatatacgtaatctgtaaaacggcatctttcggggcatccaacacaaaccgcccatctatatctgttatcgtacctattgactgacctttaaccattacattggcaccgattaccggctcgccattcgcatctttcacaatacctgttactttatttgcctgttggacagcttccccatctttcgccttgctcatcagcatgatattcttaccctccatggcataataaatatcagtaccttcaaaaaccttattcagcacttcggctacagatttgttctgcgcattcaccttcacattgcgcttcagattcacctcgttcacattatacacaaacagataatctgtctgtttttctatttcactgattaccttgcctgttgacacgttatccgccacaacagtcaccttcattgtctgagaataagactcagtggcaaaagctgttccggcaaagacaaacagggctaagagtgtgtttctcatcatacggaataaatgtttaatttctacaatagattcctgatacaaaatatttttcatatatttgcattactaattttaggttcaacttaagattatttgagaaaaaattgtcaatgcgtcattgacatttccatgggatggtgttgcagcactatcccatttcttttttagaccaggtgtgttatttcataggcatattcttttttaagggttaattaattgttatcacatttgtctcatcatcctttgtataagtaaacttattattgagtttcaaaactttcagtacgtgttccaccccatctttcgtgcggaatttacctgtataacggttctttagaatccgggtattatttactacaatatccaccccataatacagtttcagtttctctatcatatcacgtacggatatatcattgaaacaaagcaagccctcacgccacaaaaaataatcgacctccttgatgcgtcctttcaccagtctgttgcctttcaagctggccatcatgttcggttccagcctcattccactgttattcgaaccgggcactaaaatttctacagcaccttccaacaaagaagtttcccatacgctatccgctgcataagccattacattgagctctgtacccagcaccttcacattacacttgttcgtctctacaataaaaggctgttccacattctttgtcaccgcaaagtaaccctcaccatccaatttcacatttcggatattccctttgaaacttcccgggaaagtcaaggtactgcgtgagttcaaccaaaccttcgtaccatccgccaacatcaattccgcccgttggcccgccggcacataaatagactgccatgttttgtcttccggtacctgatgttttcctgtccaataatgtgtacccaacaagacgatcgccaataccgctgctatcttggtagcttccatacatactccgcgtaacgagaaatgtttcctttcccggctattctcctccgccacaggttccgtacgccacaatgccatgtcatgcaacttccgttgtgccatatattcacgcatgttctcaggattttcctgtatccattcggtcacacgctgcttttcggcttcagtagcatttccggctatatatttttgcaataattcaggattcatattctatgctgttttattagaaacgactcaagaagaaactaccctaaaagaaaatgaagaaaaatataaaaaaatcatttttgtcctcaaaaacatccgtatccccatccggtcaggcttaataataaaagaagaaataaaataaaggaagataatcttttaaagtcacccgcagtactttcaatgcttttgatatatgatattccaccccctttatagagatttccatctcttcggcaatctctttattggatttattttcaaaacggctcaaaataaatgctcgtcgcgtctgttccgacaaggtacttaaagtagcactgatgattttttccacttcttccgaaaaaatctcatcaggattgcacgcttccaaggcagacatacggatagacaattcctgttgttgccagtcggccatcacttcaaaagcactgcgttttacctcctcgtgctttagatagtccaaagccttgttcttcaaaattgtcagtaacaatggtaagatatatttctcttcaacaggctcggccttcaacttttcccacaactttattaatgcctcggaggcaatatcttctgctgccaaatcattatgaacgtatgatttggcaaagaaaaaagacttcttataataagaggtatagatatcattaaaagaatttccaggcattttgctcatttgtatatcggttgtgcttttcatccatattacgatggtagagcaaagttagcaataaaccttcgataaaaacaaaattatcctgttaattctttctcttatatgctatgagcttgccttatatacaatcgccctccaccgtcagaccaaatggcaaaaagggaaagttgccatagatatgaaattcacggacaaacacccctatgctgtccgaccggaaggaaactttcaactgcaaagtatctcccggagcagcatgaaacttggagcatctcgtttccggacaatcccaagaagaaacaatgcaataaatatgtaaactgtcacttccatgtttttatagataaaaacgccaccaccaaaaaagtcgaacaaacaaatcgccaagcaatctttttcatttatttctccttatacgattccccctgaaaaatccttcaaaagcttcagccctcccgcaaaccctttgcaggagggcgttccggctgaaggatcacaccgggaaaaagtttcaggccgcggaagaatccttcagcttcaccagccggtacacattgccatactcggtatgaacacgctgtatccctaatgcaaccatcatcctgcccaaccggttcggagtcaccccacgcatggccgccggataatgtttctgcaaataattgaacaaatccgtcgtggtatagggcttggacaactccccttcctgcggcatccggaaacaacgcaaaaacaattcctgttcggcaggcattttataaaaattccggttgctgtgctgtatctccttttcttcctcttccgagaaccagtaacgctctcctccggccagctccgctttcagctgggcgaacagctgcgcatgatcgggcggtgtgcagtcaatcttgccgtccacttccgcacaaaggaaacggcggcttcctgtgggatcagtcagcaggtccgtcatattggacgtaccgatgaaagaggcgatacggggcagatgactgaatgccggacgatgtgccctgcggaaagtcagtgtggtcgtctgcatcagattcttcaaggcaggcatctgcccggcacggtacttgtcgaactcatccatattgatcagtccgaaaagcgaaagtttctgttcacatccactctcgctcgtcaggtcgaacttatctatataataaggtgtaagttccttgggcatcaaaatcttgcaaaaagaagacttgcgcttcccctgctcacgactcaccaacataggcgccaccgcattggcgcaatcctgcgcctgccccagccattgggcggcaacacccagcatccaacggtgaaaccctttcacccacatcggcttacgcgatatacgcacggccagcggagtaacacgatccaccccgtcccattgaggcaagtggctcatataatgcagaaaaggatgatagttttccacctttctggaatggagcagacggctcacatccttatcccagcagttgatgccaccggtacgcgcctccaggcagaatgtattcaaatcacgttgagccaccatggcatactcttcatccggcatctctttcccacgatactccgtctgttcagtgagaagattgtaacggaaatcatagcgtatggtcaagaagcgttgcaaggcatccagcatattctccggcttcttgcgccccgatttgccaaaagccgccttttcatcgatagtttctaccatgccagctgtttcgacagccgctgggagaacaatttcatccaccgtttccgtagccgttgaaggcaacaccccttccgcatttccggtttgccccaccgactgcccggtaaccggagccgtgctttttcccacgcatctcctcattttcatactctttttgcaccaactcagtaaattttccactaattttttcatcctttttcattatttggggttgtgtaatatcacaaagataacactcaaaatgcccttttacaagcatttaccccacactaccgcaaaaaagtgactaagcgaaaataactgggaaattattcgtttttatcaagactatttcatacttttgcaccgtcaagttaatcgtttcactagaatgatgaagtttcatcacctaagtgatacaacttcatcactcaagtgatattatttcatcactaaagtgaaacgattaacttgaaaggaagttgcagcaaactcttccgtacaagaaagcataaacaaccggataaaaacaaataagcgaatggctatcaaatttgaattttatgaatcacccaatacgataggtacgcgcaagaagcgctatcacgcccgtgtagtaaactggcagcgcatcaacaccgactatctggcgcgggaaatacagtacggctcctcgctcaccgtggcggacatcaaggcaaccattatctcgctcagcgagaaactggcctactacttgaaggacggtgcccgggtacatatcgaagggataggatatttccatatatcgcttacctgccccgagacacggacaccaagctccacacgtgccaacaaggtgaaattcaaatcggtgacattccgtgcggacaaatacctgaagcatcagttgagcgacgtcaagaccgagcgttcgaaatacaagccgcactccatgccggtaaccaaagagagtatagacgaagcactgacagaatacttcctgacaaacagcgtgctgacacgccggaagtttgaatcgttatgcggactgacacgagctaccgcgggacgttatatcgctcagttggcgaaagataaaaaactgcgcaatatctccattccgcgcaaccccatctatgaaccgatgccgggattctacggaaaagagaaattgcccgaaccggagaacgaaacggaaaacgtatcggcaacaaacgacacggacctgacaataaagtaaatatacaacgaaacaatataatagaaaacttctacaaacgaagctcaaaccataaagagctgaaacttctacactaggctgaaggaattccgggaggaaatccttcagccgcttttctttattgacgggcgtttgcgaaggggctgaaggatttgaaggaaaaaacaagggaaactcagggagaggtacttttcagcccaccagccataccagcatgggcaagtaatcctttaaggaaacacgaagcagcttcaatgcctgctggatgcggtaagccaccgtctgtggcgacacatccagcacttcagcaatttctttataactcagttccttaaagcgatgcatcacaaaggcttcccgataactgtcgggaagagcagccatcgcctcttttattttccggtccaattcctcaaaacgaccatagtccacttcacacaatgccgcctgtgtccgctcataaaaggcagcttccgccttggttttcacctgttcccgcgtcaagtggttcaagaccctccgataagtcattttgaacaaatactgattcaatgaagactcgattatcaaatccccacgattctcccacagccataacatcacctcctgaacaatctcttcggcatcttccagcgacaccaagcggtgagcataggcacacagcagaggatagtaccttctgaataaatggtcaaaagaattaccatccccctgtcggagagcattaaacaaagacaagtcttccacggtatgattcatagtataataactgttttccttgtgtacaaagatagttgtttttatcggaaaaaacttttttttaaaaaaaagcatttttcgtttagatacctttcattctcgcttgtcttaataatataaaggaaaacattaaagtataattcatggaaaaccataccgatatagaaactttgttgaccaagtatttcgaaggaaacaccactccgccggagaacgaacagatagaagcctggctgaatgccgatgaggagcatttgcgtatagccaagcagctgaatacgctctatctggctgtagacacacagcacatcacaaagaagatagatacggaaaaggcattagacaaggtaaaaagcagaacaaaagttagaaacctgtcctggtggggatggacacaacgcattgcggccatcctgtccgttcccctcctgataggtgtattggctctgtatccggacagacagcagccggtagtcaccgctcagatggtggaaataaaaaccaatgcaggcatgactacctccgtcctgttaccggacagcacggtagttcacctcaattcggaatcctccctccgctatcccaccttttttgccggcgatgtacgccaagtggaattaaacggtgaagcttatttcgatgtgacccaacatccccggaaacgattcatcgtttccacccctcaccattcgcaggtggaagtgtacggaacaagttttaatgtggaagcatacggtaatgaaactcccatttccaccacgcttatcgaaggcagcgtagggtttatttataagaatagcaaaggaaaatttcaaaagagtatgctctcccccagacagaagctggtttattctccacaaaccggagatatcaagtgctacgctacctcgggcgaatcggagatttcatggaaagacggcaagcttatctttaatgacactccgctggatgaagtgctgcacatgcttggaaagcggttcaatgtggaattcgtattgtccaacaaggggctgaaaggctgttcgttcacaggaacattcacccatcagcgtctagagcgtattatggaatatttccggatttcttcccacatacgctggcgttacattgacagtgcagatataaagacggaaaagctgaaaatagaagtgtactaatatacgtttaacccttaatttaaatactagaaaaatgaacagacaacaggctccctaaacaaaaacatacgggaggatattggcgtatcaccccgtatgaaaaaatcatctttccatgcttgtttggcgacaagcaaagacaacattttattcactttatctcaattacaaaattatgaaaatttattttagcgtccaattattatggatgataaagtcgtgtaggttaatcttaaataaaactccattacctatgaaactgagtgtactctttttaatctgttcgctaagtatgacttatgcggcagagtcgtatgcgcaaaagaccatgatcagtcttgaagtgcgtaatgaaacagttggcactgtgttggaaaagctgaaaaaagaatcggggtttgatttcttcttcaacaataaacacgtagatctgaaacgtattgtatcagtttcggcaaacaacaataatatcttcaagatattggatcagattttcgcaggaacgaatgtgaagtattcagtgcttgaaaagaaaatcattctttctactgagattgtgcaaggaatacagcaagaacaaaataaggtgacaggtattgtgaaagataatgcgggtattcccatcgtcggtgcaacgattatggaaaaaggaagtacaaacggcacagtttctgatcttgacggaaactttagtcttcaaatgaacagtcaaggaacaatactcatttcttacatcggttatattacacaagaaattaaagtcaataaaaatgataagcttattataacattagaagaagatacagaaacattggacgaagtagtggtggtaggctatggtgccatacaaaaacgttcggtatccaccgccatctcaactgtaaagggaggaaaaatttcagagatgccgacatcaaatatatcacaaagccttgtgggtatgtcgtcaggtatcaccttacaacaaatcagtggagagccgggagccgctccggcaatccgggtccgaggagcaggctccatcaatagcggaaatgaccccttatttgtaatcgacggttaccccacaacagacgcagaactttttaataatatcaaccctgcagacattgctgacattcaaatactaaaagatgcagcctcctctgccatttatggttccaaagcaggaaacggtgtaattattgtcactactaaacaaggacaaacaggaaaacctaaagttagtttttccacacaagtaggatggagtgaagcccaaaattatgtggacgtactagaagctgatgattatatggacatgatcattgaagcacgtacaaacaacggaagtattcaaaattttcccaagttgattcagatgagagagagtgggaattacgaaaacacgaactggcaagatgccatattccgtaatgcactgaattatagaggaacagcaaccattacaggaggtacagaaattttaaaatacaacttctctgccaactatcaaaacgaggatggcatcctgttaaactctttttacaaaagagtcggaatcaaaggaggatttgaagcaaatttatcaaagaaaataaaactaggagtcaatttcagtacaacctatagcaaaagacgcctccaacaaccaaccggtggaaatactgaagacgtaacaggcgtaattgcccaggcattgtctatgccacctatacttcctgtttaccagaataacggagattatactcaaatagctcaacattatgcagacttaggacttaataaccaacttcgcaatcctgtttcgaatttactagaaaatcgaaatgacaaatggtctatccgcacaatgtccaatgcctattttgaagtaaaacccattaaaggactgacattacgcacatcggtaaactttacgactaatgcagcaaaacaagattattaccaatctgcctttttactaggtaaaagttatacaggtaacaaatccacaccggatttgactagcatagacggttaccgtctgtctggatttggttataatgcctattggtccactacagcaacttatgatgttacatttaatgaaaaacatcatttgaacaccatgatcggatatgacttcgaatacaatagtgattttgaagtacaacaagacgatcggactgattctgataatcccattgcctataacaatacatctattaccaacgtaaatggagcgaaactgtggacaggttcttccgaatactccaactatgtatttgacgccatgtttgcccgtctagtgtatgattataattataaatatgtcctttcaggttctgtccgtcgcgaccgttccagcaaattcggaccggacaaacgcgcaggatggttttattcggggtcattggcatggaatataaccgaagaagactttatgaaagatatacactggctcgacatcgctaaattacgtgccagttatggaataacaggtaatgatcagataggaaatgattatgcatggatatctactatcagttcagaccaaaatgtggtgtttggtacaacagccatacctacttattatcctagcggttattcaaaccgacaattaggatgggagaaaaacaaacaaatggacttagggtttgatattggcgtattcaatgccttgaatatagtagtagatctctacaagaggactagtgacattgtgatgccagccaatattcctaatttcaatggtatagcaggcagcgtttatatgaatgccggacaaattgaaaataaaggtatagaaatccaagtttccgccactccgtttaaaggagatttttcctgggaaacgactcttagttggtccaaaaacaataataaaattctttcacttgccaacaatcaaaatcaacttgccaatgcaagtgcaggaaccaaatggggaaatgtaatgagaaactatgtaggacgtccgatgggtgacatgtatatgctaaaagttataggcacatttaatacagaaaaagatttagcccaatatgctaaaaacggaactcaggatattggagatttaatatttgaagattataataaagacggcactattgacgtcaacgattatcaattggtagggaactatcaaccggattttacctttggatggaataatacttttatttataaagatttcgatttggcggtcactattgacggacaatgcggaggtaatgtaatttatgcagccgcacgtgctttttctttaaaccgatacgatgacaatgtactagctgaatccggattaggacgctggaagtcatcaaccgatcccggaaacggaaggtcacacaaagctgggacaaataacctaggcagcaatattggcccctccacaagatatctttatgatgcagactttctacgtatccgtaacgtatcccttggatatacattaccgaaaaaattctgtaaaataataggcatagaaaatatgcgcatcagtgctaatgtacaaaacctatggacttttgacaaatatccaggttattccgttgaagcaaattatgaagggaactccgccacaaacaacggggtggactttggtggatatcccatctcccgcacatttactttcggtcttaattttaacttttaacaacgatacaatatgaaaactttcaataaattaatttcatttgcgatcatttccatgacaaaccttacctataccgcttgtagtgacggattttttgaccgttaccctaccgattccatgcaaatggaaacctatctgaaaaatgatgcagaactgcaaaacatacttctcaatggttattatcacctacaggacatcacactaaatgtgaattatgttaatagtttggctacagatgaaggatacgactataaaaaaaataactcccttgatcacatcagtctgaacgaaagtacatgggatgcgactttaggaatcactagtgaaatatgggaacattgtttcaatatgataaaccgctgcaacaatgttcttcaaaaactagataatgcctcggaaacgaacagaacacaatatgaaggtgaagctaagtttctcagggcgtatgcctatttcacgcttgtaagactttttggagcagtacctatcactacagatccaatagatgattactcaaccctttatgattatgggcggagcagtgtgaacgaagtctacagcttgataaaagacgacttgaaaacagccatagccaatctgccaaactactattccgccaataacatgcaaggacgagcgacaaaaatagcagcttataccatgcaagcagacgtttttatgacattgcaggattttaattcagctaaaaattctttagaaaacattctggattatgccaatcaaaataaggaaaaattagatttagaaaatgatgtcttacagatttatgcttcagacaacccaatgggaaaagaaatcatttttgctgctcaatacaacaacggtgcaacagtagtggctaacccacttatgggacgttgcataccagcagctcgaccatctactcagcccgcttacatttatccagacggaaccagttctaccatcactgtttcacaaggcaccagttgtctgttaatgacatgggaactttacaatacattcaaagccaacagtaatgaccaacgctttcaaaaattaatatacaatggaatttatacagatgacatatcagtagccagcaacgaggtagacatcacagaagaaggatacacttaccttcctgtcacattaaaatatttcgactttggtaatgagggtatgacaacttgtgcttgtggtaacgacaatatcatttatcgatatgcagatgtattgttaatgtatgccgaatgtttaaacgaaaccggcaataccccatctgccgccaactatctaaatatggtaaggactcgtgccggactatcaaatacaactgctacaacacaaaaggaaatgagtatagccatcgaaaatgaaagaatgttggaactatgttttgaaggacatagatggtatgacttaatccgtcggggaagaattacagaagtaatggaaaaacattttagccaccgtacacaaggactcaaccctacatttcagtccagtaataatggaatgaatgtaagtagtccatccgacatcaccggcacacctacaacatggaagtggacgggaacatccgctgctgttctgtttggaatcccttacgaccaaattcagctttcaaacaattgggagcaaaatgagttatattaatcctttatccataaaatatgaaaaataatatcttaaccggcagtttatatactgccggtatccttctaccccaaattacctttgcagagattcaaaatgacaaagtaagtccagacagaccgaacatcatctttattttagcagacgatatggggtatggagatttatcctgttacggcaatcaatatgtaaaaacacctaatattgaccaactagccgaaaccggtacccggttcaatcaatgttatgcaggaagcggtattagttcaccatccagatgtgcattgctgactggtaaaaatacaggaaatacccgtatacgggataacatgtgtacagccggaggtattgccggaatcaaaataaatcccaatggtgattccaccattgtcaggagagctaatctattaccacaagatacaaccattgccaccgtattaagcgcagcgggttaccgaacttgcttagtaaacaaatggcatttagatggctacgataaaggagcctctcctaatcatcgcggatttgacgaattttatggatggactatctctacggtacacagtaactctccttattattatccctattatcgtttccacggtgactcactcatccacatcccagaaaatgcaaatggaaaacatggtattcataacaacgacttgagcacaaacgatgccatcgcttttataaaaaggaataaagacaatcctttttttctttatttagcttttgacgcccctcatgaaccctataatatagatcaaacagcatggtatgaaggacaagaaacatgggagcctaataccaaacgctatgcttcattgattactcacatggatgctgctatcggacgtttattaaacgaactagaacaacttaatttacgaaagaatacattaattatttttgcctcagacaatggggccgctatccaagctcctattaaaatattaaattgcaatgctggattcaaaggtcgaaaaggaacgctttacgaaggtgggatccgagtacctttcattgtcaatcaaccaggaatggtacctatacaaacactagacaatcttatctactttccagatatgatgcccacattagcagcattggctaaaggaacgaagcatttgccaaaacaaattaacggtataaacatcttaccgcttttctatggaaagcaagttgatacagacaaccgcttattatattgggaatttccagggaaacaacgtgcagccagaaaaggagattggaagtgtgtaaccatccatcctaatcaacctctagaattgtataacttgaaagaagatccagaagagacgaataatctcgcaaaaaaataccctagacgagtaaaggagttcgatgaagaaatgcaaagaatgcatattcctacccccaattggcctcaaccaggagaacaattctgaagtctatatgtagaacgagggctaatgcagtcctcgttctacatataactacaaataattttattagcaaaagtatatacaaacatttttatacatccatttttaaatagaattctgttgaacactaaaaaaactattttcactgataacaatgagattcttattagccaatataaatgttgacataagagaagcacaatacttccccccccctcaagattaaaatcaagtgaaaacctttaagataaagcctactatgagaacttgacacccatactttcaacaaagaacaataacacttcacgcgtttttttgtacgataatacaggatttgagactaaaatccatgttagaaattatttataattcagatatttgcacaacaaaaagataaaagaacatgatgaaatatttaccattcttgttgttcctcttattgaaagcaggaacagctacagctcaaaacaatttagtaatcaacggtattccatggtttgatgacaagggaaatattgtcaatgcacatggcgcttgtattgtggaagaaaacggaagatattatcttttcggagaatggaaatcggacaaaagtaacgctttccccggcttctcatgttattcttcggatgaccttgtaaactggaaattcgagaacattgtccttagagtccaacccgaaggcatcctcggtcccaatcgcgtaggtgagcgtgtaaaagtgatgaaatgccctaagacgggcgagtatatcatgctgatgcatgccgatgatatgggatacaaggacccttatatcggtttagccacctgcaaaacgattgcaggtgactatcagttgcagggaccgttgctctataaggaacaaccggtaaaacgctgggatatgggaacttttcaggacaccgatggaaaaggatatttactgattcatcatggtcctgtttatcggttaagcgatgattaccgttcgatagaggctgaagtggcccacattaaaggcatgggcgaatcaccgaccatgttcaaaaagaacggtgtctatttcatgcttacctcaaacctgaccagttgggagaaaaatgataacttctatttcacggctccccagatagaaggcccttggacgaaacaaggactgttctgcccgaaaggcaagctgacctacaattcgcaaagtacatttgtattcccgctgaaatgcggtaatgataccatacctatgtttatgggggatcgttggtcttatccgcatcaggcctcagccgccacatatgtatggatgcctttacaagtggatggaacaaaaatatccatccctgaatattggcaggcatgggacatcaggaagctaaaaccggcggacgctctgaacaaagggaaaaagttgtacggagcatggaagtccaatcaaaaaggaaacgtgttggagatagcgttcaaaggaactcatgctgctattgttggagaaacaaaccctcatggcggatatgccaaagtaagtgtattaaatgccgagaaagatactgtatattcttcattggtagatttctacagcaagtatccggaaaaagcaattcgaattataacaccgaaaatgccgaaggcaaattataccttacaggttgagataacaggggtacgaccggtatggacagacaaaacaaaaacaatctatggaagtgatggcactttcgtaacgatagacaatgtctatcacttttgagctattccatatcttatgaaaaagggctgagatatagaatgaaccatgcaaaagacagaagaaatgtaacactggaaaatttgaaatataataattgctaatatattaataacgatgagaaatattataataatgcgcaatttcatatttctaaacagaaaaataagaagattacttttactgttagttacttttttttgtgtgttagaatgatgggagaaacgattattccggattccatttccaatcccatttgcacgggattccatccagatccttctatctgccgggtaggagaagattattatttagtcacttcatcattcacatggtttcccggacttcccatttatcatagccgtgacctgactaattaacggtatgacggataatgatggcatctgggcacccactttgcgttatcataatggaacattctatcttattaccacagctcatggctgtggtggcaatttctacatgacaaccaagaatccggccggtccctggtcggatccggtatggctgaaagatgctcccggcattgacccttctcttttttttgatgaggacggacgctgttattatacaggcaatcgctgggattttaagagcgcatggcctgcccagtgtgccgtatggatgcaggagctggacctccaaaaaagatgtctggtcggagaacgaaaaacattggcctatggtcatgcggctaatgcaaagtacgccgaagggcctcatttatacaaaatagaggatcactatctattgttgatggctgaaggaggatcggattataaccatgctgttaccgccctcactgctaaatccctctggggaccatatgtaccttgtaccgtcaatcccgtattgacacaccgccatcttggcaaggactaccctgtgcagtctctcggacatgccgatttggcacagacaccaaccggacattggtatgctgtgtttctcggtaaacggatcgtggaaggaggtctggtgcctttaggacgcgaaacctttctttgtgaggtgagttttcaaaacggtaaacctatcttcaatcccggcattggtgttatcggaaccggttgaaacgtccacttttaccatagacgccggtgtcgaagacagataaacagaatgattttgaaaattctgctttatcaccggaatgggctacaatgcgtatccctgagcaacctttccatcattttgccgatggcaacttgtttttgtctctccgacctgagatggcagacagtctggtatgtccctccatgcttctgctccgtgtacattcccataatttttctgccaccacaacaatgagtttctccacccgtcgggcgaacgaatgggcgggcttggctctgtatcgtacagctaaaggctattattcattactgaaaggaaagaatgaaatccgtttgacaatcgataaataaagcatcataccaatggtttgaatataaggaagaataattgtaagtttaatcccctcttcccataatttccaagatatttttagtatctaactctaaaatcaaccggaagttatgggaatatgtctgataatttatcaatattaattaaatccgttccttgcaactatatttagaatacagaaattcgaatcgcacttttgcccagtttgcatccacttattcgtttcttttttgtactttagcctaagcttatcttacataaagtgacagataagtacaacgataaataattgtttataccatgtatataccaccatttaccatatcaaccaacgctatcaacttgattgcagaaatatctgcacagattgagcgatacgccattcgtttagagcaaagcgatgggctgagattgcgaaaagccaatcgagtaagaacaatccatagttcattggccattgaagggaatatgctgtcggaaaacgaagtgaaagacattattgatggtaaaacggttatggcacctttgcggcagattcaagaggttaaaaacgctataaagacctatgagctttacgaaaaattaaatccgtttgatgtaaatgacttgttaaaggcacacggtacaatgatgatggcactgaccgacgatgccggcaaattccgccgtggtggagtcggtgttttctcagaagaaagattggtacacatggctccccctgccgatcgcgttccttttttgatagatgatttatttgagtggctcaaacaggccaaagaccatttactcattcgcagttgtgtgttccattatgaatttgaatttattcatccattcagtgatggtaatgggcgtatgggccgtctttggcaatcactaattttaggcagactgcatccgctttttgaatatctgcccgtagaaaatatggtctatgccaatcaagaagcttattataatgcaatacagcacagcactgcaacagctgattcaggacctttcattgaatttatgcttcaagagattttaaacaccctcaagagacatcaaggcagtcttatatctcagcacaatgtgatggaagttcgggataaaattcgggataagttcgggataagttcggaacaaatcattgaacaaatccagcgtaatccggctgtcacccttgatgaaatcgcagctgcactctccgtcacccgtcgctcgattgaaaagaaaatcaaggaactgcgtgatgccggttacataagacgcgaaggaagcaataaatcgggacgttggatagtgaatgatgaggtctaatgtctggatgcgacattcatcaagccacaaagatacttgttatcagtcgcccatcaaaagccaggattcataaaaccattgactaagtttatcaaaagaattatattccttttagcctgtttaaatttgcatcagcattgtcattctgaaatgaaaacaaaaatttaaacaggctttaaaaacgatcatgtcactttccgtgcgcagccatatacgccttcacctgttcactaatctgtttcatccctttcaccgaaggatggccgctcatcttatcaagccctttcaattcgatgcaatcgatctgataatgtttgcaaattgttctgactgattcagttatctcgtttcccaaaccatcattcaacaaaaaatagatctccacattaggatagtaatcaatcattgtatccagcatataagccatggcagggcggaaagaatacaaatcttttttagaccaatccgcatactgatactctcctaaaggtgatttcgcccaataatcattagtcgcgccaaaaataaaaataatatcaggacagcccaacgccttcatccgggtgatgaaagaacggtcgctataatcctccgaacggtaaccggtatggcaaatagtagcaccggaaaacgaattattcacacaaagacggtagttgttctccttaataaactgatgccaccaggtattacgtacagaaaccatatctgtcttccgtcctttaggaggcgtcttcagataccatacaaaattagtatcgggctgaacatagccttcgaaagtggaataagaatcccccagaatagaaaccgatttcaaaccttgggcaatgcctaaatgacaaaataacgtacaaaacagcagagttataatatactttttcatagatatttgattatttcgccttcaaatatacatcatattttaatttaacacctataaaaataacctttttcttctatttacagacaaacaagaagacatcgaactgctttataaaaataagaacaaatccaatggttacaaatcctatctacaaacgtcattacttataagccgtaaaatgggggccatttaatttttaaaagactaaatatgacaagaaacgctttttggggactgtgtatcggattatgtctgacgggtacgcaagccatcgctcaaaagatggaaagcaaaagtatcaaaacgactgataaaacagatagtatatcattccatatcgatggaatcaccgagggagaaactttatttactgttatcggaggacctgaagcccccgttatcaacgcaggaatgccaggtacggaagggattcaaggaggatttgaaggaggctctatcgtaaaaataaacggcgtttaccacatgttccctaccgaacgtgccggtgtgaaaggaatgcccgcctatcacgacagagtaaagacacggataggacactggaccagcaccgatgctgttcactggacacgccaatccactatattagaatcaagcggtgtctatgcattggtacatgaagacaatcccatgaatgaccgccgttccgccatctggtcttatatgcctgtattcagcgaagaaaacaaccgatggtacggattctatctggcttacaccacagataaagaaattgcacccaatcattctttcggccgcatctggagatgtgaatccgaaaaggaaggtctagaaggaataggcggtccttaccgggatatgggaatcatgatagaaccgggactggactcccaactttgggaaggacggcaaggggtcgcttctttcttcccatataaagtggataaaggctggaatgcgtttatcagtggagcttatccttacgaaacccgtgcagattatcccttgaaaggaggggaaaagcgcaaagtatgggctgtgggactggccgaatcagaaaacttggaaggaccatggaaacgtatgggtgaggaaatcaatccaataacttccattcacccgcagtttgtagagaatcctatcgtatcccgattacccaacggaacctacatagcgatgtttgacggaggaccggactatttaaacctgcccaacagaatgggatacactttatccatagacggaaaaaactggagcaaagcacgttatatcgccattgataccaaagtaaaaaaatggtggaccgtcatgcggaccccgctttgcctgatacccgaaggaaacaatgtatataccattgtttatacagcttgggatgatacgcgcttccaccccatcgggatggtaaaagtaaaattaaatccggaagtattggataaactgacagcagaactgaaaccggctatcccctatttaaatgaagtaggtgcacaagccatgccccggaatatcgttccaatcaagaatccctatttcaatatgcctcaactgaagcgtcccgttttccctgatttcatcgtcaatatgaaaggcaaaggaatgacagaagatgcccctattacggatgtagtgaaccggacgattgccgaagtcagcaaacaaggaggaggaacagtcgtcattcctgagggaaaatggaaatcgacccgtattgtactgaagagtaatgtcaatctgcatttagccaaaggagccgaaatagagtttgccggtcgcgcggaagattatctgccggcggttttcacacgccatgaagggatagaaataatggggccggccgcctttatttacgccaatggggaaaacaacatcgccattacgggagaaggaaccatttacggaccacctatggatgctgaaatcagaaaacgtcctaacggtgcttcagtggtagaaaaagatgttccgtgggacatgcctatagaacaacgtatctatgacggtatggaaggcaggactttctatcgtcctaaaacaatctctcccatcaactgtaccaatgtattaatagaagggatcacgatggaacgaagtaccttgtggaatgtggtacccatttattgcgagaatgtaattataagaggcattaccgtcaactctaccaaggtgcccagcggagacggcattgacatagaatcttgtaaaaacgtactgattgaatactgcacgctgaactgtggtgatgattgctttaccctgaaagccggcagagcagaagacggattacgtgtaggcaaacctacagaaaatgtagttatccgctactcgctggcccagcatggacatggcgggataacttgtggtagtgaaacagccggagtgatcaagaatctgtatgtacacgattgtgtattcgacggaacccgtaccggcatccgtttcaagacacgacgcaaccgtggaggaggcagtgacaacacgtactatgagagactgcgcatgatcaatgtaggaaaagcctttacctgggatttgttgggcagtgcttattatatgggcgaactggccgcacgctatccggcaagaaaagtaaaccggctgacgcctgatgtaaagaatatcctgatcaaagatttcattgtagaatcagccgaccagttctttaccgccaatggtattcccgaaatacctttcaaccaggtagtggtggaaaatggagagatcaaatgcaagaaattaatcggcgccctgaatgatgccgccggatttacgatgcggaagctgacgatagaagcacagcataatgacattcacatattggatggaaaagacatcctgttcgaggatatacatttcaaactccccgccggagagatcatggtgaatgtggaaggggaaagatccggaaacattgttttcaagaacatcaatgccaatcaggaaaaggttgagtataaaaaggaatctcccatgaggatagaaataaagtaactaaatatcggtctgatttggaacgcaaatgacgcaaatgacacaaatttaacctttcggtaggttttgcctctatgtagtgagggggctttatttgtgtcattcgcgtcatttgcgttccaatctttctcctaaataatcacacttatcacacccacttccgcaactataatcccctataactgtatcatttttcatcataatgtatgattttccattgtaaggcgggttatcccgccttatttttgtatcatgaaaacagtattcaatggtattatgaaaaacaaatggaccaaactggcggctttagcaatagctgccctgtggagtggaccaaccgtgcaggcacaagctccgcaccccgaacgtatctatttatcgggaaccggtattgacaacaccaagacttgggagttcttttgttcgggaggacaaaacagtgggaaatggaaaaagatcgaagtaccctgcaactgggaactgcaaggattcggagaatatacttacggtcgttggtatactataaaaggtgaaaggccaagcgacgaaacgggtatttaccgatataaatttgaatctccggcaacaactcccggtgagcggataaaaatattctttgacggagtgatgaccgacacgaaagttttcatcaatggaaaacccgcaggcgaaatgcaccagggaggattctaccgcttcagttatgatatcaccgatttattgaagcccgacaaaaagaacctgcttgaagtaaagatagccaaagaatcagccaacaaatccatcaatgcagccgaacgtaaagccgactggtggctgtatggtggtatttacagacccgtatggctggaagttgtcccggcagtccacatgcgacattttgttctgaacgccgatcagcatggaaaattgcaagcggcaatagaaatggaaggggatgccaaaggatatgaattgtctgtttccgtccgttcattaaaggatggaaaagaaatgtacactcaaggacacaaacctaccgtttctcatcagattaaggattcgaacaaggaacagttgatggaaggaaactggatgaatatccagccttggtctacagaggaccctaacctgtacgtagccagactggaactgaaagaccccgaagggaaaacggtgcaaagccgtgaaacgcggataggtttccgcaccattgagttctttccacaagacggagtttatctgaatggaaccaaactagtggtgaaaggtgtcaaccgccattctttttctgtagatggaggtcgtgctaccagtgcggctatgagccgtcaggatgccttgctggtaaaagagatgaatatgaatgccgtccgttcacattatccgcctgatgaacatttcctggatatgtgtgattcattaggaattgtctatatggacgaactggcaggatggcaaaacggatacgattcaaaagtaggtcctaagttagtcaaagaaatgatagaacgcgatgtcaaccatccgtccatcattatttggagtaatggcaacgaaggaggatggaattataatctggatcctttattcgccaaatacgataaattacagaaacgccacatggtacacccttgggccgatttcaatgatctggacacccaccattatcccacttatctgaccggagtggcacgttttaccaacggctataaagtatttatgcctaccgaattcatgcatgccatgtacgatcagggaggtggtgccggactacgtgacttttgggatcgttggtgcacgaaccctctgtttgccggaggctttatctgggtattctgtgacgaagcccccaaacgttctgataaaggaggcatattggattctgataaatccaatgctcctgacggggtagttggtccgcgtagagaaaaagaaggaagttactatgctatccgcacacaatggtcgcccatccagttaaaaccgctgctgattaccgaccactttgacggcagtttcctggttactaatgaatatacgtatactaacctggacaaatgtcgcatgacttacaaaatacgtacttgcgaaacacctttgaaaaatgccatggaaagcggtaaagttatcgcagaaggccatgtacaactgcctgccatcacaccgggtgaaaccggaaaagcccgcttcactcttcctgcttctttccgggaaggtgatgtactggagttagaggcatttgacaaagaggggaaaagtatctgtaactggacttatcctatccggctggccaaacaatactttgatcataaaatggcgcagactccgatgaccctggaagcggtacaaccggcaaccgccactcaaaccgctacctccatcgaactgaaaagcgaccgtgtaaccgtcacttttgatccggctaccggcatgatcagccgtatcatatcaggaggaacagaagttccattcaaagacggtcctgtggcagtgggcatgaaaatgcgctacgagccaacattgagttatgtccgcaacagcaacgagggggctgtttactgtgccaaatacaaaggtgccgccgactccatcgtatggcgtcttacggacaaaggattactctatatggatgccattctgctgaatcgggcttccggcggaggtggatttgatgacgctttcatggactccaaagtattcaatctcggtctgactttctcttatcctgaaaagaattgctccggcatgaaatggatgggccgtggcccgtaccgtgtctggaaaaaccggattccgggaacgaattatggagtatggcacaaagagtacaacaataccatcaccggagaaagttttgaaaatctggtttatccggaattcaaaggatatcatgccaatatgtattgggccactttggaaagtgacacgacaccgttcaccatttattcacggaatgacggtatcttcttccatgtgttcactcccgaagaaccgaaaggacgcgtaaaagacaccatgcccaaattccccgaaggggatatatccttcctgctggacatcccggctatttgctcctttaaacccatcgagcaacaaggaccgaacagccagccgggtaatatccgtatcaaatcgggggatgaagggttacatctgaatttgatgtttgatttccgacaataaacaagcgaatagtagttagtgattaatttaatagcagaatcatgaaattaataacttttgtatgtgccgcctttctatgccttccgtctttggcacaagaaaaatttccggacggcacgcctgtatccgattggtttaaggacagtaagatagtagatataaacacattaggcaagaaatacattctgacagattacggtgtcatcaatgacagcaccctgttacaaacagagaaaatccaatctgccattgatgctgccgcacaaaatggcggcggagttatcgtcattcccaaaggaacctatttaagcggagcgctgttcttcaaacccaaaacacacctgcatctggaggaaggagctgtgttgaagggaagtgatgatatcagcaacttccccatcatagatacccgcatggaagggcaaagcttgaaatatttcgcggcgttggtcaatgccgacaaagtggacggttttacgttatccggaaaaggcacgattgatggcaacggattaagatactggaaatcattctggcttcgtcgaaaagtcaatccccaatgtaccaatatggatgaattacgccctcggctggttcatatctcccatagcaataacgtccaactctcaggagtacgcctcatcaactctcccttttggactacccatctttataaatgtaatcacataaaattactgaacctctatattttctcaccggagaaaccggtaaaggctccaagtacggatgccattgatattgatgtatgcagcaatgtactggtgaagaactgctatatgtctgtcaatgatgacgccatagccttaaaaggcggcaaaggtccctgggcagaccaagacccgaacaatggaggtaatttcaacatcatcatcgaagattgtacctacggcttctgccacggcgccctcacttgtggaagcgaatccatccacaatcgcaatattatcttgcgacgcattcacatcaccaatgccaatcgtttgttatggttaaagatgaggccggacaccccccaacaatatgaatatattctggtggaagatatcaccggagatgcaaaccattttctgtatatcaagccttggacacaattcttcgacctgaaagatagaaaagacattcccgtttcttactcaaaccatgtgacaatgagaaacattgattttaaatgcgataatttcttcagcgtagaaaagtctgatcaatatcaacttactaactttacattcgaaaacctgaacattaaagctaaaaacggggaatgcgacaaagaaatgattgacaatttcatttggaaaaaggtaagtataaataatataaaataagatcagcagttgaataaatcaaattcaacaatatctaatcacgagccacggctggcactatccaaacgtggctcctgttttttcaacatgaaattcacaagatcccggtgtattccacatatatccggcattcgtttctttacttaatagttcaataactcttccaggcatcagcctctttggcattacgggcttttgcacgcattttcttactgaaaatgattcccagcagcttatcggcatcaaacgtagcactgatacccgcccccaccatcaaagcgctaggagtaaatttgcctgccggcgcaggttccaaacgaggatcatagcctgccaacaactctttgttgataggaatctctacataaatttgttcctcttccggagtttcaaacggtccgtacggcaataacctgatataccctctaccatctattgtatccatttgagagatataataacgaggaagttccgtttcaaacttcatgttttttttagggaagggagttgatttcattttccacttttcgggattgaacaatctgtcaatctctttctgtgtttcatcatctatcacaatttctacttgaccgctcaatagttgctgcaaacgcaaagagtcctgtttggtcaactgcttggtctcattcgttctctgggcaaatgacaacaccgagaaacaaagacataacaaaaggaagaatatacgtttcatagctatctatttttagtaacttcctaaagatacgcaaaagtaacgtatgttcatccttttcaagtctttttctttcgttctttttttcgttaattctggtaataaactcgttttaccctattagacacactggtcaagatctcgtatggaatagtttccagaatctctgacaggacagtgaccggtaaatcatctccgaaaatgatagctttatccccttccttacaatcaatatccgtcacatcaatcatgcatacatccatacagatattacccacgtatggcgctttctgcccattcaccaaacagtaggcatgtccatttcccaaacgtcggttcagcccgtcggcatagccgataggaatagcggcaatgcgggaatccctttccaaatgtcctttacgactataccccactgtttcctccttaggaaccacatgaatctgaagaatagtggtttttaatgtacttacattatggatgatctgattggtaaacggatcaattccataaagaccgattcccaaacgcaccatatcgaactgagcacccggataacgttctatcccggctgtattacagatatgacgcaatatcttatgctgaaaagcctcctgcaaacattcagaagcagcttcaaacatttctatctgtctgcgcgtaaacgaatcaaactgagccccgtcactgcctaccaaatgggagaatacagaacgtggaataacagctgtctgtttcttcagacggtctatcagttccggaatctcttcgggtgcaaaacccaaacggtgcattcccgtatccaatttaatatgaatggggaaattcgttaccccttctttttcggcagctttaatcagttcattcaataaatggaaactgtaaacctcgggttccaatttataatcaaacatggtcttgaatgctgtcaactcaggattcataatcataatggaacaggtaattcccgctttcctcagatccgaaccttcatcagctacagctaccgccaagtaatccacacgatgatcttgcagtgtcttagctatctcgtatgaaccggcaccgtatgcagaagccttcaccatacataccatttttgtttccggtttcagtttgctgcgataataattcaagttatcaaccaaagcattcaaattgatctccaaaatggtttcatgcactttcagttccaaacgatctgaaatccggtcaaaatgaaaagcccgcgaaccttttaccaaaatcacctcattacgcagcccagccagcaaatccgactccaacagttcttctgtagtacggaaaaaatacttttctatctcaaaacgggcagcagcagtccgaatttcctctcctaccccgataatcttctctactccccggctatgtaccaattcggctacctgacgataaagcagtttgctgctctgtcctgtttcaagcatatccgagaggataagtgtccgtttttttcctttatcatcagaacgacgcgacataaagtcaagagcaatatccaaagaagccaaatccgaattataactatcattgatcaacacacagccattcttgccctcttttacctccagacgcatagcaatctgttccaaacgcgccatgcgctcggttatttgttcaggggaaaccatcatatacaaagccacagccagacaatgcagcgaattctcaatagaagcgtcatctataaaaggaatactaaattcattcggcatccccagataacggtatttaatagtggtagcatgttcccctttttgaatggactcaataaacaacggacgttcattgtcctttttcgaccaagcaatctcacgcgaggtaaaaagagattttgccacacacgaactgatcagttcgttatcgccatcataaatgatgacgtcacaatctttgaacaaagtaagcttctccatacatttatcctgtaaagagaaaaagttctcttggtgcgcaccaccaatattagtcaaaatccccacagtaggtttaatgatagtctgcaacgcctccatttcccccatttcggaaatacccgcttcaaaaatagccaactcagtgcgttcattcatcaaccataccgaaagtggcacacctatctgtgaattatagctacgtggcgaacgggttaccacacgatccgggctcagcaattgatacaaccattctttcacaatagtttttccattgctgcctgtaattcctataaccggaatctgaaactgctcccgatgcttttccgccaatttctgtaatcctttcagaggattggccaactgcaggaaattcgcatcttgaaaagatttcatatcggccggcaattcgcccactacaaaattacggactccacgttcatacaattccggaagatatttatgcccgtcattccgtttggtttttaaagcaaaaaataatgtttcttccggaaagcacaatgaacggctatcagttaaaatccaatcaatctgtgcactacggtcaccaaaccgctttgctcccagaactttttctatattttcaatcgagcttgacattgttctaattctttttgaaggtcaaaatacgggaacttttctttaagtcgctctatctttaacactatttgagttaaaaatttgcgatatgtttcagattgggcattaaacggtttgtgagctaaagccttccggatatcctcccactctttcattattctatccgtttctttactaaaataacattctgtaaaacattcccataaataagatacagcaacaggagaaggatgcaacatgtcatctgcataaaaacgataatcacgaagttcatccatcatgatttcataagaagggaaatagtaacaatcagaccagcggcggcacaattcatccaccgcaagaagcaaagtggacttacttatctgattaccatgcataccatctttgctatgccgtatggggctgacagtgaaaagtatcttcaagaacggatttacttttctcaattccaccaacacacattcccattcagtgacaatttcctctaccgtaagaagttgtcgggtaaaaaggctgtcgggctgtttgtggcaatttcctaccaccatggtcctttccttcagccaataagcaaatgcagtcccccaagtaataaccagccaatcaagctgaggaagtccagccgaagcctgttccagccgcgtatttatagaagacaaacaagatgctgccgtagaggctgaaaaaacgctatgatgcatccaactgtgccaacagcctccggcatagaacaaatcctcttccgtatacgtttgatgggataggatttgccaaagagcttccactatggataaaggattatagaggattccaaaaggatttacatcacaacggaacttatttgccaacaacaaatttccgatgttttctgcaaaacaagaaccaaatagcatgattcggtccgaatgccggatttctgtttcccttttaggtaattctacttgcgttctgaaattcatacgataaggaaagcttttaaaatttaagggcaaatgtaatcataatacacatatttatgctatttttgcacgatatttatcatatcataggaatggaacaggataatttatataacttactgcaaagcatagatactccggatgatttgcgccatttaagcgcagacaaactgcccgaagtgtgtaaagagctaaggcaaaagattatagatgagctctcatgtaatccggggcatttcggttccagtttgggcgtaatagaactgaccgtcgccttacattatgtattcaacacaccctatgaccgcattgtatgggatgtagggcatcaagcttacgggcataaaattttaaccggacgccgggatgcgttctgtaccaaccgtaaactgaatggcatacgtccttttccttctccatccgaaagtgaatatgacacatttacttgcgggcatgcgtcaaattctatttccgcagctttaggtatggctgtagcagccaaaaagcacggagagaataaccggcatgtcgttgctgtaattggtgacggttccatgagtggagggctggctttcgaagggctgaacaatgcctcggcaactcctaataaccttctgattatcctgaatgacaacaacatggctatagaccgtagtgtaggaggcatgaaacaatatctgttgaacctgcaaatgtctgaaggatacaaccggatacgctataaaatatcacaaatgttccatcgatggggtatcctgaacgaagaacgccggaaaagcctgatacgatttaacaacagcctgaaatccatgctggtacaacagcaaaacgtatttgaaggcatgaatatccgttatttcggacctattgatggacacgatgtcaacaatttggcacgtgtattaaaagagattaaagatatgcaaggccctaaactgctccatatacataccaccaaaggaaaaggtttcggtccggcagaaaaagctgccaccatctggcatgctccgggcatattcgacaaggaaaccggagagcgtatcgttgtcgataccaaaggaatgccccctttgtttcaggatgtttttggaaataccctattggaactggcccaaacaaatgataaaatcgtaggagtcactcccgcaatgccctcagggtgctctatgaacatattaatgaaaaccatgcccgaaagaggttttgatgtgggaattgccgaaggacatgccgttaccttttcaggaggaatggcaaaagatggtctattgcctttctgcaatatctattcgtctttcatgcaacgtgcctatgacaatgtgattcacgatatagcgatacaaaaactcaatgtagtattgtgcctggaccgcgctggattggtaggagaagacggtcctactcatcacggagcattcgatctggcttatatgagaccgatacccaatctcattgtggcctccccttacaacgaacatgaactgcgttgtttgatgtataccgcccagctacctgacaaaggtccttttgtcatccgttatccacgtggaagaggttcattggtagactggaaatgtccaatgcaagagattgagataggaaaaggaagaaaattgaaagaaggaaaagacatagcggtcattacgctggggcccattggcgttcaagcagaaaaggctatcacacatgccgaacaggaaacaggaaaaagcattgctcactatgatttgcgtttcttaaagccgttagatgaaagtatgttacacgaaataggcaagagattcaagcaagtggtcaccgttgaagacggtgtgctaaaaggtggaatgggcagtgccatactggaatttatggcagacaatgagtataatccgcaaataaaacgtatcggactaccggatcaatttgtccagcatggttcagtaaaagaactatatcatatttgcggcatggacgaagaaggtatttacaaagttttgatatcattctaagagagacgaacaatgaaaatcattattgcaggagcaggagcagtaggcacccatctggcgaaattattatcggatgaaaagcaagacatcattttgatggatgaaaacgaagaaaagttgagcaaacttgattccaacttcgatttaatgactgtcaatgcatcccccacctccatttccggccttaagaatgcaggagtggcaggcgcggatttatttatcggggtcatgccggaagaaagccgcaatatgacggcctgtatgttggctaccaatatgggggcaaaaaagactgtagcccggattgacaattacgaatatttacttcctaaacataaagaattcttttcccaactaggagtacactcactgatttatccggaaatgctggccgccaaagatatagtagatgccatcaaaatgagctggatacgccaatggtgggaattttgcggtggtgcattggtcctgataggtaccaaaatgcgcgaaacggcagaaattctgaacgttccccttcatgaactgggaggacgtaatattccattccacattgtagctatcaaacggggaaatgaaacaatcatcccccggggagatgatgttatcaaactgcatgatattgtttatttcacaacaacaaagaaatacattccctatatccgcaagattacaggaaaagaaaattatcccgatgtacgcaatgtgatgattatgggcggcagccgcatagctgttcgcaccacacaatatgtaccggattacatgcaggtcaagattattgaaaatgacatcaacagatgtaaccgactgaccgaagtggtagatgacaaagtaatgattatcaacggagatggacgggatatggatctgctcatggaagaagggttaaaaaacacggaagcatttgtcgctctgacggacaattctgaaacaaacattctggcttgtcttgccgccaaacgtatgggagtaaccaaaactgtggcagaagtagaaaatatcgattatatcagcatggcagaaagcctggatatcggtacggttatcaataaaaaaatgattgccgccagccatatctatcaaatgatgctggatgcagatgtttccaacgtaaaatgtctgacttttgccaatgctgatgtagccgaatttacggttaaaaacggttcacgtataaccaaatgcgctgtcaaagatgctggccttcccaaaggtgccaccattggcggactgattcgcaacggtgaagggatactggtgacaggtaataccgtcatccaacctaacgaccatgtcgtagtattctgtctaggtatgatgattaagaaaatagaaaaattcttcaattgatgataaatgcaaaaatgatagcccggattatgggggcgttattcttcatcgaagcggggtttcttattctatgctcgtttctcgctgtctattataatgaatcagatatttcagctttcctatattctgccgcaataacagccggagcaggtagcatagccgctttagcagggaaaaatgcagaaaagagaatcagccgccgcgatggatacgttattgtaacccttgcctgggtgtttttttctttattcggtatgcttccattctatctaagcggatatattcccactataacggatgctttttttgaaaccatgtcaggattcaccaccaccggagcaagtattttggacaatatagagtcattgccacacgggcttttgttctggcgaagtatgacacaatggatcggaggattaggaattgtcttttttactattgccgtattaccgattttcggagtaggcagtgtacaattatttgcagcggaagccaccggtcccacccatgataaagtacatccgcgtattggagttacggccaaatggatttggactatctatttggggctgaccattacagagattattctgctggttgctggaggcatgaactttttcgacagtgtatgtcattctctgactactaccgccacaggaggatattcaaccaaacaaaatagcattgccgccttcaactctccttacatagaatatataattacgctattcatgtttttggcaggtatcaatttcaccttactatatctactgttcttaaaaggaaatttcaaacgcttattccaaaatacagaactccactggtatttgggaactgtgggattttttacccttttcactaccgtcactcttattttcaccagtccgttcagtattgaagaatctttccgtaaagccatatttcaggttgtttccttacaaaccactaccggattcatttctgcagattatatgacctgggtacctgtactttggacattaatgtgcatcatcatgctgtttggagcttgtgccggatccaccacaggaggaataaaatgtatacgcatagccattatgagccgtgtttctaaaaatgaattcaaacatatcattcatcccaatgctatacttcctgtacgtatcaaccgccaagttatttcatcaacaaccaagtcagcagtacttgcattcatttttctatatatggctattatttttattggatggctggttcttatgctgtttggagtagggtttgaagaagcttatagcgtagtcatttccagtttgggcaatgtaggaccaggtattggaaaatgcggcccttcctattcatggaacgggttgccggatgcagcaaaatggataagtgcaatattgatgctgatagggcgtttggaattatttaccgtacttctgctcttcatgccgagtttttggaaaaagcattgacatttacgtcctataaccatttttatacataaataattcaaaaaatctcaatgaagcttcaaatattggctatctttgcaccctcatttaaagggtaacaagatgaataatatgttgagatacattgtatatatcctattatttctactgtttacgataacagtaggtcaggattatcatacggttgagacaacagatttacccccacagacctcttgttaccagcaacaacaagacccctgcaaaagaacagtggacttcctgtttaccaataattttgcagatatgccacaaatagccatatcacttgacaacccttccacatcaaagttcaaatgtatagtccgcattttagcagcattgaacgaactaaaaaagcaggagctacaaacaaaccatatagtttgccacacttttcattcgctttacactgatgcagtagattattatatctatgcactccggcggatcatcatttaatttttaatcttttttcagcattttgctgagtagaaatccttataacaaacgtcttataaggaaaatttttctatccgtttgtctaatcaaaaaaagtttagatatgtattttacattattagttgtcgttatcctgacggcaatcgcattagttgccgtagcattgggaattgcccgtgccatttctccccgttcatacaactcacaaaagggagaagcttacgaatgtggtattcctacgcggggacggtcgtggatgcaattcaaagtaggttattatctatttgctatcctcttcctgatgttcgatgtggaaacagtatttttatttccctgggctgtagtggtacaagacctaggagtgtacggtctgtttagcatccttttctttttagttatattagttttaggtctggcatatgcctggaagaaaggagcgttggaatggaagtaaagaaaccaaccataaagtctattccttatgaagacttcaaagacaatgagtatttggaaaacatggtcaagcagctcaatgaaggcggtaccaaagtactggtgggctgtttggatgaccttatcaactggggacgcagcaattcgttgtggccgcttacatttgcaaccagttgttgtggaatcgagtttatggcagtgggtgctgcccggtatgatttcgcccgctttggatttgaagtagcccgtgccagtccgcgccaggcagatatgatcatggtagcaggaactatcacacacaagatggctccggtactaaaacgtttgtatgaccagatggcggatcctaaatacgtcattgcagtaggcggatgcgccattagcggcggtccttttaaaaaatcatatcacgtattgaacggagtagacaaaattcttcccgttgacgtatatattcccggatgtccgccccgacctgaagccttgttgtacggcatgatacaattgcaacgtaaagtaaaactggaaaaattcttcggcggagtgaaccgcaaagaaaatgaaccacaaaatcccgaacaagcatgagtgaaagaatagaaatacctgccgaaaagctacatgaagaaatgctgaaattgcggcagggtaaacatatggattttctacgcagccttaccggaatggactggggcgaagaaggactaggtgtagtctatcatctggaagatacgaatacaagagaaaatatagtggtcagcactcgcacaaccaaccgagaaaagccggaacttcctagtgtaagtgatatttggaaaggtgctgaattcaatgaacgcgaagtgtacgactattatggtatccgctttataggacatcctgatatgcgccgtttgttcctgcgtgatgactgggtaggctatccattgcgtaaggactacgatgaaagcctcaacccactccgtatgaccaatgaggaacctgtagacacgacacaatatatagaagtacaacatgatggcagtgtaatagaaaaacgcgaaaccatttttgatgaggacgaatatatcattaacataggtcctcagcatccggcaacccacggtgtacttcgttttcgtgtttcactggaaggcgagattatcaaaaaactggatgtgcactgcggatacatccatcgaggtatcgaaaaaatgtgcgaaagtcttacctatccccaaaccttggccctgaccgaccgtttggattatttaggtgcgcaccaaaaccgccatgctctctgtatgtgcattgaacaggcaatgggcgtagaagtaagcgaacgggtacaatacattcgtaccattatggacgaattgcaacgtatagattctcacttgcttttcttctcctgtctctgtatggatatgggtgccttgaccgcattcttctatggattccgtgatcgtgagaagatattggatatcttcgaagcaactaccggaggacgtttgatacagaattataacaccattggaggggtacaagctgatatcgctccggactttgtacagaaagtaaaagaattcattgcttatctgcgtccgatgctaaaagaataccatgaagtattcaccggaaatgtcattgcccaagaacgtttgaaaggtgtgggagttctttcacgggaagatgccatctctttcggagcgacaggaggtacaggacgcgccagcggttgggcatgcgatgtccgcaagcgtcatccctatgcgatgtatggcaaggtagattttaaagagattgtccacactgaaggtgactgctttgcacgttatatggtccgtatggaagaaatactggaaagtatggatatcattgagcaactgatagacaatattcctgaagggaactatcaggaaaagatgaaaccgattatacgtgtgcccgaagggaattattatgccgcagtggaaggttctcgcggagaattcggggtttatctggaaagtcatggagacaaatttccttaccgcatgaaattccgcgctaccggtttacctttagtatcagcaatggaaactatgtgccgcaatgcaaaaattgccgacttaattgctattggtggaacggtggattatgtagtaccggatattgaccgataataatgtgccaattcttcaatatactacttgaagaattcattatttatcagactgagaattaacaaattaaataattacaagtttgcctattggcaaattagcaaattgacacattattaaattatgttcgattttagtatagtcacccaatgggtacactcactgctcacgtcatttatgcctgaagaactggcagtgctcatagaatgtatagtaattggcgtatgtatcatgttggcatacgcagttattgctatcattatgattttcatggaacgtaaagtgtgcgccgctttccaatgccgcttgggtccaatgcgtgtaggtccccaaggtaccatacaggtatttgccgatgtattcaagatgttgattaaggaaattatcaccatccgacatgctgacaagttcctgtacaatttggcaccttacattgttatcctcgcctctatcatggctttcagttgcctacccatcaacaagggcatggaggtccttgatttcaatgtaggtattttcttcttattggcagcatccagcatcggcgtagtaggtattttgctggcaggttggagttccaataacaaatattcattaatcggagccatgagaagtggcgctcaaatgattagttatgaattatctgtaggattaagcatccttactattgtaatcttaacagataccatgcaactaagcgaaattgtagaacgccaagctgacggctggttcctttttaaaggacatatacctgcattgatcgcttttatcgtttatctgatagccggaaatgcagaagtcaaccgcggaccgtttgacttgcctgaagcggaaagtgaactgaccgccggatatcataccgaatattccggtatgcacttcggcttgttctatgtggcagaatttgtaaacttgtttatcatcgccgcagtagccacaaccatctttctaggaggatggatgccgctacatattcctggactagacggattcaatgccattatggattatattcccggatttatttggttctttggcaagtcattctttgtagtatggttactaatgtggatcaaatggacatttccccgtctgcgtattgaccaaattctaacactggaatggaaatacttggtcccaataggtttgtgcaacctgctgttgatggtaattattgttgtatttaaattacatttctgatgaaagaagaaaaacattcctatataaaaggactacttcatggcatcggtacattacttaccggtatgaaagtgacaggacgagagtttttcactcctaaagtcactgaacaatatcccgaaaaccgtgccacattaaaaatatcgccccgtttccgaggacggcttatcatgccggttgatgagaatggtaataacaaatgtattgcttgcggactttgccaaatggcttgccccaatgatacaatcaccattaccagcgaatctgtgaccaacgaagaaacaggcaagaaaaagaaaatattggtaaagtatgagtacgatctgggagcctgtatgttctgtcaactttgtgtgaacgcttgtccacatgatgccattcggttcgatacagaattcgagaatgctgtgttcgaccgcagcaaactagttctcaccctgaacaaaaaataaaaaacaaacgatattatgacactacaactaattgtattcattgtactggcgttgtttatcgctgtctgttcggtattggcagtcacgacctcacgtatcttgcgtgcagcaacttatctgctgttcgttttatttggtacagcaggtatttacttccagctcaactactcattcttgggagctgtacaattactgatttacgccggtggtataacagtgctttatgtatttagtatcttattgacctcttcacaaggagacaaagcagagagattgaaaaatgggaagatggtggccggagctatttctacgatagcaggactggctatctgtctgttcgtcatgctgaaaaatgaattcttgccctctcattttgtgcatggtgaactggatgtacgcactatcggtcatgcactgatgggcatggaaaaatatcaatatattcttcctttcgaagtaatcagcgtgttattactcgcttgcatcgtaggaggaatcctaatcgctagaaaaagataaaatttatggtacacatggaatattatctggtggtttccacctttatgatgtttgcgggaatctatggtttcttcacccgccgcaatttattggccatgctcatcagtgtagaactgatactgaattcggtagacatcaacttcgccgtattcaaccgatacctctttcccgaggaactggaaggcttttttttcgccttgtttgctatcggcgtaagtgcggctgaaacagcagtagctattgctatcattatcaatatctaccgcaatgtacgcaatatccaagtgaagaacttaaatgaaatgaaaaactaattatggaacatacaatactaatccttatcctacctttcctcagtttcctgatactggggctggcaggtatgcgtatgaagaacgggctggcaggggccatcggcaccgtttcactggcaggggtggcgttgctttcctacctcactgccttcaattattttgcaggaggccgtacggcagaaggcgtctatcctactctcacaccttataacttcgaatggttacctttcacaacgaacttgcatattgacatgggaattatgcttgaccctatttccgttatgatgctagtcgttatttccaccgtcagtctgatggtacatatctattcattcggatatatgaaaggtgaaaaaggctttcaacgttactacgcatttcttagcctgtttaccatgtccatgttgggactcgtagtagcaaccaatattttccagatgtatgtcttttgggaactggtaggtgtttcttcttatttacttatcggcttttattacaccaagaaagaagcgattgccgccagtaaaaaagcatttattgttacccgttttgctgatttaggctttctgatcggtatcttgatttacggctattatgccgaaacattctcgttcacaccccaacttcaggtacttgcagttgccggaagtatgataccactggccttggggctaatgtttatcggtggtgccggtaaaagtgcaatgtttccattgcacatctggttaccagatgctatggaaggccctactcctgtcagtgcattaatccatgctgctaccatggtggtagccggtgtatatctggtagcccgtatgttcccgttgtttataggatatgcgcccgaagtactgcactggatagcttatatcggtgcgttcactgcattctacgccgctagtgtggcgtgtgcacaaagcgatatcaaacgtgtgctcgccttctccactatatctcagattggatttatgattgtcgcattaggcgtttgtacttccatgaatcctcatgaaggaggactaggctacatggcatccatgttccacctgttcacacatgccatgttcaaggcattgttgttcttaggagccggatgtatcattcatgccgtacacagtaatgagatgagcgccatggggggacttcataaatacatgcccgtcactcactggacattcctaattgcttgtttggctatctcaggtatctggccattctcaggttttttctctaaagacgaaattctgaccgcctgcttccaattcagtcctgttataggatggataatgacaggcattgccgccatgactgcattttatatgttccgcctttattattgtattttctggaatggagaatggaaaggacactcccacgaatccggactaggtgcacatactccgcatgaggctccacttaccatgacattcccgctgatgtttttagccgctatcacctgtgttgccggattcatacctttcggcaatctgatcagtagtaacggagaagcctataccattcatctggatatgcagatagctgctacaagtatcattattgctatagcatccatcgctttagctacatggatgtatgcaggtaagaaacaacccgtagccaactatctggcacacacattcccacgtttgcacacagccgcttaccatcgtttctatatggatgagatatggttattcgtaaccaagaaaatcatcttccggtgcattagtactccgatagcttggtgggaccggcacgttatcgatcaattctttaacttcactgcgtggagtactcatgctaccgccgatgaaatacgtgacatgcaaagtggaaacgtacagcaatacagtatttggttccttgcaggtgcattgatattgacgctgatactattaatttaatgaataataaaaaatccgccgcatggccattttttaatttttaatttaaaaagatgaacatactaagttttttcattatagttcccttgttgatgctcgcgagcctttgggcttcgcgcagcatcaatcaagttcgcggagtgatggttgtcggatcttccattttattggcattatccgtttacctcaccattgattatatcgaactacgccaagccggtgctacaggagagatgctgttcacagccagcacagtttggtatgcaccgctccatatatgctactcagtaggagtagacggtatatcagtagcaatgttgctacttagttccattattgtattcaccggtactttcgcatcgtggaagttacaaccattgacaaaagaatatttcatgtggttcactctattgagtgtaggggtattcggattcttcgtttcaacagacctgttcaccatgttcatgttttatgaagtagccctgattccaatgtatctgctcatcggtgtgtggggaagcggacgtaaagaatacgccgccatgaaacttacattaatgttaatgggtggttctgcatttctactgatcggaattctcggtattttctatggtgcaggtggtgaaacaatgaatttgctggaaatcgccaaactacatattcctcatgaaatgcaacgcatcttcttcccgcttatcttcttggggttcggagtcttaggagctttgttccctttccatacatggagtcccgatggtcacgcttccgcaccgactgctgtttctatgcttcacgctggggtattgatgaaactaggaggttacggatgtttccgtgttgctatgtacctgatgcctgaaggtgcggccatgtggggagatgtattcctgatattgaccactatttctgtagtttacggtgcattcagtgctgtggtacaaaccgacttaaaatatatcaatgcctattcatccgtatcccactgcggattggtactctttgccctgctgatgatgacacgcaccagttgtacgggtgctattctccaaatgttgagtcacggattaatgaccgctttgttcttcgcccttattggtatgatatacggacgtacccacacccgtgatgtccgattaatgggaggtttgatgaagattatgcctttcctggctgtaggttatgttattgccggtcttgctaatctgggacttccaggactaagtggttttgttgctgaaatgacggtctttgtaggttctttccaaaatgatgatacattccatcgcgtatgtaccctagtggcaacaacaagtatcgtcattaccgcagtttatatcctgcgtgtagtaggtaaaatcctttacggcaaagttttgaatcccgaacatctgaaactcacagacgcaacttgggatgaaagagtagccgttatctgcctcatcgcctgtgtagcaggtttaggattggctccattctggataagcgatctgatcagtaacagtgtagaaccaatcataagtcaattattaaattaaaatttgagaattaaaaattaaaaaatagcaatgatggacataactgcaatactccatatgcatgccgaactgagtctgacagccgtttttattctgatgtttctgttagatttatttttaccggctccacaacgtcactggttacgccccatggcatgtatcctgctgaccattcaactcttagcaaacctatggccggaagaggtgactttattcggcggcatgtaccattcaacccctatggcgtctgttctgaaaagcatcctgaccataggtaccatactggtttttctacaagcagacccttggctaaaacgtgaagacacccgccataaacaaggcgaattctacatccttaccctcagtaccttgctgggtatgtatttcatggtaagtgcagggcacttcctgctattcttccttggattggaattggcaaccattcctatggcttgcctcgtagctttcgataaatataaaggacatagtgccgaagccggagccaaattcattctttcagctttattctccagcggtattttcctctatggtatttccatgatttatgggacaacaggtactttatattttgaagatatccctgccgaactgacaggaactccattacaagttcttgcactagtattcttcttctccggactagcctttaaattaagcttggtaccttttcatctgtggacggcagatacgtatcaaggtgcaccgactacagtgagcgcttacctgtccgttatttcaaaaggcgcagctgcttttgctttaatgattattttaatgaaagtatttgggccaatgactgaacaatggagtgaaatactatgtattatcattgtagccaccatcactatagccaatctgttcgccatccgccaaaacaatctgaaacgctttatggccttcagtagtatttcacaagccggctacataatgttggctgtactggctggaactccgcagggcatggcatccctagtatattatatagtagtatacattgctgccaatctcgccgtattcggtgtcatcaataccattgaacaacatacccacggtaaaatagaacgcgaagattataacggactttataagaccaaccccaaactaactatggtcatgacacttgctcttttctcattggcaggtatcccgccatttgccggattcttcagtaagttctttgtattcatggcagcattccatagtggatattatcttattgtatttatcgcattggtcaatacaatcatttcattgtattattatttgttaattgtaaaagccatgttcatcacacctaatgaagatcctatcggcaattttcgtacagcaactccgatgcgcatcagtctgttggtatgtgtagccggcatattcgctttaggaattataagtggggtatatcaactattaagtgatacatcaatactataaaattttagttacaagaagaatcacaactgaaatgattattgtatttctatgatcaatattcttttactttagaggcagaatcaatctgtttccaaagtaaaagaatatcttaaagtttctattcaacaaatttatcattatcttcgtagcaaattataaaaaataagcactatgaagaaagtcctctatattacaatactcgcctgctctactttatgggtatcttgcacagagaaaaataaacaatccgtcagaacagattcctttatagaaaagaatgtagcatttgcacgtgcacaaatcgggaatgaaatacgaatcatagaaaaatcagaaaaatttacaaaccccgttacactgaaaactgacagtaccatttattattgtgactacgccgactggcgaagtggttttttccctgggtcagtgtggtatctatatgaactgagtggcgacactactctcttatcattagctgataaatacacttcggccatagaagaagccaaaaaactgacttggcaccatgatgtaggtttcatgataaattgtagtttcggcaatggatggcgaacaactaaagtacccagatacaaagaagtcatgatagaagctgcccgttcattggctactcgtttccgtgaaaagccgggaattatccaatcatgggatgtgacccgaggctggcaatcggaacgcggttgggaatgtccggtcataatagataatatgatgaatttggagttactatttgaagcaactaaattatctggtgattccactttttatcacatagcagtgaaccatgcagaccgcactttgaaagagcatttccgtacaaacggaagttgttatcatgtaatagattatagtttggcagacggcatggtacggcatagacaaacagcccaaggatatgcagacgaatcgacttggagtcgtggacaagcatgggctatttatggttacactgtgtgttaccgggaaactcatgataaaaagtatctaaatcaggcattgaagactttccaattcatgaaaacacatccccggcttcccaaagacttgattccttattgggatatggatgctcccaatattcccaatgaaccacgagacgcttcaagtgcttcttgtatagcttctgcactttatgaaattagtacaatggatgtgcctgatgcaaacagttataagatctatgcagacagtattatggcttctctagcctcaccaaactatctggcatctcttggaaaaaatggtaactttttattaatgcattcagtgggcagtattcctcatggcacagaaatagatgtacctttaaattatgcagactattatttcctggaagcactgaaacgaaagcgggacattgaagaaggcacacgctaattatacagacaaacagataaccatccgagtaccttcagtataactcgagtcaacaaatatgttaccagacaaacgtttaataattaaacggcttaaatataaccccaatccgttaccttgtgcaaactcatccagtttgataaaacacagaaatatttcctcccgtttttcgggaggaatgccacagccggtatcggttacttcaattcgtaacttactttgtgccttatccaacctcatcttaagagttatagatccagaatctgtaaatttattagcattatccaacaggttctctatcactaacgacaaatacaattcattggtggaaacaaaaatttccccttctggtaattccaaatgataaattattcccaccctgctccatcgttctactttatccatttcttgtctgcagatatgagttatctggtttgttcacaaagaagaggcgcatcagatgaatctaaattagccactaccagcaagtgatctatcaacgaagtgagaatttccgcattagcagtaataatacctgaaaagccaacaatagcgtttaatggagtccgtatttcatgacacatagaattaatgaatgctgttttcattttctcactttccccagctttttgattcagttcacctaaaactttttccatctgtctttcttcaaatcatagtacaagtaaaaacaaatactcatcaccaatacaagtaccataaaaagtgtaattactaaaatacgcctgttcttagtttccaaacggtaattctcatggttcaattgatctacttcatactttacctgtagttcactaagttgttttttcagattggaagatttaatggaatcctgcacttgtatatagagtttatgatacttaaaagcatttttattatcttccatagcctcataaatttgtgaattgatatccaataatcccgggacattagactgacttgtcatccaagcatattttatcaagctgtcattagttatcaatgcattatggaaattatgcttatataagtaataattattcatgccaaaaaacaattatacttatcaataggctccgtaacccaagcactcatcttgatcatcagattataatacttctctaatttatcatcggataatttatccgcacgcatcaacaaagaagtataacattggagatatcgtatattaatattatagaaaggacgttgacgagcatagtacaactcataatattttctatattgctgaagctatttttcaacatattcaatatatagatctcctttatctataaagttcaaggtcgaaagaaaattccatacagtacaaatacgaaacttgaatccttcctcatatggtaactgacaagccagcttataagcagtttccaaatagggatcagcctcttcatatttaccttcactacacaaagcatagcctgtaataaaagtctgttccatctgtatgtaaatatcattcccacctatattttctttacccataaaagccaattcctctgttatagcagtttcaacctcattattcctgactctgcctgcaaacaatctcattcgtaaaaagaataaatatggatgagattcttccagtgtcccaacatcctttaaaagagacatataataccaaacagaatcggcatgataaactttaatatacgagaaaaccaaatcagaaagagcctcaaacatatgagtcttatcatttactgcttttgcggtgaaatacatttattaagataatccacttcttcaggtttctcaaaataaaaatcagccaaacctctgtaaatctcaatttgtagagaaaactctacaggacttcctataatattcagaagactatctttggtagtagaaatactacttcctataacaacaaaaatccccaaacagatatcagtatataacaagtgatatatttcataatatcagattattaaggtacgaatatacaaataatatagcaatgtagcagcaattattctttcattattagaatttacacaataatgggcaattaatccacttattttttaattatatgctttaatattgcatcgtggatattttctggcaactatgaaattattaattattaaacatcaaatatatggtaaaaaagttagttagtgtattttgtatatgtgcatattttggacttgctcatgcacaaataccacaagagatttggaaagaaagtgagcaaatagaaaaacaaatcaaaaagacctcttttcccgatcgtgtgtacaacattaaagatttcggtgccaaagaaggaaataatggtgaaatattctgccatgaagcaatcaatctggctatcctcacatgcagtcaagcaggtggaggaactgtattagttccacccggagaatttctaacaggtcctatcacactgaaaagcaatgtaaatctgcatttggaagaaggcgcctatctaaaattttcttcagagaaatatctatatactccaaccgtactcacccgctgggaaggagtagactgttacaatttgcatccattaatttatgcttatggagaaagtaacatagctatcaccggtaaaggtattatagacggacaggccagtaatgataactggtggagtatgtgtggtgctccacactatggctggaaggaaggtatgacagctcaaaaaaatggcggcagaaacaaattactgatgtacgccgaaacatttgccccgatagataaacgccaaatgacttttgaagacggtttacgtccccagcttatcaatctatatcgttgtaacactattttaatagaaaatgtaacattgaaaaattctccattttgggttatccatcctttattttgtgaaagtctgacagtacgtggggttaaagtatccagtcacggtcccaatagcgatggctgcgatccggaatcaagtaagaacgtattaattgaaaactgtatattcgatactggagacgactgcatcgctattaaaagcggacggaatgcggacggacggaaatggaacgtaccaagtgaaaatatcattgtacgcaattgcgaaatgaaagacggacacggtggtgtagttgtaggtagtgagatctcgggaggatataagaacctgtttgttgaaaactgcaaaatggacagtccgaacctagaacgtgtcatccgcatcaaaaccaacaactgccgcggtggggtcattgaaaatatttatgtgcgtaatatagaagtaggcgaatgtcgcgaagccgttttgaaaatcaacctgcaatatgaaaaccgtgaaaaatgtgacagaagtttcccacctgtagtacgccatgtatatctggataatgttactagtgaaaaaagtaagtacggagtcttaattaccggatatgacgaccgtgtcaatattgaagatatccatgtaacaaacagccgtttcaataatgtagagaaaaaagggaatttaattaccggagctaaagatgtagtactgaatgaagtatatatcaatggaaataaggtgagaaaataagatcccccttattatatcgggtgaacaatgagttcacccgatataatgataaaacataactttactatcatttatcttcatcgtccaatctgattttttgcatattctgtagaagtcattccccaataagacttaaaacttttactaaaataatgaggatcactaaaacctaccatataagctatttccgccattgtatattggttttccttaatcagttcagcagctttcctcatgcgtatttcttttatatacattataggagccataccagttaaagatttcaacttatgaaaaaaattggtccgactcagactgaaataactgaccaattgatctacattcaattccggattaccaagttgctcttccataattttagctaacttattaagaaaagcagcgtctcttgccgacaattgaaccgatctgtctttttctttattttcgttcccctcttcatatcctactttacaataatatgcttgtaacattttacgccgagctaggatattttctactttagcttgcagataattaacactgaacggcttcgttatgtaatcatcagctcctgtatgaataccagtcagaatgctatccatatctgtcttggcagtcaatactatggcaggaatatgcgaagttcgttcatcgttccttagttcctgcaacatctgtagaccactttttacaggcatcatgatatcagtaattatcatatcaggcagatcagaaaaagccttttttaatccaacctcgccattattagcctcaacaaaccgatatgcttcctgaaatatttgtttgataaatactcttaattcataattgtcttcaacaataagcatgagcggcttctccgcttcattcaattcttgtagttcgttttgagaattgaaatctaaatttgtatcttcattccaatctgataatatatattccgtgtcagacggataatgttttttaccttttaatagccttacagtaaatagactcccttttccgaactcactttccacatttatactaccatgatgcatttccacaagttctttagccactgaaagtccgataccagaacttaaaggagcgtaaatgctatccggaaccacattctcgtaacgattgaaaatcactttctgcttttctctctttatccctactccttcatcttggatttgaagaaggactgcattcccatcatctttcatactaacccaaatgttcttgccatcagaagtgtatttgaaggcattagacagcaaattaaaaataactttctctaatttatctttgtccacccaaagatttactttagacaattgagtgttaaaattcaaactaatatgccgctcttgagataaagttgtaaaatagttgattatttctttcgtgaaactgataatatccacatactgaactctcagtttcatcttgctattctggattttactaaaatccaagatctgccctaccaacctctgcatacggtcactattctttttaataatcttcaaagtatctctcaccttcccagaaagactttcgtctctgagtatatattccaaaggtccggtaatcaatgttaatggagttcttaattcgtgagacacgtcagtaaagaagctgagttttaattgagtaatcaattcttcatttttagccttattttttatccgataaaaaacggtatatacataaatggcaactgcaataaataatacaatcaaaaagaaatagagcatagtagcacaaggtgtctcagagaaagtaggaagcacttcaaaagaaagtgttcgttcattttcaacccatacaccttcattattggtagactttacacgaaatacatattttcccggaggaagattagtatagttagcctcatgcccgttatccgtcaaacgaaagtttttatcaaaaccgtctaacttgtaagcatattgaatatactccgtattggtcatgtctagagcagagaataccaacctgagggtgtgattattaggaggtaactgcatatccttgctattatcaggattaacagacaaaatagaaggagtttttctgggagtcagttcctgattgtttacccaaatagaagagaaaaatatttgtggtataaaatctgttttatgaatattctcaggggtaaaatagaacaaacctcggttagtaccaaaaaaaatctgcttgccatctgttgcccctacaccttcactaaaatgcatattaaacgcgatatgctcactagaatactgaatctgttcggccgaagctacaaatttcactaatccaccacccgtcaccaaccataaatttccttgtttatcctcgtgcatggaataaataatatctgaaataagtccattcttctgtgtgaaggatttacattgataagaatggagccccatgggagaaagctcatttaaccctccgccataagtaatggcaaaaatgttcccattatccatacattgaatcatttgtacgtcattattactaagactattcacatttccctgttcacggcatatagaatgaaaatctatttcttcaggacaatgaaaagaaaccttaaattgtaaaattcccgctgttgtagacacccagatacgcccttgattatcttcagtaatatgtctgactttataaaaatgactaatcggatatctctttaacaaattgcgatgattgataaatcttaaagtaccatcaggcatagtttcaatcaaattcaatccacctccgtaagtagctacccaaagtctctgcctactatcctgaaaagtaaaatagatattatcattactcaatgaataggggtcgtcagctttatgtttaaaatgctgtagcttaaaattgccttgtgaagtttctattgcttttatcaatccctggcctttagtcgaaatccaataaacaccagccgaatcttgcatgatggcatatactttgccccatttcatccttttcaataatcgaagccgggcatcatatatggaaacattcatatctctgcttcccgtccaaatacgttgttttttgtctatatacagtgccctgatctcattatcaggtaactctacatcctgaggagcaggtgtatagatatgaaatttatcagggataaaagtgatgcgcttaagtcggttgagctgggtactcatccataaatttccttgtttatcaacaaaagcagcaaaacagcggtcatttgatttccacttgacaggctgctccgtagtattaaaaggtattaaccgcctattttgagaatcaaaataagaaaatcctccgcccttagggtgtacccataaaatatcattccgatcctcaaaagcaaaaaaatcactttcagtatttagtggtcttccctgttcatcctttccttcaataaagcttaaacgctgtgttttcagatcaaacaaagtgactcccggaacaggatgtacaagccacaataaatctccacaagtaattttagcagactctatgtttttgtctttcaacagagaaagagaatcaagcatcacatgtcttatctcaccgagagagtcatgaataaaaaagccatccgaatcagtaacatatatcagtccagccacagaaggcaaaatagaaatcacagaagccgatgttggcaattgagtatggatagaaagttctcctgtcaacaagtatttatagactttgccttgatgtgcacctaaatatatatattcttccaactctgttgcaaaataaaaaggtattttctcactttttcgacaatcagacaaagaaataatagaaagttctgaatcatataatcgatataccccctcatccgtaagaagccattcctgtaatttcgaatccataaatacagaccggattttaccagtagccaaagtattttctcttgatgaatagaattgaaatgtcatagataaatcttcaggagccgtaacgacccgtactgcactcccatcttcacataataaccatactattccattcggaaggacagatattgaccgaaagttattgactgttttttgaatgacaggttcaaagacttccttgtcaggattaaaacgataacaagtggaatcataacacaatacccatatacatccgaatttatcctcgactatatccaataaacgatcattggtcaatcctcccagatcttccatattcgatttataattcttaaaattataaccatcaaaacgataaagcccattccaagtagcaaaccataacaaacctttatgatcttggataatatcattgaccagcccatcctccactccattctgactggaaaagtacgtaactgaatatttttgagatatagctccttttgccagtacatcggctgtaaaaaagcatagtattactacacagaaaaaggtaagaatatcaacccagtatgttttcatatcaaagtaatgtgtttcctttgcgaaattagcagaaaatgggtattcatcaaagtactttctatttttaatccaccgcaatatatgttgtttagctacctttgatagatattccaactaaattatcagtttttccacttataaaaagataacatccgtctatatttgacatcaaaacaaaaacaactctaatactaaattaataatgaaagacatgagaaaaaaagagtatttaaaatcccgctctgttatagtacagggtattcattctccaaaaagattttggtttgcttgcggactttccttaggactagtttccttaccattatccacttttgcaaacaattggtcaaaccaactaggttcatcaattcaaaaatcaattcaacaaaaccgaatcattacaggtagtgtcatagacgaaagcggagaagcattaatcggcgtttccgtattggtaaaaggaactactttaggaacggtaaccgatttagatggtaatttcacactggaagttccaacaggtgcaatcttagttgtttcatatgtagggtataaaacacaggaaataaaagtaggagagcagcaaaaactagctatcacggtcgaagcagacaacaaattgttagatgaagtggtagtagtgggctatggtgtagtaaagaaatcagaccttacaggttctgtaggtagtgtaaaatccgaaacaatttctgccaaaggtgcaacatcagttgtcgaaagtctacaagggcaagttgccggagtgaatatctcacagtcttctagccgtgccggtgacggattcaatattcagattcgaggtaaaagttcattaaatggcggcaatccattatatgtaatcgatggagtagtttgtgaaaatatggattttctaaatccgatggatattgaaaaagtagacattttgaaagatgcttcatctaccgctatctatggttcacgggccacaaatggtgtagtgatgattaccaccaaaaaaggagacaaagatatagccaagactacagtcagttatgatggatattatggtataaaaaccaaagccaatatgccggactttatggaaggagatgatttcatgaaattccgtttctcccgttatctagtttcatctatggatgcctcttcaggaatgactaactgggaaatgactgatgccaatttcctgaacttctggggaaatggcagtcaaatagtgaaagatatgtatctcaataaaaattacaccgattgggtagatatcgtaacccgtaacggctcacaacagaatcatttcatcaatatttccggaaatacaaaaaatataacctaccgcgtaggactagggtatcaaaatgaagaaggaatcatgtatgacggttatgaacgctggaatataaaaggagccgtagatcataagatttcagataaaatctcagccggattctccacaaatatggcaacagcatccaaagagagtggtagcaactactctattttggaagggttccgtatgacccctaatatgccatgctattattgggaaggggaaaaggcaggacagttaatttcacaaccaggtaaagataccgccatctatcccaatggtggtggtccgacttcctccatcaatccagtggtggaccgtttgaactcaaaagacgatacacgttcttatgatgtgatggcaaatatttatttgcaatacagccccgttaaagaaataattcttaaaactactttctcccccatgtataccaaaacccatcgtggtacattctataacggagaaacccaacttcgttctggaaaaacaaacatggccgaaaactataatgatgaaatattctcgtatacttgggatacgcaagccaattacatcaagaattttggagatcatagtctgaatgccttggccttattcagtgtctatgaacaaaagttacaaggcgactatatcaatgtagtggatatgccatttgatgtaaactggcataatcttggttcaggcactgtacaaagtcagtctagctattataaaaaaatctccatgttatcttatgtagcccgtatcaactatgcctacaaaggcaaatacatgctgactgtatcttcacgttgggacggcagttccaaattccaaaaagacaatcgttgggggatgttcccctcagctgccatggcatggcgcatttccgatgaagattttatgggatttgccagcaaatggttaagcaatttaaaactccgtgccagctttggcgttaccggtaataatgccggtgtagggccttatgacacacaagctttggcaaatattaaatattactataattacggatcgtctgttgccaacggttatggttataccatgacaaacgccgacctgacttgggagaaaacaaccgaaatcaacctcggtcttgacttcggtttcttgaataatcgtatcaatggatctatcgatatctacaacaaagattccaaagatctcttgatggagatggaaaccccatttgaactaggttcctatacaggctccattgtaagtaatgtgggtaaggtgaacaataaaggtatagaaatccaactgaataccatcaacgtaaagaataaagattggaactgggaaacaaccttctcttttgcgcgtaacattaactctatcaaagaattgaatggtaccaaagaagatttggtgggtaacaaatggtttatcaatcaccctatagacgtagtatacggctataaatataccggaatctgtactcgagaggaagcccaagcttatgcccaagacccgaaaatgaaaaccaaattctatgaaggcgagatgaaaatctatgataaggatggcaatggtactatcgatgccaatgacaaaatgatcctcggacattgtgctccgacctggaccggtaacttcacctccaacttgtcctataagaacattgacttctctttcagcatttacaccagtcagggaggaatggtatactctcccttcatggccgagttcgtagactatggacagcgtggcatgaatcgcctaaacatggattactatatacctcaaggtgctccgatactaggtgctgatggctctatagcctaccaagaagtcactcattacggtagttaccccttcccaaccaatggtggaaacggtaaaggaggcggtgcatactggcaaagtggtgccaatgaggaccgagcacaaaatttcgttgacaactcatatgttcgaatcaagaatattaccctcggctatacttttccacagaaatggatttcaaaacttcatatttccaatttaagaatctatgctaatatattaaatcctttcactttcacaaattatgaagggttcgaccccgaatgggccgacgcacaagtaggtgatggtaccggtggtgtcagttcaagaacttatcaagttggtgtaaatttaaaattctaaaattaaatgattatgaaaaaaatatatttcattatggcattaggattggcaactctctcaggatgttcggattttcttgaccaaaacaacaaatctaatgttccatcagctgaattttatcagacttcggcaggattcgccagtttaactaacagcgcttactccacactgcgggagctttataatgcccaaccgcaattattcgtagcgggaacagacctgtatgcagacggaaagtcacagggagtagtcatgagccaatataccttcactgcagatgaaggcattataaaaaatttctatgtaagttgttttaaaggtattcagctagccaatagcgttatatcttatggagacataacggaagattccagtgtacgactgcaatatgtggacgaagcacgttttatccgtgcatggtattatttccaactagtgcaacagttcgggcctgtagctttgaacaaacaaatgtttgaccatgccgaaatgagtcatgaacgtgccagtcttgcagatgtttataagttcatcattgaagagtttgagtatctagcctcttccgaatcccatttaatggaacgtgccaactccggtgtaggacgtgccaataaacgcgcagcaaccttttacttagccaaaacctatctgactcgtggatggctagatggcactgattacgaagcccaagaagaaaatatagctcaaaattcagacttcgcaaatgcagctaagtatgccttggaagcaattaatggcgaaattcctttcctctccatagaagaagcttttgacgtagaaaatgaagaaaacaatgaaatattctggagcatacagtttaattcggctgctgtagaagatcccgtaaaagacggttcctaccaacaagcccaattcggagcttatttaggtggttccgaaaaaccaagaaataaggcaattgacggttgctttgctccttcactacgtctacagcaaatgtatagtcggggtgatgcacggttggaacaaacttttatgttagaattccataccagttatttcgactattactcagcaccgactagttcttctatcatttattattatgctccagcatgggctacagatgaagatatcgctgcctggaaagcagacgatccttatggaattaaaaagaatacactggtaagcaaaacaatagcagacggtggtattgctccatccaacggtgccccagccacatacaaagaccgtcgttcacaagactacggcaatgcttgtatcaagaaatttgatgattattcagaaacttctattgctaaccgtaattctacttgcagcatgcatgatgtggtagtagcgcgcttaggagaaacctatctgattgccgccgaagcctatttaaaaatgggtaaaacagaagaggctgcacaaatgatcaataaacttcgtcaacgtccaggaactattcgtaaaggatacacaacagaaatgactgtcaccagcaacgatattaatattgattttattcttgatgaacgtgctcgtgaattagctggagaatatgtccgttggacagatttgaagcgtactcacactttagtggaatatgccacaaaatataatgaagacggcataaaagaatctgctatgataggccctgatggtaaatacaagattcttcgtcctattccacaagctgccattgatttgaatcaagctaaagtgacacaaaaccctggttattaagttaaaaaacatgctgatgaaaaattttttacttattcttctatactttataaataatgtattagtcttgtcagctcaaggtactcccggtaaatggggagatcagggcaatggaacatacataaatccgattttaaatgctgactactctgacccggacgttatccgggtcagagataaatattacatgatagcttccgactttcattttctaggaatgcaagtattggaatcttcagatatgatcaattggaaactgatttcccaaatctatcaccattttgattttcccggctgggataacaaccaacaatatgcaggaggttcatgggcaccctcaattcgttaccatgataacaaattctgggtctttttctgtactcccaaagaaggattattcatgtcaaatgctgtcaatccttcaggtccttggagccctttacatttagttaagaaagtagaaaaatgggaagacccttgccccttttgggatgaagatggtcaagcatacctaggccggagccgtcatggagccgggcctatcattattcataaaatgagtgcagacggtacacgtctacttgatgaaggaatgaccgtatacaccggacctgtagccgaaggaacaaaaattttcaaaaaagatggttactattatctctctattccggaaggaggagtaggtacgggatggcagactatcctccgctcaaaaaatatatatggtccttatgaaaagaaagtagtattggaacaaggaagtactacgataaacggccctcatcaaggagccattgtcgatactccggatggtcaatgggctttttttcatttccaacatcatcatgccttaggccgtgtagttcatcttcagcccatgcattgggaaaacgattggcccgttatcggagtagactttgatagaaatggaataggagaacctgtatatgtatgccagaaacccattgaaagcaaaaccatattcgctccgcaaacagatgatgatttctctacccccaacctatcactacaatggcagtttaatcataatccgacagaccacgcatggtccttatcggcacatccaggttcactcactctgaaagcattgaaatcttcaaccttcagactggcacgcaacaccctgacacaaaagattatggggaatataagtgaagctacaatagctatggattttacagaaatagctgatgggcaacgatgcggattagcttgcatgggaaaagaaaataaagttctaggtatcaagatggagaaaggacaaaaatatctatacatatccaatgacacaacagaaataagtacaactttcctaaacggaaaccagatttatctacgtgtatccatcgacatgctcaatcaaaagttccaatatttctacagtacagataatatacgttttattccttatggaacttccttttttattccattcggtttttggaaaggtgcccgcattgcactatattgttataacaaagaacaggaagcaggagcaacttcatttcaatggttcaaatacaaacatgacggacctcaaaataaaatagaaaatacagccgaacagattattgccaatatagcgcgcacttcatttccgcataagaaaataaaagtgatctgccctgattccgcttccaaccaaaaaggtcattcacgccagttaatacagcgagcaatagactcttgttctttggcaggcggaggacacgttataatttcgaaaggaatctattatttaaagggaaatctagtactgaaaagtgatgtcaatttacatttagagaaagacgcctatctacttttcagcggtaaggctgatgactttcttcctgaagtatggacacgttgggaaggtacggaactatatggacattctcccatgatttatgccaaacatgccactaatatagccattacaggacaaggtaccatagacgcccaaggaggacgggaatttgcttcatggtctcagatagaggtatcagacagaaatcgtctgcgtaaaatgggagaaaaactaatccctgtcacagaaaggatctttgggaaaggtactatactacgtccctcttgcatacaattcatgggatgttctcgcattttagtagaaggtatcaccattaagaattctcctttctggactattcatcctgtatactgtgacaatgtaatagtacgaagcatcaccattgacagtcactatcctaataatgatggatgtgatcctgaatcaacttccaatgtattaatagaagaatgtattttccgcacaggagatgatgccatagctatcaaagcaggccgtgacgccgacggccgtgaaataggacgcccttcaaaaaacatcgtcattcgtaattgtctgttccagtctgaatgcaatggattatgtatcggcagtgaaatgtcaggcggtgtagaaaacatatatatggataatatacaaataggaacggtcaagaatgccctttatttcaaatccaaccgtgacagaggaggatatattcgtaatatacaagtcagcaatattactatagaacgctcaaaaggggcagtgctccgttttgaaaccaattattttggtttccgaggtggcagacatacctctcaatacgagaatttccgcatcaacaatgtaaaggctggctgttccgaccattatgcaatttttatagatggatatgaagaaaagcctatcaaaaatattgagatagagcatttccatgtacaaaaggcccctcatccttattacttaaggtgtgtagaaaacatctgcctcaaagctacttttgtaaatggacaaaacttaccggaatatccgaaaaaacaaaaagaacgtgtaatactagatgtttactgattcttcacaaaatctgtataatagaataaaagttctgcaaacagaacttttattctatctatatgcatatcttattccaaacactcatcaagttcacctatcaactcttctttatcaagatgccgcccgataaaaactattttctgcatacggtctccatatttatcatcccaatcccgcaacaagccgggctcctgacgcattacctccatcagttcttcttcaggtgccgtagcataccataaaccagcttccttcaactttttctgcacaccagcctgctcaaaaagaaaagacatatcacgattattgctgaaataacagactccttttgcacgaatgatattacgactccatctggttgatacaaaacgatcgaatttatggatatcaaaagccggacgacgataatacacaaaagtactgataccatattcatccacttcactaccctcatgatgatgatggtgcgcgtgttcctccgcttcttttttctgctcttccgtaagggcgctctctattccacgtatccaaccggcagaagtggcagtacgttcaaagtcaaatacttcagtatagattatcttattcaaatccacatcagcataatcacattctattatttcagctgcaggttgcaatgtacggataatctgtttgatacgttccaattcgtcatgtttcacttctgagaccttattcaataatacaacattacaaaattcaatctgttggataatcagattttcaatatcctcttcgtcaatacctttacgggtcaaatcgttgccacaagaaaactcactttgcagacgtaaggcatctaccacagtcacaatacaatccaaacgacatcccccgtacgtattctccatacttgaaatagaacaaatagtctgtgcgataggagctggttcacaaacaccacttgcctcaatcacaatgtaatcaaaacgctccaacttcataatatcatctatctgctccaccaaatccatcttcagagtacaacagatacaaccgttctgaagtgctaccaagctttcgtctttctttcctacaatccctcctttctgtatgagatcagcatcaatattcacctcaccgatatcattgacaataaccgcaaacttaataccacgtttattagaaagaatatggttcactaatgtcgtttttccactgcctagataaccggtcaaaagcagtataggaatttcttttactctcatataaaattcaatattactttcacaaaggtatagaatgattaatttccaaacaatagaaaacatctttttataccttataaacaaaaaatactcttcacataccacccagttagaatctattaaaatttaattcgcagtgcaatatttttcaaaaaatgctttaaatattccaagagtataactatatttcgcaaaacaaatttataataacaatgagaaacaaattagcacaaaaaatcaaattaggcgcagccttgttattgatggcgggaacttcagccctcgcacaaatctccaatcaaatttatatccctactcctgaaaatataaaagcacggcaggaatttcaagataataaattcggcatatttcttcattggggcatttacagtatgaccgctcaaggagaatggtatatgaacactcacaacatcaaccgtgatgaatacgccaaactggcatccggattctatccttcgcgcttcaatgctgccgaatgggtttctgccatcaaaacctccggagccaaatatatctgtatcaccagtcgacaccatgacagtttctcaatgtttgatacaaaagaatccgattttaatatcgtagacgctactcctttcaaacgagacgtactaaaagaactggcagaagaatgtcaaaaacagggcatcaaactccatttttattattcgcatttggactggtttcgtgacgactatccggaaggaaacaccggacatgggacaggacgtcccaaaggacatggaaactgggaaagttactacaagtttatgaataaacagctgaccgagcttttgactaactatggccccgtcggcgccatttggtttgacggtatttgggatcaacctaccaacttcaattggcaactggaagaacaatatgcattaattcataaactgcaaccatcctgtctaataggcaacaatcatcatcgaactccttatgcaggagaagatttccaaatgttcgaacgtgatttgcccggtgaaaacaaagccggtttttcagcaggacaaggaataagtgaactccctttagaaacttgtgaaacaatgaacggaatgtggggctacagaattgaagaccaaaattacaaatcccccaaagagttgatacactatttggttaaggcagccggaaaaaatgcaaatttgctaatgaatattggacctcaacccaacggagaattacccgctacagctatagagcatctgaaacaagtgggtaaatggatgaatcaatatggagagacgatttatggaacccgtggtggtgatgtagctcctcacacatggggagtatcaacccgcaaaggtgatcgtttattcatccatatactagatttgcaggataatgcactttatatacctctaaaggcaaaagtaaagaaagcaatacagttcatttccagaactccactttctttcaaacaggaaaaaaacggcatattaataaaactgcctcaagtacctgatgacatagattatgtaatagaattagtcattaaacaataaaataacattcatctttaaacaagcatctttacgtaaaaaacaagaatttccgatgcaaaagagagaaatgtattctacacacatcagaaaagaaacatgagtaaccgcatacattactcttctaaaaaagaattcgtccttggattattgaagcccaaggacgaatcactcttagtttgtggagctggagggagtcgaaccctcgtccaaacgaggaagccatacgctttctacatgcttatcttcgcctaaattttcgagtataagcaggaccgaagccaccaacttataccttatcctctaaattttcgtaagagacatgaagcggatctctaactattcccgattttactgcaccacttgatcaaacgcttcggaacaagagcttttgagtgatgtctcgtttccaccactttggcagaaataaagctaatctactatgattcgattaagcagcaagagcataattttcgttgccagataaaattttgaaaactgggattatagtgccaatcaaccacgcactgcatgcttacataccacttagccacgctgtcaaatccagtcaaccccgcactggtaactcataaagaggttacaaatatacacacacttctgttaatatccaattatttattcgtttatttagcgcattttaataagaacaacgtatctttgaaaataatttttctaatactaacagatcagacaatatgaacaaaaaattaatggtattgtgtatgaacagtatgatactgggaggctgtataccctctcccaagaaacaaacagaaccaattacagttgaaaaaaatccgaatatgatgtatatgttggtaggtagttatgcaactccagatgaagaaggtatcaaggtttataactttgatgagcaaactggcaactcccaatatatcagcggaataaaaggaatatccaacccttctttcctcattccgtcggctgatggaaaaagaatatatactgtaggggaggatgccggaaaaagttctaccgccaatgccatcaaatttgataaagaacaaaagaaactaaccttgcttaattctcaacccactgacggcggcgcaccttgttatataactctcagcccatcggaaaaatttgtcttgacagcaaattatatgggaggtagcattaccgttttcccactagataaagacggaaaattaaaatccgagacacgccttatttcctttaccggaaacagtcttgacaaagagaggcaaacacaaccacatctacattgtataaaattcactccagaccataaatatctacttgccagtgatttagggacagaccagattcatgtatttcctgttagtgagaatgtaactgatggcgtatcccattccttactgaacgaatctgaagaatttaatataaaagtagaatcaggatcagggccacgccacatttgtttccatccgaaccaaaaattcgcttatctgattaacgaaatctcaggaaaagttatagctttctcttacgacaaaggaaaattaaacgccatacaatatatagaagctgacacagtgggtgccaaaggtagcggagatatccacatttcacccgatggaaaatttctgtatgcatccaaccgcttaaaagcagacggtatcgctatcttttccataaatcaggaagaagggacattaacaaagacaggttatcagctgactggtatccatccacgtaattttattatcagccggaacgggcgatacctgttggtggcctgcagagacagtaactctatacaagtatttgaaagagattcccaaacaggattactgaaagacacaggcaagacaataaaaaccaataaacctgtatgcctgaagtttaccttttaaacaggaaacatagtctttaataaaataaactgctgccttcattgtatgtattggagacagcagttattttattaaagacaaaacgaatctttatacataagtttccaagaacttaacatgaccttccacggttactttcacttcttttgttgtggcagggaaaaggatagattcaccggcttgcaattccaatgagttaccatccccatcagttaccgtacatataccttccatacaaatataaattacaaatgaatccagttcactataatctatcgtcatattttcagtcaaatcataaacagaagtagtgaaatacggacaggtaaccaactcgacagactcattctgtttcggagtataatgagtacgataatcctcttctacagaataatctatggcatcttttgacaattctgtatgcagttcacgagtattaccattcttatccttacgattgaaatcataaattcggtaagtcacattcgaggtctgctgaatctcagcaataaagcatccggctccaatactatggatacgtcctgcaggcaagaaaaacacatcacccgattgtacggcataatcagccaatgcatcacaaatcgtattatcagcaatcattgcagcatattcatcgggagtaatctttttacttagtcccgaacgcagatgtgctttccccccggcattgtcaataacataccacatttcagtcttgcccatcgaattatgacgcttctttgccagttcatcatccggatgcacttgtatagagaggtcgtcacaagcatcaatgaatttgatcaacaaaggaaaattatctccaaaacgctgataattactttctcctaccagagatcctttatattcttttaccaactggctcaaatttttgccggcttcagttccattagcaacaacagactcatcgcccggaacattagagatttcccaactttcaccaacctgaggctgttcaatattcagatgcttgaacgggataatcttttctccaccccaaatggtggatttcagaatggggttaaatttaaatggatacataggtgtattaattaatagtttctaggtttggatacaaaaataagggaattctatgactttaccgcatagaatcccctaaaattaacagctatgtgtgtgtatattcaaaggtgtattagtagtctgtattattaggatcgaagttagtccagctatccaaccaattatcatctgttccaaacgctccgatatattctactttctcaaaaccactgctcaacagtgcgtcattaaatgaagcggctgtcaacacaggactacctgcatccggcatataattaacaccgatattacgcccgtccttgaatttcaactcattgacatcagtcaatactttatttcctttctgagccttaaaaaaagtagaagagtaagactcttgtccagcatcaatgatttgcttgttcacggcatcataaagcacatcatcatatattttgttggcatcagaaccgaccgccgtcatacctgcaaaccaaatattctccaactttatgtttcctgccttggtcatctcaactgtattacctttctcaccatcaataattaaaccgacaggatatcccacagctactgaattaaagcaattcaaacgactggaacgtcggatctgcatagcagactggaacttacctaaagctgaaccgttattaggattgaagctaccaccggtaatatagctctcattattaacaaagttggcatcacgccccaacggtccgataaaagtgacattactaaatacggctgtcgtatagggttctatcaatgaggcgtctccacaattatccgactcaaaaccattagactgagaagtatctgcgattctcgggtcacggattgaaagacaatactggactttaccggagaagccattatctgtatcaaattcatcgtcccatccattataagccactagatatttacaatttacattacctccaaaccattcgtaagagtcgtcattggaatatgatacctgtaaatgatcaatggtagtcccactacctacagatccaaaagttataccattaatttccttatctttttgaaaaggataaccagcaaattccacacgtacatatcttaatatacctgaattgtcagcatcatcatttcctccatgtttagtacgcggacctccttcaatctgctgattcaacactccctgattgttcttggcattaccacaaataatcaatcccccccaatctcccggtttacgctggcctttaggctgttcagaggtaaagacaatcggagcatctttagtaccctcggctattagtttgccacccggttctacaatcaaggcagcctgtgtatctttatcccctttgataacagttcccggttcgatggtcaataccgacccagtccccacataaatccatcctttcatcaggtaagttcctttagacaaagtctgtgtacctttaaaaataaattcctgatctccatttcctatcacggtacctttggcattctcagttttatcatcattaaataacaagtggtcacatgttttaatagctccctcagtcccccatacataaggagcttcagcatttccaccgttgccattaccgtttcctgtatcagtttccggatcatcactgctacaagcaaccattccccccagcattattgctgagaatacgtaaatcataaacttgttagttctcatttccatttgtttattggttaataatgaaagattcattctattttaaaacgtatagttaatgttcaaattgaaattacgccctgatttgtattgacgggtaatttgctccacttttccatgcctagtttcttcaaattgcttaaaagaaactttctccgccaacaaatcgcgtacagcaacctttatttccagattaccgatttttttcgagacacttaaatctactgcattacggggcatttcataagaatcgggtactcttacttcattgcctgcagttcccaaactacggcctacaccaataatacgcttaccgatacggttataaagcaatgcagcattccatccgctatcggcatgttgatagaaaaaaccggcattaatcaaatatggagattgaccttgcatcggacggtcctcctctttggctcccggctcaaatttcactttacttttaattaaggccccgttcagactaagactaaaattacgcatacctataaaatccagatttttgcggatatccacctctaccccataattatccgctcctttggcattgacatacgaatagataaggtctgtgcctccggatacagtataagtccattcaataggatttttaaaccttttatagaaaagagaaacagaaatcagctctccactgctgggataaagttcataaccaaaatctaaattatcaatataagcaggctttaaattataattaccttgtacattactggcaagatcaaaatcataatatacagaagaagaaacctcccgaaattccggacgattcacagtacgtccataagataaacggaactgctgcttatcattcagacgataagccacatttacagacgggaaaaagtcattatacgtgtaaaacacgctagtggggctttcctcgtttttctgtgtatggctaaccagctccattctattatgttcaaaacgaactcctgcgtatacattcaatttgcccaatggaagattggtccctacataaccggcactcaagagattattgccttcgtaattattgcgccaatccacttgttccaataaataaagtccattctccccataattcttctcttgtaataattcattagggacattcattactttataagcactcggcaaaccatttttccaactataaataaaaaaacgagtattatattcacgagcacgatactccgtgtaagctccagccttcaggctaggagtaaaaatcccgaaagaaaaatcgtgctgataattgatgttagccgacaaaatatgttcatccaatcgggaaaactcccgattaatctcattcaagttctctacttccaactgattggtctcttcattgagtacggtagtatatcgacggcggtctggcatattccgattggcataagaatatccagtactccaatccaacttatcggcatcacccaatgtatgtttccccgtaaattgaccattataagtggtacgactctgataataatattccgcgctctcttcataatcactttgtgcatctgtccccttacgataagtatagcggtctttccctaattgattaaaaatattcttaaactcatagcggctgttaccactggcaggtacataagtaaaattcagcatagttcctatacgaacattatgattatattggtcatctatacttttacgtaaataattagaacagtcgtgggtcgtatcataagcaccaaacaaattgttatccatatccagatatgtcttatagctattactatagttcactgttcctaacatagccaaagtacgtccgctactatccacccagcgacggctgaaattcatattcatgctaagatctgccaagggcctacgatctttaacggtccagtcattgttcaacccattatttaataaatcatagccgttatttatcggattaagcacagcattgattccacctttcaagctacgaaagccattatcgaaacctagaaaatctgtgccacttcctttattatacagaaactttttaaaatgagtctgatcatttaaactagttccaaccgaaatagtaaacagattactgctaggaacatctttggtattcactaaaataaaaccaccactgaaatcagctggatattccggtgcaggtgatttcactaccaacatattatccaactgcgacgatggaataatatcgaaagagaaagcacgcgcatcggcttctgaactaggcacggcactattattaatccacacattattataccgttgtgaaagcccacgtaccataacgaatttctcctcaattatactgatacccgacacacggcgaatcacttccgaagcatctttatcttgcgtcttggtaatctgctgggcagaaactcccgtttgcataaccaagctggtacgttgttgggtaattatagcattctccgtattctttttagcatccgctacaaccacaacttctcctaattgttgattatcctgttctagttctacttttatttcgaacataccatttattgtaacctcaacaatctgtgtacaataagacacataagatataataagcttgtacgttccatttcttaatcccgcaagttcaaaattaccatccacatcagtaatagttcctatatttgtaccacttaactgtacggcagcaccaataagtggctctttagtcgctttatctgttatagttcctcgcaaaacggccgcctgtacggtcaatgccagcatcaaaagaattatcataaggctaatgcctttcatctgaattttcatcatacttttaccttgttatttttccgatggcaaagatcagataaaagcattacatgtataatacatctgcatgatgctccttttgcatatttatttcaatgacatttcattgcattttgttgaaaaagctcctacctttacaaataaattgtaaaatagagaaagaatatgagaagttttgcatctgacaataattcaagtgtacatccccgtatcatggaagcattaatgaaggccaataacggacatgcacttggctatggagatgacccgtggacagaagaagccgcccacaaagtgaaagaacaattttcacgtccatgtgaagcactgtttgtttttaatggcacaggcagtaatactatggcgttgcaaatgatgacccgtccttaccatattatcttctgtgccgacacagctcacattgctgtagatgaatgtggtgcccccagtaaagcgactggctgtttcatgcgcacaattcctactctggatggcaaactgactccggaattactaaaaccatttatggttaactttggtatagaacaccattctcagcccggagcaatttacctaagccaatgtagtgagttgggaacaatttacaaaccagaagaaatatgcgcattgacagaatttgcacaccggcatggactgtttgtgcatatggacggcgcccgtatctctaatgccgcggcagcattgggaatgagtcttgatgatatatcaggagcttgcggagtcgacacattgactttgggaggaacaaagaacggactgatgggagccgaatgtgtcatgattttcaatcaagatttgataaaggaagcgcgttatgccagaaaacaagcctgccaattggccagcaaaatgcgttatatctcttgccagttcacagccttccttgaagataacctatggctaacatgcgcacaacatgccaacgcaatggcgcaacgcttgtacaaggaactttccacaatgcctgatataaagtttacccaaacggtggaaagcaaccaattattcttcatcatgccacgtgaaaaagaaaataagctacaaaaatattatcatttctacttttggaacgaagccataggagaaatgagacttgttacctctttcgatacagaagaagaagatgtagacaaactgatagcttgcataaaggcgctataatcatcttccgtttctctgttaggc

SEQ ID NO: 14449 - DNA, 51124 bp, Unknown
  gut microbiota DNA sequence
ctcttaaaatagatccatataccgagatcaggaaacaaacttattcttagcttcagtatgtatgatggagataagtatattcataatctttaggatgcgggatgtttgtttaatcgtttgcggaaacagaatatgtttcgagaggaggtgtaccttttgattcttctccttttttacgtatttcgttaggagtggctccaatattccttttacagtaggtcgtaaaatgggaaaatgtcttgaaatgatagtccaacattatttgtttgatgggtagggtactttcttttaacttgaattcaatttcataagatgtttgcttttgtaaccattgatatggtgtatctccatgaaagttttttttgaataactgtgtgaaaataaggtcgttatatccgcatagaatagctaattctttggcagttctgcaagctttgtaatgtgtcatgacggatacgaaaaactgaagatcattcgaaagggcataacggaaaatggaggcaatttcgtttttgctatagcaaattttaaataatgagaacagctcatattctttggctcgatgtaagtcgggaatttctgttccatttttcatgtaatcgaccagcaaatccaagtaggaacgtattaacggataaatgggaagaacttctaccggttttacttcttcgatggatatgtcttgtagatattctattattctgctatgtagataaggggccacaatattacatgcatggatgacgagttgtacatcatccattgttttgattttacatttatgtaagctgctgataaagaaaaattcattttgcactgctatcagaggcattgattccatttgatctctgaagagacataaagatccttttagtacaaaacaaacttggaattcatggttttcattcagattttggataatttctcccttgcctatatgaagatatctgaattggctgaatctggatagtgcaagaggatcacggtataaattcaaaatgagtatttacaactaattattcctcaatattttataagcaataagtcaggaatatggtcgttgtctttaattgtacattctaaaggatgaagatttaacatttttattatttcttagcttatttgacttattatcacctgttcgtacagtcagagtacttcttccgaaagttgttcgggctcctcgtccgtcaccttatgttggttgacgccgggaaagtagtgacgcgcgtaaatcatctgttgccggatgttgctggtcgtcacgtaccgcccaacattctattaatttatgagcgtgctctagcgggtgataataagtcggtgagttgtcccatcaagccgaagaggaaccggaaattattatttaccagttcgtggtcaccttcgatgaagcagtccttgataagcgttctcatagccgatacctcgtctttcttggatacgggcatgaacttggagaactgcgaaaaagttggttctgccatgagggctacatacatctcctttttaccgcaaaaggttttccgaactccaccatcaaataaaccttgcgcaacttctttttcttccataaacgtattttttattttccgatagatataggacggaaaaaaagaaagaatgtggaaaaacggaaaggaaagtgcggaaaccccgtgatgttttccaccatgtgtatatgggaaaggggtacgttatatttctttaacaatatgaaatagtgaattttgccttattttgtgtccttttatgtagacacacagaataataagcctatttgtatgaataaatttacaatagacatagacgaaacatttaaataccattatcgttcgttatgcttgtacgtgctgcactatgtccatgatacggatattgcagaagacatcgtacaagatagtttttctgccttgtgggagaaattaagtatcagtggagccgagatagaaaatgtcaaagcctacctttatacgactgcccgcaaccgcagcctggactatctgaagaaggaggagatttatgatccgaatctttccccttctgattttgaagatacgttgagcgatgaggaagcggaggaacgttcggtcagggaagcgcggatgtggactgccattgatgccttgcccgaacgctgccgggagatattcctgctgaacaaacgcgacggcatgaaatacagggagatagccgccaagttccagatttccgtaaatacggtggataaccacatcagcaaggcgctccgactgatacgggaagggacacagaaagtttacgcattcttatttaactaatattcacaaattccgcatagtgaatttgtctgtaatcccagtcattaatacgaaaaccaaaataaaagagtatgagaaccacggatgaaaaatgccttcattttgtcttgcgccactatcagaagaacaagttggatacgcaaaaagcattgaaggctttcaaagagaaataccagataacggaacaggaacggacatccttccgcttgtggtggatacttcccggtatggcggcagccattctggtcgcagtccttatttatccccgcttccgggaaaacggagcatggaaggaggtaacggcttactcgcaccccgtggattatatgcttccggacagttcctccataaccctgttcccgcattcttccgtccgtttccacgcaaaagattaccggaaatccagccgcaaagttcacatggaaggaaaagtcgcgttttctgtcaagcatgacaatgcccacccgtttacggtagaagggaaactgtcccaagtcagggtattgggtactgtctttaccgtcgatgagagccgtgcagacacagctatcgtgcaagtcacatcgggaaaggtgcagttctcagcaatcgggcaaccggacgttgtgatactgaccggaggcatggcagcgcaagtgacggaagaacaaccggacgtacaggtaatcaaagaacggaaagcgggcagctttattttcgacaacgccccacttccaaaggtacttgaggaattgtcccgatattataaagtcaaactatccgcaagcaatgagaataaacgcctgacggccagcttcaagaacaaaagccttgatgaaataatcaggtttatagagaaagtgttgaatgtaaagatagaaaaagtaaaacaatgaagttaacaatcattgcgattatattgtgtgtctctctgggtgctaaagcccaacaggattcaaccgaaatgaaaaaagccatagatgccatgcaaaaaatgtattctgttcatttcgtatacgattcttccttggcaaatataaagcccaaaggtatcttccagcggagcagttccttgcctgagaacctaaaaaggattttcagcggaaccggcatccgatgggagattcagggagaatatgtcctgctgttccgccagaacaactatactttttccggccacatatgcgaggataacggagaaacgctgatcaacgtgaccattttcgatttgaatacccaaacgggaacactgagtaacgaacagggatttttcagcattacgctgccggaggggaaacacaaacttcgtttctcttatataggttatcaggatgtggtgaaggaggtggatttgacatccaattacaacggtgtcatctacctgaaagaaagcaatacttcgctgaaagaagtagtagtggttgcagacttgaacgcttccctccgcacgacacagaccggcaaagtgtcgctgacctcggaacagttgaatacggagttttcgctgcttagttcaccggacttggtaaagaccctccagaatattcccggtgtggcttccggaacggagctgctttccggcatgtatgtacacggaggcaagaacgatgagaacctttttctgctggacggaacaccgctttaccagatcaaccatttgggcgggctgttctccgctttcaatacggatattatcaaaaacgtggatttctataaaagcggtttcccggcacgttacggcggcagactttcttccgtagtggatgtacgcaccaaagaggggaacatgaaggagtttcacgggactttctccttggggctgctcgatggcagagtccagtttgaaggcccgatcataaaagacaagacctcgttcaacatagccatgcgaagaagttgggcagatcttttcacagctccggcattcttcctgctcaaccgttccaatcccgatgacaaaaagaacgtgcgctatgcctttcacgacatcaacgggaaaatcacccaccgtttttcggacaataataaactgtcccttagcgtgtattccggaaatgacctgctgaagacaaaagcccggcagacgttcgaagacggggaacattacgactccgatttcaaggctcaatggggcaacctgactacggctttgacgtggaactgtcaaatcgtcccgaagttgtccggcagtttcaccggtgtctattcacgcaatatctccatgtatgattatgtggaaggcagccgtttcttttccgacggggaacaaacttccatgacgggaatggaacggtccaaccgttccacaatcgacgacatgggataccgcatggagttcgactaccgtcccggcacgaatcatcatatacgctttggcagcaattatctgcatcacatatatcatccgcaaagcacggcttccagaaaccagacggacagggataccttatcgacagaaaacgcaagcagctataagggtaacgaggtcgctttttatgtggaagatgaaatgcggctgtcctccaggacgaaattaaacgcgggactgcattacaccctttatcagacagacggaaagatgtaccattccttggagccaagactggccatgagttaccaatgctcggaaaaagccacgatgaaagtgtcctatacggaaatgagccaatttgcgcaccaactgtcaaacacctatctgaacctgccgacagacagttgggttccttccacacgcaaagttcgtcccatgcgttcaaggcaagtggcagccgggatatatacggagttgccttggcatatcagtttgaacgtggaaggatattaccgtaccacaagccaactgctggaatacgacgggggcaacagcctgatgcttcctgccgagaactgggacaatctggtcaagaccggcaagggaaagtcttacggcgtagaattgtcattggcatacaaagaccgttacaatgtcatcgaagcaggatatacgctttcatggagcttgcaaaagtttactgatttttatcccggctggtattccagcaagttcgacaaccggcataaactgaacatcgcctaccggcataagttcaatgaccgtatagatgcctacgccgcatgggtttaccgtagcggcgaccgtgccaccgtcccgaaccagtatgtaaacgggccctcttttccgggcataccggattcaggcgaaccggaactggtttacgagaaaccgaacaacatcacgctcccggcatatcatcggctcgatttgggtgtcaatttccggcgtactaccaaaaggggattcgagcgtatctggaacgtcagcatttataacgcctattgccgtatgaatgcgttttatacccggatagagcgtctgcccgacggcggtttcaggggtaagggatttggcattttcccgattataccctcgtttagttataccctcaaattttaagtgcatgaaacatttatatcatatattactgcccgtgtatatcggcttactttcgtcctgtacctatcattttgaactggacgatgtgggcgcttctcccaaactggtgctatacagctatccgggaagcggcgacacaacggtagtccacctttcacgcagccttcccgtcagtcagaaaggcgagctcgtccggggactgaagggagcggacgtccacctgtccgtaaacggtgaagcggtaccccttgcatggacggacgattccataccgggagtccccgcccaaagctattacgcggtaaaggcgtatgaagatggcgacaaggtcaacataaccgcagcggcagaaagaatgaaagcggtttcatccgctacggttgtcccgtcccgattccctttgacatcaatcaaattggctatcaaagacggtgaaccgaacctgcttcagtttcggataggctttacagacaatgcgcagacaaaagactattatgcgttgaaggtggagcgtaaacaactgttctggaacgatggcaagtattcggaagaaagcagtaccctcgcgttgaacttggacgacgaacctctgctgaatacatcttccgggttagacgatatcctgatgattgaaaacgggttctaccggaatttgtattactgggacgatacgaaaattaaagggaaaagctacacggttcgtctgaataccaattacgaggcagactatgaagacgacttcataacccctgacggaaccgaacatatcaaacgccaagtgaaatacagaatcagcctgtacagcctttcggaagagttttacaggtatctgaaatcactgaacgaccagaaaaacaacgggcttggaaactctgaactggctcccatacgctctacttacaccaatgtcataaacgggataggtgtcgtgggaggatgcaggatgttccagacgaaatggatagacaatttacaggaaaactaaataataataaaaaaaatgaaaaagacaattttatcaatgcttttcttgctggcaggaataggatgctttgcacaaaaatccggcattatcatcggtgtgacggacggacatttgggaaaatattcgggatatgcttacatgagtacgggaacggcgaacaactcttcctaccccgaaacccgatggacacccggagtaggctttaatttgggctaccagtttggcttcgatctttccaaccgtttctggattgatgcttccatattgggaaaagccgttcagggaaaagcagagtccttcgatttgaatggaaacaacgttgttccctggtctgacaaggcatggatatggggacttgctttgaacggctcaatcaattaccgcatctgttccggactgtatgccggtattggcattgaacccaccggttatttcaaaaccgataaattgaaggaaaacttggaagggcgggttttcgactttccgatagtcctcaccttaggctatgagtttaagaacggcatgaaattgtccgcttcctacaagcatggtttcaagccattgtatgacaatgcttttgcctccaatacaaagaataacaaagagttcggcatatcattatatgtgcccatgtttaaataataaccaattattaaattttttcaattatgagaaaaacgctttttagtcttgctttggcaatggctgtcttatcatcatgtagttctgatgacatagtgaacaatccgatgaatgaggagaaccattctttcccggcctccagaagtttgcatgaaaatattctttccttttccagtgaggaggaatacaatgccttgctcgattccttgggcacgttgtccgatgaggaacttctgcaatgggaatccggacagaaaggcttcacctccatgtacaggatgcacagcgaagccttgggacagatattaaacgccacatgcaaggaagaatatgaatccattaagactgcttaccagactgattttatattcaacgacaaggacagcaccgatttgtcgatatatatgccggtgttgaatgtaagcaaggcaatcacattgacccccgaagggttcgtatgtatcgccggtgagagaaagaacatgaaggagtttgaaaattatgacggatataaaaaagaactttctttactttatcctgtcccgctgggtgtaacgatcgaaaatggtataaacagggtttacgtgaaaacgaagaaaagaaagttcaccgcacagattggtatgcgaggaaaccaacaggctatccgtgtaaatgcgtctaaaaaagttttatggggctgggtggaatatacgactgcgtactattggaaatacacgcctaacggccctgtacaatttggtaaagaagtgaaaagcggtcatgacattatgatcgtgggcaatcctttcccaaatggagcgaaattgtatatgtggactcgcggtaccggtgaagaaaactgcggaataatgactgtgcaattgtaatccttattgaaccggattattcaccaatcattcgggacgaatctctgatatagccaaatgttcgtcccgaatattaaaattatcattttatgagcaggaaagtatttacttgttttatagtgattttcttttttctaaataaagccgcttcttacggtcaggaatttcaagtgtcgcgtgacaccgtcaaggtttccgttcaggaaggaaatacttcgcctcataacgaaagaagcattaccccaaagcctttggatatacggaaagcggttgatctttcttccggcagttgcccgtcccagataacatttgacgtgcagaacccatataatccgacattccctaccgacaaatcacctttgcatgagggggaatattcgacctccggtatcattaaaagctatccttccggctatttttacggcataggcaggcaggaaaacttcatcggcttgggaacaatgaactatgcaggtatcggatatgtatattctcccggttgctggtcatttaacttgcaggcatataccgtaaaatggagtgtccccagacgcgagagtcagctattgggattgtccgggctgttgacatatcccgtcaacgagaaaattcgtctaaacacatttgcctcatactccttcattctttcttctcctttcagttcctcgaattacgggggattcgtttcctatgacatcattcccaactgggggatggatttcggcgtcagaagccataccgattttccgttgcataaaacgaaaacgcttccgatagtagctccgtattttcagtataaaggcaacaaattgggtattgatatcggtggcggattatttaatttgctattcaaataacctgcactgatttctatcgttactcctgaagcgaggattataagataaaggtattatcttttcatcgaaaaacctcttttctgctgctggtcataattcccttccaccacattgtcaacttcccgtctggctttgatttgctcccggttgtcaaattcacccttttgcctggcagtgaagtacaggaaatcccctgccgcctgatgtgattgtctgtcatccccgaacaggttaagggcgttcttgatgtcatatacctgttccgtgtcaaaacgggacttgtaataatcacgggcaaaacggatgatactgtgtaccgccttgcggaagatgtcgcttgtttttagcagcaggaaactgaggcagccgataatatggctttgccatgcaatccggttcttgagtctcgtagtttcctgtacatgttccgtttccttgcggttcagttcggaccggtgtttggcctccagttgcatcagctcacggctgtggtcgttctgtatggtctggattttatcctgcaaccgttcgatggtttcctcgtgcgtggaaatctcacagcgcaaatcctctatttcatttttcagggctttcgatttcccggtagcccagccgacagcggcgttcagaagttcacttcctttttccttgttcagtctggagcgtttctcgctgatagccctgtcaaggtcttcactctgccgttccttttcatttgccttttcgataagggcgttggtaatgctttccgtttcatgcatctttttgttcgccatttccagctcatgttcccggtattgcctcgtggcatcaagccgcttcatttcctccttctgcttcccaatgataaagtcgttacgttcctgatgttccttgcctgtaacagcctttgactgcccacgctccatcaggagtatgtcggatgccagattctgcatttctgtcatatccttgtcattgagcttgcagctcttgcctgtgtcatggttcatccagtcaaaaacgatatgggcatggtaattcggcttgaaccatctttcgccgactttgaaactctccctgtcttccgcttccggctgaccgttcagccagtatccctcgtccttgtgcaggaagatctggagaggagtgatgccccagcgtctctggcactcctcgccaaacttgcacacatctgccagtgtcgtgtccggtctgatgagcaacacgccctcacggattggcgagcatccagccaccttggtgattttcccgttcttgccttttcgttcacgttccttctcctgcatcgcacgtcctgtcttttccttgaccatccgcttgatgtagtcatagtgcgcctgcaggtcgggattgccgaagcccgggtttatccactgctcgttaccggcagtcaattcgggtacgatgtagatttgagacttgccgatattgcgcatatattcggcagttctccggttatgagccccacttgatgtgactctgcagggcttgatatgtatgcttgattttgttgccatttttatgttgatttggttattaactaaagttgtttgccgctgttcgctcataaccgctatggggttcttagaggctgtgcccataagggagattgcaaagagagggtcactctttgctcggggttctcaggggtgaaacgccctgagtgggacggggcaacgcccagcccctcgggagagcccacaactacgaaagcggagcgtgtagttatagtgggctatatcaagggcaagcccttgtctgtccgctacagcctacggcttccgctctcctccattaaggagggttttcatcgccactgccgattggggatgtactgaccagtacaaggtcgaaatcatctatcagcttttgcaggacggggttcttctctatcatccgccggaggactttttccgcctctacaagatgattggctgtacacattattttactttctcgtatctggaagacaatccagtcggctatgtcgatatgggctgccttctgttccggtgtggcgttcttctctatgatgtcagacacgacaaccttgcaataggtcatgtccctggcatgctgtttccactccgaatatccgtccgcatcgggaaagagaagcacggttcgtccgctcagcacacggagcttttcctctctcaactggcttttgccgcctgtcgccagccatacataaccgggaaagagggcagagccgataacggcactcttttcggattccaccaagaccgctaccttgtcgggatagacattcagcaggtgttccccgaacaggcattgggaaagttgccaatcctccggcagtacccgttgccttttcagtatgctgtgtatccagtccactgccgacacctctcctcccttgatacggtgtccgtcctctggattgtactgcatcaccttgcccgtgcgtaccctgtttgtgcggtctatctgccagaagatgacagccccgtcacgggttgctccaagacggtactcttccagcaaccgcttcaacacttcctttgccttgctgccgtaataggaatcaaggagcgaggaaatgaagcggaagaagttgctgtgcacgctttgcgacctctccacatactttggcggtatgtagcctatgcttgcttttggtgatgtctgtccgggcttccgttctgacctttgtctgtcaaaagagaaccccttgtcggtatggcattcggggtggtcgtggaaatactccttgggagtataatgatacccgcaactgctctcatgattgcacctgccgacagacggatgcaggagcataccgctttcatccacataacatgtgaaagaacgcttgtccccgcaattcgggcaagtatgccgtgttgccgttcctttatatttctgtaacgaatagttgctcatggcttgtctttgtttttgagtttttcgattgttgtcccgctgtcccattgtcccgtccctataagacttgggacagtgggacaccccgggacaccttgggacatcaggcttctgcctgtatcatcccttgtaccgtaaatgaagcggttatcctttatacagctatgtgcagactgctttttcatgccttattctcctctttcccatatcctgtaaacaactctgcctgctttgtttctcttactgtcccgcttgtcccatgctgtcccacctgtcccattgtcccacttcctgtctgttgggacagcgggacacttgggacggctgcattcctgtcctccttgctgcgctggattatccggctgacggtggacttgccgcagttcacctgtgaggctatctccctgacggacttgccggactgggacaattgcaggatttggcaatccctctggctggattcgttgtcacccagtttcttcaggtgttccttttccgttgaataacccctgaacacgaattgcaggaaagcgtccaccttctcaatctcgtagatgattacattgtccgcatcgtgggagaatgtcccgtaccggactttgagctgcttcacatagcgaagccctccgtcctgcgcactcttcccgatggcgaacacgctgtcaaagaaattgtagagccgtttgcttccggcaaggtcgttggaagtgatgggacagtccaaagagcgtttgggtgtatgtgccagaacaaggacggacaatccgtatctctttttgaggttgttgagctgtatcatcagccgtcctgccgcatcgcctttctccatggcgcagcacaggtaggtaagattgtcaacgatgaagattttgcacccggtttgcagagccatctgttctatgcctcccatgatggcttcctcgaaatcggcttccagcaacgaattgcagtcaagcgatacccggtacagcctttcaggaaagatgtatggcgttccatgctcgctggtatagcgtagctggaactgtttttcggagagttcaaagtccagatacagcacatcgtcagtccgggcgatacggtcggctatctgcacggcaaggatggacttgcccacattggaatccgcaaagaggcaggacagttccccctcataccagaaactgtcccagagcgcacggggcgtgggcagcagcgatgcttcgagtatcgtccggttggcggtcttgatactcatcacgccgatgctgtccggcatcccgtgctgtacttgggtcgccctcgtcaggtcgccatgtatcagactgatataattcttgtcctcttccatgacgtttaccaattacgcggagcgggcttgcggcggtgggaagaatataaggattcgctcagttcctcatcggacaggggtacgggattcttccgggaggattccagccatttgtccagttcgtccctgtaaaggcaatatcgtttgccgggcttggtggcgggaatgcttccctccgacagcttcatgtagagcgtgcctttgggaatgcccagatattccgccgcctcttccactgacatggggacatgggtgtccaccgcccttgcgttgttcacactgcgctgctcagtaagcaggcttctaaggctcatcacctcgtcccgaagctgagccacaatctccgggaggtcgttgaatgtaatcactgttttttccatttgcgtactcgcctcttttgtaaggcttggcgcaaaggactggaatgatacagccgtgaatatctccacgaaaggtcattgcaaaataattcccgaataacgatgcccaaccgcaaatgacgggtaaagttattcgggaattattgtataacagaggattatgagttttggctgtttgtcgttattatcgtgattactctaaaacaggcttaaatccgcttctcctgcacataatccgcaggataatggaaatccagtctgccgttttcaggctcgtcaatgggaatcagtgtctttaacggctctaccttgaagttcttgatggtagctatgtccgtatcggcaaactcccgtgggaaaagggtgctgatgaagcgggcacggttatcccccgtgtagtatttcttgtacatgaaacgctcggagatattccacacgaaatggcggagcggaatgtttgaaatatctttggtcagccgcccttttatcggcttgggcttgtaactgtggagccgcatccagttgttgacctcggcacagatgtggttcacggtctccttgtcagcaatacggggcatgatgaaatggatgtattccatgaccatagcgatgcgctcctcattttcccgctgctccctgtcctcgtaatcggcacggttcttctcgtgaagctccggggatatggcaatctctgtcggttttatatccggggtcgcttctccacctgttggcattgatgccgatattacaggcttgtgtgcatcttgggactggtcttcctgaatttctgtgatttcggcaggtgtctttttcctgccgaacttgattctgtagatttcgtatgtatcgaaaatgactgtctggaaggagaagtagagcagccaccccaacaggttgctgcacacaaagactatcagccttacaaaggtgtcttggttgaatttctcagcgacaatcagtgtcgctatggaagatattaggaggatggcaaagccgacaaatcctaaaatgatatgtttgtcttttacggacggttccatattctttgtcttattcggttgttacttgttactgttttcgcaaatttaatagtcttctttcaattattactcattatcctttgtcagtggtttctttttcaatgtttttcaccaaatgtccggaatcatactcaattatcatactttaagtaccaaccaaaataaaaggaacggttaaagctccaaacaataaccgctccctctgaatatcatggattttgaaccgccttacgcttccttgcgtttcagggttatcttgtccacgacctcgcacatctgctgtgccgccatcttggaataaatctgcgtggtggtaatgttcttgtgtcccagataggcttggatgacagccatgtccgtacccatttccacgtgcaggcttccgaatgaatgccgggtgcagtgaaaggttatcttcttggttatgcctgccgccaagagccagcgtttgagtggtccttgcagcatcttgtccttgaaaccgtcaaagataagtccctcgtgccgttccccaagcagtccgtaggcttcatcgctgatggggttgtgtacaatctgtttggtcttctgcatacgggtggtcacgaacatcttgccgttggtgtacggctgtatctgctgccaagtgagctgcctgatgtcgctctttcttagtccggtcagacaaccgaaaaggaacgcccttttcaatacctcttcctcacaaggcgtttcggcaagccgtatcagttcctcttggctcagatgttccctcatggtgggaatgcactcgatgcggtctaagaatccgtttgggttctcctttatcttcctgtcccggtaggcggtgtgaagtaccgcacggaaagccgaccagtagcccgccgcagaattgatatgcagcttttggctggtgtgtatggattgtggggcgttaagcagatattccatgaacttgcggcacaaatccacgtccacctcctcaaaggtgcatttgccgttcacgaaccgctcgaaatgtttatagacgtgctgccacttgatattcttcctgtctgccaaccccttgaagtaggcgaggaaatcgcctttcatcttggctttgtcaaagaagccgttgttctcgttgaagatggcttcataacgcctattacgcagtatctccgcttttttcatcatgcgtgcgttgaaatcacgctcctgctggttggcaggtttggcgaagatgtaaatcccaagagcttcacgtgtaatcaccttcatggtggtgttgtcacggtagccgggataatagtccagacacagcgaatactgtgttccgttcttaatcttgcgcttgcgcaaggtaactgtcttgcatttgctcatattgatgatgttttaagttgtacattttcgggggtgttcccgtgtttacggtggcaaaggaacaacgtgaaacaaccgtgaatacctccacgacaatcattttgaaataattttccggcaatgtcggttgctcacggttgtttctccctttcagccatgacacgctccacatcggagcgtaaaagcaggtttttcacgcctacttttatcttttcgatgtgcttcaccttgacgatatggctgatgttggcggaggaaagcccgtaaatctgccggacttgctccacggtgtagtagcgttcatcgttcacgaggtctgtcctgcggagttcgtccagatgggatttggagtaataggtgcgcccgtattctcttttggtcggtatcttgtggcggtaggcgtatgcccggagtgcggagggtttcatgccgaacagttcttccgcttcttcaatcaggagccaatcggtgatattgcttgtatctatagccataccgaagaactcgtcaacgtgtttcttgctgtaatagtttttccctgcgatgcggcagatgggaatgcggttgcgcttggctgtggtatagagccacgactgcctgaccttgaagagcgacatcacctcctcgccagaatagaagtccagcacttcataggtttccttttcccttttttcttttttggcaagcggggaagatgaagcggactttctcggagtggaagtactgccgggcaggacacggtggtagggattgccctccagcatccgctcgatgtctgtcttgcggataaacgccatgcggttgctgatacgtgaggctttcagtttgccgagggctacgagtttatagatgtactgtcgggaacagcccatgagtactgctgctttggaaaaggtgagatactcctgatgctgtatctccatcaaggggcggacagctttgaagaggttgttcttctgttccgttctagctcgtttggcttccgcctgacaagcctcgctgcaatatttctgtaccccgctccgggttacaaatgacttgctgcaaaaattgcattttctggttgttttcatgctgcttttatcgtttactggttcattccttcaatcgtatatctctgaaatggtgaacggatgtaaacggaggtcaaccgttgtcgcctttctgcacaatgttactattgctgcatatcagggcggttgttgtcgctcatcgtaaacggttgtaaacccttgtcaactgtccgcacgatgtggcaaaaaacaagctccgcaaattctccacgtcagaaatacgtctcaaaaatatgtggaaatttgggaagcatcaaaaagcagccgaaaagtgttaatttttagaatattctgatagataaagacttacgcttgaatatttctggttatttttggttgttttgagattctaaatactttagtaaaaatagcatttccatatattatgaacattttaagataaaaaaagttttgatatatctatcccaggcaaatataacttgatatttaaaatgttttaaagctatagaaggaatatgcaactaaatcattgctaatatgaaattgaatcttctgtttaagaaagagtttatcaacatatgaaattataaggtatttaaggccggatgctttggatagtagcttataaagtggaagatgtttactgattttttatgagtgaatgtaaataagtgatttggaatggagaaaaatttaaggatcttttccttattgtttacaagataacaataaggaaaagatccttaaatttaaattattgctggtattggccattcactataacatttttcatacgaatattgtgaaaagcatctttattccattgggaaaatttagtttcgatctttacatctttaaatgaaaaattggataactcatactcagcttcatttttattcacatttagaaatttgtcacatttcagttctatgttgtgcatcgtgatatggcttccgtaggatttaggaatcgttgttcttcctttcaagtcataaaattgtttccatgacgaaactcctagtaaagccttgcagaaaccttttacattttctactgtgatgtattcatagtgttgcggagtatcaggccgcattttcaatagaagtagttcattaccgccttctgctctgcaattgcgcattaatacattatagacatggatggactcgctgccacaagtcatgcaactgccagtagtatgatcaaagaaacaatcttctattagaatgtttttattgggaccgttataagtatcctgatcggcataaggtccttttccacctttaaagcagatggcgtcatcatttacagtaaaccggcatcctttaatatgaaaattggtacatacatccatatctataccgtccgcactagctgattttataggtttgataggagagaaaattcgtagattgagtaatttcactttatcgcagcgataataatggctggtccaaaaaggagagttctgtaaagtcacatcagcaacctgcacattacggcaatgagctatgtaaagtaggcgtggtcgcatttcatccttgtttgtacattgaggattccattcgcgacgtaggcggaaagctttccagtagggagtgccgtttccgtcaattgtacctttgccgctaattgtaaaggtatctaacccgtcggcattgattaatgcaccgaagtatttgcagtattcaccttcaatgcgagtcatgaggagagggaaatccataatgttctcactacctagtaaggtggcgccttttgacaaataaagatgagtcccttgtttgaaaaagagggaaccgcttttataaattccttcagggatgtaaatgaccccaccgccattggctgccgcttcgtctatgatcttttgtattttttgtgtttgaacgatatggggattgctttcaattccataatcggaaaggtcgtatttttttcctaaggagtcaggatggaccactttagtttggagaaaccattcggagataggagtaccatcaggaaacacattttgttttctttgttctttttttgccattgagggtactattatgctcaagcataacaggagtgatagtaattgtttcataaataagtttttcatttggttcatattatgtggatgacaaagaaaaacaataacagtcaattgtatctgtatttattgttttattcaatggaaaattgtacggcttgattcttttcattaaggcggatggttgtgatatagagagattccttagtctggaaagaacaattcaggagcctttttttatctgcacagtcgtttctccaaacttataaaagcttgaataaatcgcgctttttgccctgtttatactattttccatctatgtagattcttttccatattttcagaggtttgtggctgttccggctattttttattcatggcattatatctagttttgccatgttccttgatgaagaaatgaagggattagattttatgtataactttaattaattacaaatgaaagactcggagaacaaactatcgggaagtatgcattcttttaaaaggatgctttcctttggtattcttatggtaattgcgatgaccctgtttgctcaggttaagaatgtatcgggcgtggtgcttgataaaaaaggggagagcataattggtgccagtgtattggtgaaaggtactactaatggtacgattaccgattttgacggtaattttgttttgaggaatgtggccgacaatgccattttgcagattagttttgtcggatatcaaacttcagatgtatcagttaagggacagaacaatattaaggtggtattgtcagaagatactgaaacattggatgaggtggtagtcataggatatggctcggttaagaaaagcactttgacgggtgcggttgccaaaatggattctaaggcaatagaggatcgtcctttggctcgtgcagagaatgctttgcaaggtcaattggctggagtgacagtacgtaatacaacaggtgagccgggagccgatatgcagatccgtgtccgcggtgcggcttctgtcaatgcaaattccgatccactttatgtggttgatggggtgcctatgaatacgttgagcggattgaatccttcggatatcgcttccatagaagttttgaaagatgctgcttctgctgcgatttatggttcacgtggttccaatggagttgttttggttagtactaaacaaggtaagagtggaaaagcgaaggtggcgttcaatgctagtttcggtgtacagacattagagaaaaaaatggatgtgcttaatgcgacggaatggatggaatttaaattgagatggaatgatgcaaactatttgcaggaagcgaagaaattgggtttgactagtgccagtataaaggatgataatgccacacgtttgtctaatctcggaattcaggcaggtacggcaaactcttatctggttgtttttgatgaacgttggtttaactatttgggagatgacatgaggaatgcgcatacttatactcccaatccggaacaacttagcctgttggattggcaggatgagttttttcgtaactctatcgtacaggattatagtttgaatgtttcgggagggacggaaaacacatcttatttattctcaggtggatatatgaatcaggctggtatcgttaccggtacgggatatgaaagattctcttttcgtgccaatattgaatcaaagataaacaaatatcttacaataggtatgaatatggctcctacgtatattgtgcaggatggttccggacaggcaaatggtaaggattcccaggtacatcaggctttgtatgctacaccggtatcggaaccgggggtaggatatatgacaaatgttgatccgaatccctattatctttgggcgggaagcacatcgagtccggtttataatatggagaagaatatcaaacagaatagaatgatgcgtttggttgggaatgctttcgtacgtatcactccgtttaaagatttcagggtagaactttctgcttcggctaattattatgatttggatggaaatgattataagtacactagtacaaccggtagttgggcgcagggagaaggacaaaactcttcgggggggcataatacggaaagaaaatggagtactcttttgcaggctcttgcaaattatgaccatgtttttggcaatcatggaattagtgtaatggcgggtttttcttccgaacagagtaatcttggtttcagtacggcccaatcttttaacaaaccatttcccaatgatgccataacaggttcctttgatggttcgaaagttacagcaggaactaatacggtaacagagaaaacagcgaataaattgttgtctgtgtttggacgtttgcaatataattatgcagaacgttatatgttgtccggtagtttgcgttatgatggcggttccgtattcggagctaacaataagtggggcatctttccggctgtttccggaggttggttagtgtcaaatgagaaattctttaaaaattggagaatgtcttggtggaatacattgaagctgagggctagctatggtgtgaccggtaataattctatcagtaacacggctgcttatcctactttgtctgcaggaaattatgcaggtgctcccggttataaggcaaattctttaggtaatgctgatttaggttgggaaaaaacacatagtactgatgttgcgcttgatttaggattcttcaataatagaattcaattgtcgctggattggtataccaagaatacgactgatttgttatatcaggtacctgtggaaggagcttccggttttactaccgtttgggataatttaggagatatccataatgaaggctttgagatcgaattgaatacgcataatctcacaggaaaattttcatggagtacgtcattcaatatgtcatataataaaaatgaggtgaaagctctagggaaagataatactccggtatattcgggatttgataagaacaatccgtctaatattctgactgtgggaaagcctgttaatacattctatatgtatgatgcaataggtgtatggaaaaatcaagctgaaattgatgcttatagtgctgcccatggaggaaagccggttacttttgaaggaaaacaaattgtaccgggtgatatccgatacaaagatgtaaataatgatggtgtgttcgataaagataatgacagggactatttaggtagtcctactcctaaattagtatttggaatgacgaatacttttacttacagaaattttgatttgtctatcttgatgacagctcagacaggaggaaagatttttggtgtattgggacgtgccattgaccgtccgggtatgggggctaaagggaatgctttaggacattggagagaggcatggtggtcggaagatgagccgggcaatggaaaagtaccttatattttaagttctactacaggtgctacgttagactcccgatggttatattcttccaattatctgcgtatcaagaatttgactttggggtataaattacctattaatcctaaatttatttcctatgcacgtgtatatgtatccattgaaaatctggctaaatgggatagttattatggagggtactctccggaggcggccaatacggcagccagttcctcacccggaggtagcagtgctttgggattggactatggtggttatccttcaccgagaatttacactttgggtatcaacgttaatttctaataaaaatatagagctatgttcaaattaaaaaatatattgcaattgagtgcattgatgttctttgttatgtcgtgcgatgattatttggaaactcctcctgctgatttaatgacctctgatggtttctatcagactcccagtcagtctgaacaaggggtggtaggtatttattccgatttgcgtgaacttgccaattcagagtatttattgatgtctgaatgtcgttcggataatgcatggacagaaccaagacctaatgggttgagagatttttcagagataagcacattcagagctaccagtgatttggcaacttttaatagtgtatggaatacatggtataaagtaatttatgatgcgaatactgctattgccaaaatagcaggatgtaactttgaatcgaatgataagattaaaaagcagtttatgggcgaagtctattttctgagaggatgggcttattttgagttatcacgcctttttggtaatgttccgattattgatgctcctttatcgcctagtgaagtgaagaaagtacctcaatcgtctgcacgggaagttttggataatatagtggttcctgatttgattaatgcgcagacgatgcttcctctaaaagaaaatatggtgagtgcgaatggaacttcgattgtattgcaggggcgtgcggacaagatggcggcagaagctatgctggcacgtgtgtatatgactttggcgggtttcccatattatgattccgatgccaagatattagctaaaaagcaattggaaattgtgttgaattactcaaaatccaatcagaataaatattgggctccgacacttgatgaatggagaaagcagtggatgccgagcacggattattataataaatactctatttttgctattcagtatcgtacgggaggaacaggcaacagcgctttgtttaatttcagtatggctctacctccttcctatacgaatagaagaatctttggaaatgaaatttatgtggaaaagagtttgatgtatgaatttgataaaatttattctgatgggaaaaaagatggaagagggaatggtttttctgttctgacaggatatgaggcagagcctaattatccggcttatacgaatacaaaagagaaattgattttggaagatggttcgcaagtggatgtttatacaaaatcaatgttttataagtttatgcctagtaaacggaagatagcggaacttgggatgtcactgactccggaagtcacaatgaaagacgataatgactggcctgtaaatcttcctattttacgcttggaagatatgatgttgatgtatgctgagttattggttgaagaaggtaaaataatggaagctgtagcttatgtgaatgatatccgtaaaagagccggttgtgatgaggtgaatacggtaagtgctgcagatgctttgaaattgataaaacgggagcgtagaatagaattaatgggagaaggagtgcgttggtttgatttggtgcgttggggggaatggcaaacggaaattcaaagtttatttgatagttatcataatccggatggtaccgataagaataatgtaaagacaggacgttatttatatcctattccattgaatcaattaaatgtgactccgggattatataaacaaaatgagggatattaagtatataagttaaacaaagttagttttgaaggtgaaaaggtaaagaggtgtgtcaaaagctatttttgataattgctttgttatgtggcacaccctctttttatcggaaaatagagaagtagattatttatgaaaaataaaaagttgcttattgccattttgtgcatatttgtatttgatttgccgggggctgctaatcgcattcggcagaattttgactttgactggcagtttagattaggagaaaatggagattttagagaggtacaattaccgcatgactggagtgtggagttggattttgatgaaaaagcaggaggagcgagtggttatttgccgggtggcataggttggtatcgcaaatcttttatgattccggcgagttacaaaaatcaaaaagttagtcttgtttttgatggtatttatcataaagctactatttttttgaatggaaaggagattgcttatcatcgttatggatatacttcgtttgaaacagatctgacccctttcctgaaatatggagagagtaatgacttgaaaatcaaggtagatcattcagaaatttctcgctggtatactggttccggcatttatcggcatgtctggttgcaagtgactaaccctattcatgtaaaaatgtggggaacttatgttacgacaccggagataactgaatcccaggcaacggtcaagattgtcactactatcgaaaactccatggagttaccgacaacagtgattgtccagcaacgcctgttggatggtgatggaaaaattgtaaaagcagaaggtaaagaggtgatggcccggactacgttgaaacttgataaagaaaaaacagctgaagtagttcagaatttgttagtcagccatcctaaattatgggatttggattttccctatcgttatacggtggaaaccattataaaaaaaggaggaaagacaattgataaatatctgactccttttggaatacgttcagtgaaatttgataaagacaagggtttttttctcaataacaaacatcttaagctgaaaggcatgtgccttcatcaggatgcaggatgtttgggaacggctgtaccggatagggcttatgaacgccgtttgcttattttaaaggaatttggcacgaatgctatccgttgctcgcataatcctccttctccggaatttcttaactattgtgattctattggctttttggttatagatgaggcttttgataaatggaaatcgggatattatgaagaattttttgattctagctggcagcaggatatcagcgatatggtaattcgtgaccgtaatcatccttctgttatcttgtggagtataggtaatgagttggctgaggcaaaattaaaagatgatacagggattgaacgtgctggtatgttgcaggattttgtacatcaactggatccgagccgtcttgttatgctcgctttgcagccgggatttgaagataaatttgcttcggtgacagatgtactagggtataattatatggaacctcggttgatttatgataaaaagaaatacccggaacgtatttgcctgatcagtgagagctatccttattatagtagcatacgtgaatttgattcacgtgattatgatgagaaaaatccatggaattatgtaatggaacatgaatatatttgtggctctttcatgtggaccggtgtggattatattggggagagttcaggttggcctagtaagggatggccttctgctccgtttgacatgtgtatgtctgaaaaacctagaggaggatattttcgggctttgtggaatgagaagccttttttgggactttatgtcatagattataatttggatgaagatccgggtaaagaccattggcaagcaccgggaatggtacacgattggacttttccttatcaggatgcgcgtgtcatgcagattcaaacgccgtctaattgtgacgaagtgatgttgatagatcctagaggaaaggtatatggacctagaaagccacgggattatataaataatacgattaaatggaatcaaccttatcgtccgggtaaggtggtggtgatagggtataaagatgggatagaagtgtgccgtgacagtatacagacttccggaaataaagctgtccgttttactctgaaagcggatcgggaacagttaaaggctgacgggcaggatttatctcatatctctttgaatttatatgatgaacaaggcatccccatacggatagatgacagacaagtgaaagtgaccgtggagggtaacggacgtttgatggggatagatagtggcgagatgcgtcgtagtgaacgttttagcagtcatactttacccacttatttgggtcgtgcccaaatagtagtacaggcagggcgtatgcggggacagctcaaagtaaaagtggaggtcgaaggaatggcatcgcaggaacttgttctgcttgttggttagtaaagacttcctaattaaaaaaggtattttaaaaatcacttttaaaataccttttttaattttgcggtattattctgatgttaaaccgaatgatatgaaaaatcgtatattttttttgttgctcttctttgtttgtctggaatggaatgcatatgcagttattgatatacaatctattcatattacatccagtgacggattggccaataatacaattagagatatttttcaagataagaaaggctttatctggattagtaccactaatggactgagccggtatgatggtcactcttttataacattgttaccggaaaaggatagtccgatttcattagcggattatcatgtcaagaagattgatgaagataaaaatggttttttatgggtgctttctacttcaaatgtattcagttgctatgatttaagacataattgttttgtggattttacaggatgtggggaacacgaccaagcttatgcttatcgtgtagaaactgctaatggtgataattggttatgggatggacaaaaaggttgcagaaagatttcatttgaaaatgaacatttttcctctgtgacatttcaatgtgaaaatggcaaactaccttctaataaagtgaatagtttgattgaagattctagagggaatgtttggatttgtactcaggaaggattggtgaaagtaacaagaaacaaaatcgaagtaatttctgatatgcataatttcagagcagcattttcttatgagaacgcatgcttttttcttgctgataatggtgatatttatgtttatgatgaggatgaaaaactacattttgttcaaagaatcggaaaggatgacgttgactttcattttactactcattttggcacgaaagatgattggtggctttttacaacaaaaggaagttacaggtttcatttatctacccggcaggtaagattagacaacccgattaatatccccaacgctcgttttgtcagagataatcagggggatttctatgtttttaatcagaccggtgtgttgcattattttcagaaggaaaccggaatatgtaaaatactgtcattgatagatgccgctcagatgatgcctgctgccgaggaacgctatgaagtaatacaggataacagaggattgatatggatatctacttttggctatggtttatttgtgtataatccccaagaagatataatcagccattacacttatcaggagactggtaaaaatctagttcattccaattttctgcatagcttattactcgatcactcgggaaatgtatgggtaggatcggagtttgccggtgttacacttttgtccgtattaagtgaaggatcttatcgtatttatccggaacatgagagtataaatgattatgtgaatgctatacgtacagtggtaaagatgcccgatggtggtttctggtttggtacgcgtcaagggaatgtttacgcttatgataaaaatttggaggctgcatcttgttataagatgccatacaattatatttatgcggcttcttgtgatggagatggtaaattatggttgggaacccgtacgatgggtttatgtattgacggacgttggtatcataaaatggcaggtgataccttgtcattggcacatgagaatatattcgatatttatcgtgatgataaaaataggatgtggataggaacttttgggggaggactgaatttggcggtttcacgaaaagacaggtatgtttttcgtaagttcctgactggatccggtcgtttgcaggaagtcaggatgatcactcaggataataaaaaaaggttatgggtaggaactaataagggattatgtgttttttatggagattccattattgctgatgctcataattataaactttataattatgaaaatggagatttgcccggatatgaaattaaatgtatttttcgtgatagtcagaatcgtatgtggataggaatgttgggaggcggattttctgtttgtaaccctagtgaggattataggaacttgaaatttgtccattattccacaactgatggtttggtcaataacatggtagagtctattatcgaagataagactggaaaaatatggattgccactcagtatggtttatctcgtttttcacctgatacggaaacttttgaaaatttcttcttttcagcttctatgcaaggaaatgtatataacgaacatggcgctgccataactgaagatggacttttgctatttggaacaaatcatggagtcatagtcattgatcctttgaaagtaacttcatctcctatgacccggaatgttattctaactaatttgaaagtgaacggaatcacagtacaggttggtgagaaggattctcctttgacacaggcgttaagttatacacagaatataaaattagattatgaccagaattcattcattatagaattttcaacattggattattctttggcatttccttcaaggtttatttataaattgagtcattttgataatgaatggagtaccccttcttctttgaattttgcttcttataaaaatctttctcccggcacttatcatctgcatgtaaaagcatgtaattctgctgggatatggagtgatgaagaaactgtgctcaatattgttatcacgcctccgttttgggaaaccacttgggcctatcttttttattttcttgtcgttgttattgtgttgtatgttgctttttgtttgatacggaatttcaataatttacggaatcgcattcaggtagaaacacagttgacagagtacaaactcatgttttttactaatatttcacatgaattccgtactccgttgacaatgattcagggagctttggaaaaaatagagagcttgaataagattcccaaagagatggtttatcccatacagttgatgaataaaagtacgaataggatgcttcgtctgattaatcaattgttggaatttcgtaaaatgcagaacaataaactttccttgatgctggaagaaacagatgtgatggtgttcttttatgatatttatcgaagtttcaaggaaacggcagatgacaaacagattgattttcattttgctccttctacgtcatcttataagatgtttgttgatcaaagtaaattggataaaatagtctataatcttctttcgaatgctttaaaatatactcctaaaggaggaaaggttgtttttgcaattatcgttaatgaggaagtggggaaattatttatatcggttagtgacaacggcgtagggattcctaaggagaagcaaggagagctgttttcccgtttcatgcaaagtggtttttcacataacagtgtgggaatcggtttacatttgacttatgaactggtaaatgtacataaaggaagcatttcatttgatgaaaatgagggaggtggttctgtgtttactgttatcttaccgttagattccagtgtttatggaaaaaacgatttcctagtatcaagcatccttcaggaagaatcgtttgttcatgagcagtgtgatacctatttaacagtaaatcatgattcagtgaccccggaccctttgaataaaaaaagaatattgataatagaagatgatggagatgtgcgtaagtttttagaaacggaacttggtatttattttgagatcataagtgaaccggatgggctttccggtttacaaaaagctcagtcttttgaggtagatttgattatttgtgatgtattgatgcctggtatgaatggctttgatgtgacacgtaaactgaaacgtgattttgagaccagtcatattcccattattttgctgactgctatgagcacttcggaaaataaacttgaaggggtagaaagtggtgcggatgcatacataacgaagcctttcagttccagattgttattagcacgtatatttcaacttattgaacagagggaaaagttaaaacgaaaattctctaatgaccctgctatgacaagtcaggctttatgttctacagaactggataggaaatttggtgaaaaattgcagactattttggaaaaacaattggacaacccggaattcactatagaggattttgcatctgcggtgggggtaagccgtgctgctttttttcggaaagtaaaaggagtgaccggatatacacctaatgaatatatgcgtatccttcgtatgaaaagggctatggaacttttgcaggagggtatatacaatgtaagtgaaatagcttataaagtaggaatgaatgaccctctttattttagtaaatgcttcaaatctcactttggagcacccccttcggcttatctgcataaaaaataaataaaggagcgcttgaaagattataatgttttcttatttttgatggatttataccataaaaaggtgactagcacgataaatgcaaggaaaatggtaatcatttctgattggtatgtcattggttccacccagatttcgtggaaggcattccatcttcccataacttctacgaaagtccaaaatacgactactgtagcaatagaaaaacggagagcgtatccccattgactgatatttatcaatcttcggaacataaatagtgatcctacaaggcagccgaatgcaaccaatgcggtgataggatggcggtcacctataaaattatcatcatagcagaatagcaataccatgtaattggtccataaaataagattcagctccatgaaagtaaccagtgaggtgtggcgtgtcatgggacgcatttctacttgtactttgctgttgcggaaaaatacccgttgcagataattgaaaaaatcgcatccgctttttatattgaataagtagagtaacatgaacataatccaaaatccgaaagaagagggcatgatcagatattctggtttggttaccacttctccgtctactatgagtggctgtactccgaaacgatgtgcgtaatacacataaatgaattcaatccatcctgtccaaaataacagacctccgaatagcccccaaagagtttgttgagtatctcctttggcaaatacgcccgttatgaccattattaagcctattaatcccatgaaaaaggttgcgtaatgcatggttaccggttccatcaggtgttccattaagatcatcaatgcatgtcctagcggcatggtaaacaatacaattaggaatgaggtgataccgataaacacatttcttttttttagtttcattttttcttctttctttctatgtgatataaaattacaaataaagttccgaatataagtgccgcccatgtgatactgattactactaagtatcgattatataaatattccccatcttcgggagtatggttcaaagtgcaaagcaaacatcggcacaatggattatttgcgtcgtgggaacaataggagtaaataaggaatgacagactacctataagtagggttagtacagccagaatctctatctttctatgatgaagtgtcttgttcacaggcatttcatgatgtaccagtttaaccatgcttgtttttttttgcaaaattagttatagaagtatatactgacaatacctattaatggtgataaaatccagttttatacctaaaaataagtacttgtgtactttattatatatgtgattattagcaataaaaccccaatttttaggtattgtgtacccttggtagtaagggtaactttgcaacaaattttaaaacataaaataataactattaatcaataaaacaaaagtattatgaaattgaaaaactatttagcgatgatggctattgcattgtgtgcagtagcatgtagtgatgatgataataaaaaggaagataccgtgatcccggctcaggaggttgctggtacttacaatggaacattatcactctcagtatcaggaaatgatcaaggaacgtcagacagtcaggtgaaaattactgcggaagaaggaggaactgttcaagttcttctagttggtggtgctggtgaaggaatgatgtcattgccggatattgctatacctggaattaaagtacagacctccgataatgttacttatacttttccggaaagtgctattgatgtaactgttggtactgtaaaatatacaggaagtttacaaggaacgattaaggatgaaaaagctgatctgatctttacactaaagccgggagccatgcctatggctattactgcgacttttgtaggcactaaatagcatgaaaagatatctctttattatatccatgctgggaatgatgcttttgccattctcggcatgtgatggtattttggaaggaatatatgatagtcctgctgcttcggatagtaatgaattcggtttcataagaacagacccttctacccattcgggtactatttatattgatgctactgattatagacgttggacttttattgatttccatacacaaaaagtagattctgtgaatgtgacagattctgaccagaaagaaccggaggaatgggatattgctgtccatcgttatgacgttaaaaccaatgctggagcagtattggaaaccggtttcacaggtttttccgctttacagaatgcgagtgcgatgcccgaaggagtctatgtggatgatgtttggactaccgctaaggtagccattgatatgtcaggtatgatggatggcaatattgtttatatggaatcctattataatgaagaactatccaaatggttgaatgttgataaaagtaatatgccacctacctatactctttcaaacaaggtttatatggtaaagctgaaagatggaacttatgcggctgttcgtctcacaaattatatgaatgctagtggtgtaaaaggcttcatgactattgactatatttatccgtttgaattgtaaaccgacatacgatatgcatagactactcagaaacgtgtgcttgatattgtgttggctgatggcgataccagtatcagcacaacgaattatttcgggaactgtatttgatgaaaataaagaacctctgatgggagcaacagtctccgtaaaagaaaaagtaactttgggaaccactacggatacacagggaaaatacacattgaaattacccgataatagagaatatactctgcaggtttcatacatggggtatatctcgcaaactcataaagtgtctgtcagcaaaacaggtaaagttgattttatactgaaagaagatgctgtaaatatggaaactatagttgtaacaggaacccgtactccgaaactcctgaaagatgttcctattgttactcgggtcattactgccgatgaaataaagaaagtagatgccacccatattggagatttgcttcaggcagaactgccgggaattgaattttcttattccatggaccagcaagtttctctcaatatgcaaggatttggtggaaatgctatactttttctggttgatggtgagcgtctggcaggtgagactttggataatatagactataaccgcttgaatatggacaatgtggagcgtattgagattgtaaagggtgcggcttcttcactttatggttcgaatgcggtaggaggagtggtaaacatcataagtaaagtgtctgcggagccttggactgtgaatctcaatggacgttacggggcttataatgagcagcgttatggaggaacaataggtttcaatgccggaaaattcaatagtgtgactaatgtacagcatacccaagtagatgaaaaagatttggcagatggaaaaacaaatgaggaaacggaggattgggcatttaaaaaggtgtatggtgataaaacttggaatttcaaagaacgtttggtctatactgctaatgatcatctgaaactgacggcacgtgctggatatttttttcgtgaacgtgagaagtcacagactagtaaagaccgttatcgcgacttcagtggtggggtgaaaggaaattatgtatttgataaagataaagatctggaaatagcttattctttcgaccagtatgataagagcgattacttgccacaagatgctaatgatgtacgtgattatagtaatgtacaacattcggttcgtactttttataatcatacttttgtcggtaagcatattctcaccttgggtggtgattatatgcgtgattatttaatgtcctatcagtttgccaataatggaagtaaacatcagtatacagtggacggttttgcacagtttgactggaacccgacgaaatatttcaatgtcatcacaggattacgttttgattattattcggattccgatattaatcatttctctcccaaattaggactgatgtataaaataggaaactgttcattgagaggttcctatgccggtggtttccgagcccctactttgaaagaaatgtatatgaattttgatatggcaagtatttttatgatttatggtaatcctgacttgaagcctgaaaccagccataatttttctctttcggcagaatatattaaaggtcgttataatttgacggtgacaggtttctataatatagttgataatcgtatcactacggcatggagtgaggcgttgaaaggacaggtatataccaatatatcaaatatcaagatatctggtgccgaggcaaatgcttccgccaaatatccttgtggactgtcggcacgtttatcttatgcttatacacatgagaatatcaagaaagggcaacctgtcatttcaagtactcgcccgcatacggctactgtccgtcttgagtatgacaagcattggaagaactatgcgtttaatattgctttgaacggacgttttctttccaaggtgaatacggaggaatatacgtcgaacacttcttatgaagaaactgagaaggtgacctatccggcgtatacaatgtggaagcttacgttgtctcaaaaagtatggaaaggtgttgatatgactttggcggtggacaacttgtttaattatgttccttcccgttattataataattcgcctgctactaaaggaacaactttttcagccggtttatcattaaatatagaacaattattcaaatgaaatttggctgctaatactaaataaactacgtgatttaaataaagatatgaagaagaaacaattactgattggaggagggatagcagtcatcttgctgcttttgtttggtgtatggaatctttggttcagtgcaactaaagtggctttcatcaactatcaggtaatcagtttagggcagatatctaaggctaatgacaactcatttattaaaatcagtgaactgagcacagatgacctgaaccgattgaccagttatgatatgatatttatcaatgccatgggattaaggattactgaagagcaacgtgcgcaaatacaaaaggcggccgatggtggtcttccgatattgactactgccgctaccaatcctgcaaacaagattatttcattggattccatccaagcggatacattgaaacattatctgtctaatggaggacgtcgtaactatcgcagtatgctgaactatgtacgtgtgtatattgataaaaaacgattctctgtgtctgaaccggaagccgtagtgaaacgtgccgatgatgtgctttatcacatgaacccaaagagtcccgaagacgaagagttgggtttcaatacggtagccggatacaatatttttctgcaaaacaacggtttgtggaaagagaatgctccgcgtattattgtgaccggtccgatgggtgaaccttccggacttattgctaaattggaggaaacaggcaatatggtttatcctatacgttccatgcattcttttattcagaaccatggaattgattctgttcgtccgtctgctatcatcaatatggcgcatggacgtatgggcgattatatcgtagattatttggcgaaacagaatataccgcttttctccccattgaatgtaaatcgcttggtagaggagtgggagagtgacaagatgggtatgaatggcggctttatgtcacaaagtattgttacccccgaaatagatggagctatccgtccgttcgctctttttggacattataaggatgaggagggtttacaacgtgcttatgctattccagaacgcttggaaacttttgtggaaacagttaataactatattactctgcagcgtaaatccaatagtgagaaacgcgtagctatttattattataagggtcctggtcagaatgcactgactgcgggtggtatggaagtggttccttcactttataacttgttgcagcgtatgaaacgcgagggctacaaggtggacggtttgcctacctctccgaaagaattggaacagatgatacaatctcaaggagccgtatttggtccgtatgccgaaggagcttttgaccggtttatggaaaccggcaagcccgaactcattacaaaagaacaatatgaaagttggataaagaaatccattcgttctgatatgtatgccgaagtagtagctgctaatggtgaatttcccggagcatatatgactacttcagacggccgtttaggagtagctcgtttgcaatttggaaatgtggtgctcttgccacagaatgcagccggtagtggggataatgcatttaaagttgtacatggaaccaatgcagctcctccacatacttatattgcttcttatctgtggacacaatttggatttaaagctgatgcgttgattcatttcggtactcatggcagtttagagttcactccgcgcaaacaagttgctttgtgtagcaatgactggtccgaccgtctggtaggtgcattacctcatttttatatttattccatcggcaatgtaggcgaagggatgattgctaagcgtcgttcgtatgcgggattgcaatcttaccttactccaccttttatggaaagtagtgttcgcgccatttatcgtgaactgactgaggctgtcaagacatacaataatttgcttccggctgatgggcaggctgtactgtctactggaaataaagaagctttgaaccgtgcttcattgatggtaaagaaactcacggtgaaaatgggcatccatcgtgaattgggattggatagtcttcttactgttccttatgctgaagaagatattcagcgtatagaaaattttgctgaggagctggcaaatgagaagattacaggtcagttgtatacaatggggattccctacgaacccattcgtattacttccagtgtgtatgctatggctaccgagccgatagcctatagtctgttggcattagataaactacgtaatcgtgcggacggacaggtagagaaacatcgcactctttttactcaacgttatttggaacctgcacgtgatttggtcactcgtttattggctgatccgtcgttggtttctgacgaattgatttgtcgtattactggcattacttccgatgaacttgctaaagcacatgaaatcaataaatcccgtaatactccccaaggcatgatggccatgatgatggcattagctgaagaggctccggctgaggctaaaacacatgctgatatgagcggtggaataatgcaggctgaccaaagcgtacgttcgaaaaggaatagcatatctgagtcaatgaaagagaaaatgaaggaaatagcgaaaggtatgaatcctgagaaagctatggaacttgcaaaaagaatgggtgcaagccctgaagctttaaagaaaatggaaacaggaatgtacaagagccatgctgtaggtatgaatacactggccaaagatacggttacaatgaaaacaacttctcgaggaaaacgtgaaaaagcggatagtgataaattcggaggcatggaagcgatgatgaaagttatgatgtccaagaaaaaagaatactctaaagaggagataaattttgctttggctgtcatggaagtagaacgcactttgaagaatgtgggtaattataagagtgctcttttggaaagtccggaaagagaattgacctctatggttaatgcgttgaatggaggatatacacaaccttcaccgggtggcgatcctatcgccaatcctaatactttacctacgggacgaaatctttttgctatcaatgctgaagaaactccgtcggaatctgcatgggagaaagggaaacaattggctgacaatactatcgaaatgtatcgtcgtcgtcataatgactctattccccgtaaagtaagctatacattatggagtggagaatttatagaaaccggtggcgctactattgcacaggtattgtatatgttaggtgtagagcctattcgtgatacgttcggacgcgtgacggatcttcgtttgatcccttcggcagaattggggcgtcctcgtattgatgttgtggtgcaaactagcgggcagttgagagatattgccgcttcacgcctgttccttatcaaccgtgccgtagagatggctgccaatgctaaagaggatcaatttgaaaatcaagtggcggcaggtgttgtggaagctgaacgtgtattgatagaaaaaggtctgactccgaaagaagcccgcgaaatgtctacttttcgtgtgtttggaggagtgaatggcaattatggtacgggtatacaaagtatggtgcaatctggtgaccgttgggaaagtgaagaggaaatcgccgatgtttatttgaataatatgggtgctttttatggtagtgaaaagaattgggaaactgtccgccaatttgctttggaagctgctttgacacgtacggatgcggttattcagccacgtcaaagcaatacatggggtgcattaagcctggatcatgtgtatgagtttatgggaggtatgaatcttgctgtccgtaatgtgaccggtaaagatcccgatgcgtatctgagcgactatcgtaatcgtaacaatgcccgtatgcaagaggtgaaagaagctattggcatagagagtcgtaccacaatattcaatcctgcttatattaaggaaaaaatgaaaggggaggccggcgcagctaatacttttgctgagattgtgcaaaatacgtatggctggaatgtcatgaaacctcaggctgttgataaggaaatgtggaatgagatatatgatgtgtatgtaaaggataaatttaacttgggagtgcagggttattttgaaaagcagaaccctgctgctttggaagaaatgactgcggtaatgatggaaactatccgtaaaggaatgtggcaggctagcgagcaacagatagcggatattgccaaactacataccgatttggtgaataaatataaaccgtcttgttcaggttttgtttgtgataatgcaaaattacgtcagttcatagcttctaaaatggatgcacagactgcatcccggtataaggaaaacatcagtcagatacgtgaagttgctgcttcaaaagagcaaaagggtatggtgatgaaaaaagaagagatgaatacagtcggtacggaacaacagacgaatacggtaagcaatactgttgtttgtgttgtagtggtggctgctgttcttgttttaattgtattggtgcgttgtcgccgtaaaaaaatgcaggaataacaggctatggaaacaattgtagttgttcttatgatattggtctgtttcaattttatgatgaaacagacattccgcaaacgaggatcggttgcagcaatagctgttgtagccgccctttttgtggggctgatgtgcccatatgcaattcagcagtctaagacacagattgctgattggctggcagatgcccaattgatgcttgacacttcggtggtgcttacagtggaagttgccttacagatggctttttgtatgttggctgttcatgtgcttactacaggtcctgttaagaaacgtactctttgggcttaccgtgctttacgttggtttccgggtattttgatatttcctgtcttgtttagcggattggtatatcttatcttctcttttccgggtgtttccttttctcttgtcgcatggagtatggcggtaggtgtattgatattaatttctgtaggcacattgtttcttcgttatctcttgccggaaaaggaattacggttggaactattgttcctcactaatgcattgaccgccatattgggaattattgctactgtaaatggtcgtaccgccgtaacaggtataagcgaggtggattggggggcattgaccggcttgataattatgctggcaggtggaggactcattggattggttatatataaatatagacgaataaaaacaaacatttaaaacttactgacattatgaatcttatatcagacattctgttttggatttcgaacggacttttagttcctgttgttgtattgcttattgttcttttcatccgttcgctattattgataggcagttttttcgggcaatatttggctattcggcgtacagatgcgttgttgcgtcaacagcttgatgcactgactatagatactttgcccgaattggaaagcaaacttccagtgaagtcgaactcgttggtcattgtgtatatccgtcgggtgttggggtcaaaagaccgtccggcacatgtgcagcgtctgttggctgattttgaaattactgctgataaggatttggctatttcaaaaacattgaccaagatgggaccgatgcttggattgatgggtacattgattccaatgggacctgctttggtgggactttctactggtgatatcgcttctatggcatacaatatgcaagtcgcttttgctacaactgtagttggtctgttttctagtgccatcggtttcataactcaacaggtgaagcaacgctggtatttgcaggatatgactaatctggaattcctttctgaattgctcactgaaaaacatacagcttgagatgaaacgtaatttattaagaaaagaggaggatagtgacccgatgagcgtggtcagcaatctgtttgatgtggcgatggtgtttgcggtagcgttaatggtagccttggttacccgttataatatgactgaaatgtttagtcaggaggattttacgatggtgaagaatccgggtaaggaaaacatggaaattataaccaaggaagggcagaagataaaccgctatacaccttctgaggatcaggatgccaaaagcggaaagaagggtagaaaggtggggattgcatacgaattggataatggggaaattatttatgtgcccgaagattgattggggagttatggttgattgattttttcttcttcaatcgaagaggtgtaggctgtatttcatattcagtattacgcctctttttattttgaatatttactgattacaagtagcggtctgtccgtttagttacgcattttgaaacaactctcctttgatatttgttattattacaaataactcactcatataagaactataatgatgcaaaatgaactaaacacaagcttgattgaagctgtaaaagaaaaactgccacttaaagaaaatctggccaatctgttaatagatactttgtatatcggtaaagaggctatttatcggaggttgcgtggtgaggtcccttttacattagaggaagctgctttgatatcaagaaagttaggtgtttcattagataatgtaataggagtctgtttcagttccaatgccgtattcgatttgaatgtggtggatcatgaagatccgtttgaaacttactattcattattaaaaaagtatgtcaatgtgttacatgctttgcaaaacgatccttcctcttccatgggtacttcttccaatattatcccccaaacactttctttgaaacataaatcattgtctaagtttcgcctctttaaatggatgtatcaaaacaagcatattcagtgcaagcattttgacaaggtggaagttcctcaaaaaatatatgatattcaaaatgattttgtatctgctaccggacatatacattctgtggattatatctgggatagcatgatttttcatcatctgataaatgacatacagtattttgccgggattcatcttatcacagaagaggacaaacatcagattaaagaagaactattgcaactgaccgacgaattggaagacttggcttctaagggaaagacagaagcaggtaacagtgtacatatttacgtgtctcatattaattttgaagccacctacagctatctggaggctgattcggtacaactcagtttgatacgggtgtattctatcaactccattgctacgcaggattgtggaatgttcctcagtttgaaagaatggatacagtcactgaagaaattctcgactatgatttcagagagtggagagatgcagcgtatacagtttttccaacaacaacgtgaaataataagcactttataatagtttcctatttacgaaaaacgaaataggaaagaaattctgtttactgaaaatgaaagtaaataatctgtttatttactttttttcgttatctgttttcttatttctcaattggtcgtgaatcagaaagatagaaagtctttcatctctgttttagagcatagaattcccatttccataacttaaatttgcagtctgtttgttaataaccaaagaaggggaaaagaatgaagaataagattgtgaatgaactgattacagccatgaaggcacgtgttcctgaaaagcagaatttggcaggctatctggcagatacattatgtatgggaaaggaagccgtttaccgcaggctacggggagaggtttcttttacccttgaagaagttgccttgatctctcgaagactgggtatttccattgatcagattataggaaatcacctttcggacagagtgacctttgatttgaatttattgaagtcttctgattcaatggaaggctattatgagataatccatcgttatctgcaaatttttgattatgtgaaaaaggatgaaacaacagaagtttatactgcttccaatttgctgccgtttactctttattctgaatatgagtatctgtctaaatttcgtctttgtcgttggatttatcagaatggtgagatcaagactcctaattctttaagagatatgcaggtggaagaccggattgtgagtgcacataagaaactatgtgaaagcgtgaagaaatgccggaaaacgcattttatatgggacacgaacatcttttattcttttgtaaaggagataaaatactttgccgttcttaaactgataaccgatgatgatgtattgcatttgaaaaccgagctgtatcagttgcttgccatgatggaggaactttcggtaacgggagaattcagtgaaggcggaaaagtttgtttttatctttctaatattcattttgaggctacctatagctatatagaaaaacgggattttcaaataagtttattgcgggtgtattccatcaattcaatggattcacaaagtttttatatctgccggatgcaatgtaactggatccaatcattaaagcgtcattctatcttgatttcagagagtggcgagatgcaacgcatggattttttacaaaaacaacaagctattatcgaaattctggaaaacttctgttagtaccttatacaaaggactttgggataattacccgtttttgaggtaatgacttggcaacggtacaatctgctgcgttctaccttgaattgctttcaagtaactcgtttctgtgtacaaaaataatagaatagtccgatgcacacaaggtacatcaaagaaaaagttcgactatttttttagtttgtttaatcgcattacaatcgaagtttgacttctacccattttgtttgcaatatatttgacactcttaccttcattgtgcagtttcaataaaaattggtctgcacttcttgtccatcttttattggcgttagggtgctttacatagctttcttctgacaccttttcggggtgcaagaattcatccacaaatacagacgggaaacgcttatcgtataatacaagcgtttttatcttagcccttgttattgcaacatagaataatcttctttcttctccgtatgggaattggtcgctcttagtgagcacatagttaagcacagggtcgtcactcacctgtgatgggaaaccgtatgtatctttattgcattgtaagagtattacataattcgcttcaagaccttttgacttatgtacggttaaaaactctatttttcgtcctcctatcacatagtagaatctattaccatctttaattgattggtacataaaagagaggtagtaatcatcaaaagagtaacgccccaataggaatattgatttatccgatggaatagaagctacaagttgccctatcgtattgcagtaatctcgtctatcataagcatagaattccaactcggttctcatttctgagctgaacgaatggatattcttttgtatttgggctttattgcgttgtataaagttcgacgataaagaaaccaaaggctctccaaatctgtatgtcgtttcaatcttgtttatctccgttgttccaaaatattcggggaattgattgaatagagccatatcacttcccgaaaaacgataaatagactgccaatcatcacccacacaatacaactttgcaggaggattaccctctcgcaatactttcaagaagttgtaacggtcaacagaaatatcttgaaactcatccactatgatataatcatattcaacagggtgtgaagtacgacatatctcagtggcttgaagaatagcatcggtaaaatcaatttggttactatcgcttaacgcatttatgtagcgttcatatacaggttgaaatatattcttgatgataaacacacttcgttcatcatctgcatttttggcttgtttcaaaacctctttaactgatttacaacttgattttaccaatgtaacgaaagtaacaacaagtcgtataaacgccttttcctgcttgctgcctttgggtagtactaaatcgtataactcctcatcggtcttttcttgaattggtacacctgcttcagctaatagtttacggagtttatccctaatatcagaataatgaaaatctgcacttgatgttactaaaagttgtgtgccaaatttctcgtgagcagttttcttccaagttataccatcattgtatttctgattggcttcttcgtaggttatacccttatcttttgcgaaccaagcaggaacaagcccgtgttcatcaactccgaaatgttcaagatagatgcgtttggttactcctccttgcttaaaatatattgagaagtcgggacgatattgtgagtgcatctcatctgctaattgatgttcgtatggttcttcatatctgaatttcactcccagcgaggacaaagcaaaacatattttttgttcttgttcacttctcacatatatggctctgccgtccatatcgggaaacatcgcctttagctgcacattctttagtcctgataattgctcccgtctttcattcttgcgttgttcccaatcagcttcattcgtttggtaatcaataaagtattccactatacttttcttgaaagacgatttatctaacaatttgtgatatatatctacaaacaatgaatctgtattgtcgcaaatagatggttttgtacctgtcgttttgcctataatatcaatggctaacttatggaatgtgtagcctttcaatccattggtcgccattctttcggttagttcggctgctgctttgttggtataactgataagtaaaattctttcaggtgctatacccttgatttcggtgagatatttaaccttaccgacaattgaagaggttttaccactacctgcactgctgactactaaacaattatcctcttctgaaacaattgagcgtctttgttgcttgtctaatgggtattttaggcaatggtcaaaaaagtccctgtgcgtgtcaagtagaaaggttataacaccatcattgtgttgttttacaagtttgttgattcttccaaagtcgttaatgaatttggatatggtttctgatggagtgatgttaaaggcttcaagtttcttcagaagtgaatatgcctcttggaaatgcaccttataatgattgatgaaatctttttcttgcgttgcggagattaccctgccataaaagccattatttaagtctgagggaatatctataaacgccccctccttaagagccgataatctctcttttgcttgctcataatttgatttctcgctatatgcagatatatggtttagcttttctgcaagctctttggatttgttttttaggcgtgttcgtaccatcgctattacaataaccgaaatagcaattatacaaattacccaaatgaacaatggctgcatattggaagtaatatttatctgaatctttcaatccatctataatcatcacccttagtactccactgaaatttccacatatcacctgtattatcgtttataagatagtattgatacatacttgtcagtggctgaatagagaatatacacctttcgttattttctactaattcgtatttatttataggaatacaaaataggttgtctaaatcttgtgtactatattgaacttgccatagtcgtccattatatgagtccaacaatataaatgtccacatgttttcagtggcaaacatctgaaatctattagtccaatttgacgacttctcaggatatgcaagagaaaatatgttgattggtgcagcaaacatgtaatcctcacccttgacactaaactggacttgccaattcttacctgtatatgtatcaagcattatgaatgtccacatattctgtgtttcataaaggcgaaatcgtccttctttatctcctaaaatttctctcgcactacaaatttcccaagactgaccatcatcttgaatttgttgtacttcgcctgtcattgtatttaagcgaagttgattatgatagttccgagtcttatacattttatagacttgagcatatgatgtagaagctataaccattaaagcgaataatacgaaaagctttttcataattctgttatgttattatttgacaattaacggattcatgtaccagacacattttgaataagtcgcatacataggatactaaatatcctctaaatctttttgaattttagtttctacattttgagaatcacgataacgaatcattaccataccctcataaaaaccagaagtcttttctatcgataattcaatgtttcctcctgttacctcccaagcactaccccaaacaacagttccttgatgaacttctgccattaaagctgtattggaatccaaatgggcagggttcttctcttttgaaatagtcggattgccatattttcgggtgtataaatctttataatagttataagtattaacaagcgtattccattcaccacttgggtcaaacaacacagctacggcaaatacacttttcccatcatctgtagctgttacacctatagttgcattacgacctgtaaagtctcccataaacaatgcaagattgttttcactgccaatagaagtgaatcctttagcttttaacttctgacaaaattcagtcatacttccctcaatgggaattcccttaaaggtaaggtgttcggaactactttgagcatacgatgtcaaagcaattaaaacaaatgcgaatgatacaatcaacttcttcataatttgttgtattatatttaataaacattttagtccaacctacgaaaaagcgtgaactacaaagccacactcttacttgaaggtcgtaggaaaccatagatgcagatgtaacaatagtagcccacgctatatgcgtgagaaccactatgctatccttgcatctaattgaaaatttcctacgttttcaagtacaagataagcataacgcttcttcttaattctaatatgttttggaaagagtagcctcaatccaatacaaaagtatgaaaaatccgtgatataccattctactatcacggatttttttgatttacagtctcatacttctattctgtcttggcttcggtattccgatggcttctctaaactcattcatcttctttctgaaccagttcacgtgagaaaccccgtctatcttgaaatcgaatttaccgttttcatcctgtttgatagagcagacggagtgtcgggtatcaaaacttcggttaaattcggaagaatagagttcgccttttatcccgacctccttgaactcgcatagtcttctgattattccgtcattgaacttcaatcggtcacgcaggaagtttattataggcatcagcttctccacatatggaaagtagcgtctgacaaaatccgcaaactccgacagcttgcggtgctgttgctcgtaagcgtttcttatctcctgtatctgcttggcttgttgccgttcccgttgtcgggcttcgttttcaagttcaaggatgcggtcttgcaaatcctcgttcctgcgctccaacgatttcatctttccacttccgaaaagagagcccacactgcttgcaagggcggttgccgtatcggtggctgcgtttttgagcttgtcggtacggatttccgctttcacctgcttcagttcctcctgcgcctcggctttcttctcctgcaacagtctggtttcagtttcgaggacttcattcttctttttcaagtccctataatactgcatggtggtggtgtgccgtgcttccgaaccccgtaccccacgctgcaatccgtatttcgccatcacccttgcgtaattgtcgtggtaggcgaccaaggtctggcggttgaacaggtcatcggcacacaagcggacggaatttgttttcttgcggtacttgcgcttaccgtccgtttgctctttcttggctttgcgcctttcacccgtcacaatgggaacaacggctacgtggatgtgcggagtcttctcgtccatgtgcagatgtgcggcaaccacattgtctttgccgaatgtggcttgcatccattggatgctgtcgttgcaccattcatcgagttctcctttttcctgtatgttcatcatgtcctcgtgcgtacccgacaaaaccacccgaacgacacggacttggtcgtgtgtgattttccgtctgatgcctgccgtgttcagtctgtgggcaatcgcttcatccctgccgtgaacgccatcggggtattcgacaagcaccctgttcagatgtgtccttgtcgggtctgcgtttttaggtattatctttctctctatatggtcggactgcgtggtgtccgatgtaccctttgctttcttaatgtccaatgaaaaatatcccattttatttctattttgcggttatcgttatgtttcttctctctgcctgtggcatcggctcacagggtttattatgcaaatgaacccttgctgcactcggcataatccaaacgagtttggcttctgctctcgtttgcacagggtttccaaagggatttccctttggctcgatagggtgtttttagcgttacggagtaatgcgtgaagaaaacgccctattgagctatggtatttctgtctaaatacctttcggaaagcagacgagcacattacagatgaaatccccctttctttttcggtggctgcatcatccgccttgcggattggacttgcttcttctcctttatcggctctgccgattgggacaagggcttaccgcacaggtagtcgttcaagtccttatactcacgatagtacattgacttgtcaagcagccgttccccaaacttctctttcagcttcttgcaagtgttccgtcctgccgtgtcgttgtcaaggaaacagccgacttgggtgtaggtctccaatatgctttccgcttttgcaagattggaaacggagttcaatatgatatagtcctgtgtgtccaatcgcgggtgttgcggattgttttctactcggatggtaaggaatgaaaggtaatccatgaacccctcgaacaggtaacacatacatcgttgtccgccctgctgtcggatatgggtgatatctttcggggcgacacatcccttgaagtatctgttgcgcacttcatatcctcctgccatgttcggaaagccgatggcaaaataggg

SEQ ID NO: 14450 - DNA, 565 bp, Unknown
  gut microbiota DNA sequence
aggaaaacgtatctgtgacccgacatgcggaagcggaaggctgctgctggcatatcatgtacgccacctgggtaattatctggttgcagaggatgtcagccgtacctgttgcctgatgaccgtttgcaacatgctcgtacatggctgcataggtgaggtcatccaccatgacagcctctgccccgaaaacttcatggacggctggatggtaaaccatacgctgacccggacgggcattccctccattcgccggatgagtgaggaggaatatcggacaagcaggaacatgtccgttgacctgctcagaaagcggaaagagaaattgcgccaaatgcagcctggcaagaaacaattgccatataaacaacagaatttataaacaataaaccgaatgattatgaaactgaatgttagcaacgaattgaaatcccgcctgacccatgcggcggaaaacggaagtgtgatagccaaagatatcctttcggaagtaaaaaagaatgtaccggtggaagaagtcatacgggggtcctacaattttttctccaccaaacgcaaacggacggaa

SEQ ID NO: 14451 - DNA, 17969 bp, Unknown
  gut microbiota DNA sequence
cattttgctatcgtcacttacgatggaaaatatgtattgactgaatatccggaagatgaatatgtattgaaagaagctattctgaatgtgatgactcccaagaaagtggatcattttctggaggcaataaaatttcctattgccaaatgtctgattgtaggtgaacctacgcggcttgcagtgcttgaaaaagaaatgtacgaacatttgaaagatcgtatgggggtattccgttccgaaccttattttttggaattggttcctaaaggtattgataaagcacaatcactggccgtattgctaaaagaaatcggtatgacaaaagaagaaatgattgccgttggtgatggttttaacgatctttctatgatacaatatgccggattgggggtagcaatggccaatgctcaagaaatagtccgtcaaaacgccgactacatcaccctttctaatgaagaagatggtgtagccgcggtagtagagaaatttattctttaggtttccggtcaaagaaaggatttttagaggatgcgctgacagggatggcataaacctgggtgcatccttccagccagttcagacgctgtgctgctaatccggccgagaacatgacccgtgtgtccaccctgttgtctgctgctgtggcacaagctgatccgatagcaatgcccacatcaacactattgatagcacatggcactccttctttgcgagacacacaagtggcatatccacaatgaccacaattcaatccttgcgcctgttcgtgtgtacctattaacaggacacattctgcattcagaatattttccgcatcgcgcaggaagaatttcattccatgctccgcaaccattttcaccatcatttccgataaaatattgatattaccatccgtcaccatggctatttcaataatatcaacaccttttcctttgggagcagtacgcgctgctgtcatcatttgtcgggccacatgcagaacatgttcatggcggctttctctttcattcaatatcatataaatcttagttataagttagctattaatacaaaattagtgaatatgaatgatataaggctcttgctttaagcctaaaaagtataaaaagagtcaccggttaaaaaaatatcaaaataaaaagagaaatatagtggataatccaattatttatcgttcctttgacaacggaatataaaaagatagttttttcgattgactcaattcatctcacacttgaaccgtttctattcttctaactaaatttttaaattcaaagtttacttaattatttatttatcaatttttattttatgaatttgtatattggaaaccttaactataatgttagggaaggtgatttgagaggtgtaatggaagagtatggaacagtagcttcagtaaaacttattactgatcgtgaaacacgtcgttctaaaggttttgcttttgtagaaatgcctaatgatggcgaagctaaagaagctatcaagcaattgaacggtgcagaatatgtaaaccgtactatggttgtaaaagaagcacttcctaaagcataaggaattagacattccatgtcacatgatggcgatagagattcactctatcgccatttttttcttgaacagctttctagtttgaaaatacatgaaagggttattgataaggaaacggacatctgttttgtcagaatgtccgtttcttgtttagtatttgttctttagaaagctattgctccgaaggcgaatttactccactcctatttcgtcaacaaacagaaaagctttttcgccaggcatggaatgccatgcgggaagtttcggagtaacttctgctatgattttaatatagcgggcttttactttatcaaaggaaacagagtctttgcggctttgcattttagttcctttttccacaacgggaaaattttcggaggctaccctgcggaaatttttcccgtcctcagaaacttccaccttcagacctgttgtaccaaagatagcatcgcctgtgttcaacattgtgtttacaaaaactgaagatacttccttaggctcaagtaaatcaagggtcacattcatatctgtcccgtagaaaccaatccaacgtcctgagcgataattcatatccccatataatccgtctatcaaagtacttcctcctttaaaagtatatgatttatgaggaatggtattcaaggtaaccggtctcattgtggctgcattaaaatgtatttcctccttacttatctgactagtaccctgcggacgaactgcaatggcttgtatgataacatctttatccacttgtatagtgtcggtatacaatggggattgcacatcgggaacgctgccatccaatgtataatgtatttccgcatcatcaaaagtctgaaaagcaatcttggcttttccttcatcgggagccggaacgatatcaatgttcacatcataaatatcctgacgaaaatcataacctctatcccggtaaatagccagcagagctggtaaacgtttcaaaaaactgtcgaaatttttatgtaacggttccgtccattgaatctcggacaaggcagccatacgaggaagaatttgccattccatcttcaaactgtcacgcgtccattctgtccagatacatccttgagtaccgatgatatattttcgttcatcctctgccaattcattagaaacaggttcaaatgtatagacacgttcaaggcttttagtcccttttatccgattgtaagtaggattgctgaaataaagaaactgaataggagtcataattgcatcatggtgcagacgggcggcttcgataccacctttgacaccagtccatgacatcactgtggcacctggagccaatcctccctccaacatctcatcccagcccagcattttacgccctctgtcattaataactttgcctacctcggacatgaaataggtctgtaattgattctccttgctgtgttttggtgtatctttcaaacccagttcccgaattttagcttgacatgcagggcatttttcccaacgtactttcggacattcatccccaccaatatggatataaggagatggaaagatgtccataatttcattcaatacatctttagcaaactgtaaagcccggtcgtttcctccacaaagcacatcagggaataccccccatttacaaggaatctcgtatggacctcccgtacaacctaattccggataggaaaccaaagctcccatcatatgtcccggaaggtcaacttcgggaattacagtaataaaacggtcagcggcatacttgacaatctcttttgcttcttcctgtgtataaaaaccgctatgaggagtttcatcataggtctgggtttcacggtcaatcaacgtacgtggacgtatcgaacctatttccgtaagtttgggatatttcttgatttcaattctccaaccttggtcttcagtcagatgccaatgaaaataattgatattgtgcaatgccagcatatcaatgatttgtttcagataagaaaccgggaaataatggcggcccacgtctaccataaaaccgcgataaccgaaacgaggatagtcattaacagttcccaccgggatggcagcggatacctgtttgtttttggtcaatggcaaagccttatagagcgtttgcattccataaaagaccccagactcacttcctccattcaaatgaatgttttcagaagttacctccagttgatacccctctttgttggtaatggaactgtcaaccgccaagattatggaattcttctttgcggcttcagttgttgtccggacggtaattcccgtagcctctttaatataggaagctaaaaattctgccgtccgttgcaacttttcattgccttccggatagacaataccggtttgcggattaataacaaaagggtgggcttgaatgtcttgacttacttcttggggctgcggaatgacattcaggtttccgatttctgtttttgtaggagaacatgcggacagaccaaataccatccacattcccactcctgcccattgcatcagttgttttttcatagtggaaaatttataattacaagggcaaagatacaaaatccgatcttatttgccagtatgccttaaccgaatcttgctttttttcagcaatgtttttcctcctataattagagttacggcagtaatcaccatcaaaatgcccagaataatgcgcggtgtcagctgctctccaaaaatcagtactccgaagaataaagctgtaacaggctccaaagcacctagaatagcagtgggtgtggagccaatgtagtgtatggcctttgtcatagtcaccaacgaaataacagtaggaaaaacagccagtgaaattgcgtttacccataacaagggtgtagggataagctgcaatcccgtacagaacttcaatcgcaccacataaacagacagaccgaaaagcaggacatagaaagtaagcttggctataggcatatccttcagggaagaacggtttacgccaactatatagatagcataagctaaggatgataaaaagacaaaagtaatcccgaccaagctgagtgtctgtcctcccggacttttacaaagcaaggaaattcccacaaaggccagcgctatggaaaacatagtgaccggcgatactttttccttaaatactacagccataataatagctaccagtaccgggtagacaaacaatatggtggatgcgataccggcatccatgtagttataactcataaagagaaacagggaagagaatgagaacagcaaccccatgatgcaaagtggcagcacatccgctttcttaatggcaaaagattgtttctgcatcttcatcatgatacctagtacaactatagccagtgcatagcgataaaataataccgagtctacgctcattcctgcactataaagaggaagggtgaacagtgggttcatgccgtagctggctgctgcgattgccccaaggagaaatcctttagtcttgttgttaatcatcgtttttattacacgctttaaaatcggcgcgaaattagatatttgttagcaataaacaaaggaaaagtgctttattctttcaatctaacatctatttatttagattatacctaatcaacaaatataaaagaatttatatcacctgtagctgctgaaaaaattatatgaaatgaacggacacggacagagagggaaaatgcaggtttgttcttctgtccgtgttctatattgatcagctcagtttatgaataaccaatcccgaacgaagtttcggttcaaaccaagttgttttgggcggcataatattaccggtatcggcaatatccattaattgtttcatagaaacaggataaagggccaaagccactttcatttcaccgctgtccacacgcttctttaattcctccaagccacggataccacctacaaagtcaatccgtttgtcggaacgaagatccttgattcccaatatttcatccaatatcaagttggaagaaatagtcacgtctaatactccgataggatcattgtcatcgtatgtgcccggttttgctgtcaagctgtaccatttaccgtccagatagagagagaaattgtgaagagcctgcggtttataaacctcaatacctttctcttctactacaaaattcttgctgacagcggtcaggaattgttccggagacagcccgttcaagtcttttacaacacgattgtaatcaataatagtcagctggttggccgggaaacatacagccataaagtaattgtattcctcatttccctgatggtttgcattttgctgcgctttttcggcacctaccaaggcggcagcagccgagcgatgatggccatcggcaatataaagagccggcatagctttgaaagcttttgtgatagctgttatatcttcttctttgtcgatcacccagaatgaatgtccgaaaccgtcacccggagcgataaaatcatattccggctgttgtgaagtatatttcttaacgatagcatctaattccgcattatccgggtaagcaaagaataccggttctatattggcattatttacgcggacatgtttcatgcggtcttcctccttatcacgacgggtcagttcatgttttttgatgaccccgttcatataatcgggaacatacgctcctaccaccaacccatattgggttttgccattcatggtttgtgcatatacataataattttcttttccgtcttgcaccaaccagcccttgtcctgaaacatctggaaattttcggcagccttctcatatactttaggatcgtgttcgtctgttccggcagggaaatcaatttccggtttaataatatgataaagtgacttttcattacctttcgcttcctcacgtgcttcttcagaattcagtacgtcgtatgggcgtgaagctacttgttctaccaattctttcggagggcggatgcctttgaagggttttattattgccataaaaataaaggtattagattttacttgcaggggcgaattgcattcgcccgaaaacataagctatatgcattcggtcggattcaatccgcccctgcggttattggattacttatttactctgaacttttcacaaccatctttcaggaagcctacaatttgtctggcggcagcaatacctgcgttgatatttgcttcagccgtctgggctcccatctttttcggtgtagagaaatagcggccggcaaatttttctgagaactcagcatgggcaaccggcatgatatcagtaacatactttaagtcggttcgttcttccatcagtttgattaattccgcttcattgatcacttccttacgggcagtatttaccaatactcctcctttaggcatcttgttaaccaattcatagttgatggaatttttagtttcagccgtagcaggaatatgcagggacactacattacaagcagcatacagttcctcagcagaagaaacagctttcacaccatctttttcaattacttctttcgggcagaaagcgtcaaaagcataaatatccatgccaaaacctttagcaatacgagccacattgcgacctacattaccgtatgcatggatacctaacttcttgcccatcagttcagtacccgaagtcccgttatagaaattgcggacagccatcaccatcatgccaaaagccagttcggctactgcattggaattctgtcccggagtattcataacacatacattgtgtgccgtagcagccgccaaatccacgttatcataacctgctcctgcacgtactacgattttcagttcttttgccgcatccaatacttcggcatcaataatatcacttcggataatgatggcgttaacgtcctttacagcttccagtaatttggctttttcaccatatttttccagcaatacaagttcataacctgctgcttctatttctttacggataccgtctactgcaacttttgcaaacggcttgtctgttgctactaatactttcatggtcttattgtattaaaaagattcaccacagattagcacggattatcacagatcccatttattgttcctatctgtgtaattcgtataatctgtggtgaacataattattaatgaagtttctcaaattcctgcatgcagtcaatcaaagcctgaacgctttccttcggcatggcgttgtagcaagatgcacggaaaccacctacagaacggtgtcccttaatacccaccatacctctttctgtggcaaatttcatgaaatcggcttccagctctttgtattcgtcattcatcacaaagcaaatgttcatataagaacggtcggctttatccgttactgtgccacggaacattttgttacggtctatttcagcatacaacatgtctgctttctctttagcacgtttctgcatttctgctacaccaccgttagcttttatccagcgtaaagtctgcaaagcggcataaataggaagtacaggaggtgtgttgaacatagagccgccgtcaatgtgagtctgataattcagcatagtagggatatagcgtgataccttgcccacagcatcgttctttacaataacgaaagtaacaccggctggagccaaattcttctgcgcaccgccatagatacaaatatatttagaaacgtcaataggacgagagaaaatatcagatgacatatcagcaatcataggaaccggagaatccaggtcttcatgaagttctgttccatagattgtgttattagttgtgacgtggaaataatctgcatcagcgggaaccgtataatctttgggaatataggtataggtcgcttcagcggaagatgctacttctactacctcaccgaaagccttggcttctttcatcgctttcttagcccatacgcctgtattcaggtaagcagcttttttttcgaggaagttgaaaggtatcatacagaattccaagctggctccacctcccaagaatagtaccgagtacccttccgggatgttcaacagttccttaaacaaagcaacagcttcgtctactacaggctgaaaatctttagcacggtgactgatttccatgatggaaagaccagaaccattaaaatcaagaacggcttgtgctgttttctcaattacctcgcgaggcaagatagatggtcccgcattgaaattatgctttttcatttgaagtttgttttggttatacaatttgtttatatcttacattgggcgaaattacacattattttcagttttccaaaaaaatcgctaataaatttacgaatttccgcataattttctttcaaattagttaaatctgaatttttatgctttcattttgtaactacatccctagtaaacaatgatctaaagcataaaaaaaatatctttttgaattattctttaatcatttcatttcgagaattgacaaattgtcattatttggcttcttcaataagtgtttttatgccctttatcttctcgtttcgtattaaattcaaagtttgttttatctttttgcgagatacggctgcaaaagaatagtggtcctttacatcaatccgtcctatttcgtctttattcaagttaccttttttaaagagaaagcccacaatatctatcttattgattttatcttttttgcctttccctatatataatgttacgtattcgggcaaggacggcttgggaggcacttggggcaatatgaattcttccggctcatcggctatatatccgggcagtgtttcttcagcatgaagaataacgtatgaatttccttcggcttcccaacgggcggtacgtccgttacgatggatataaccgtcctcattggcaggtagatgataatgtaccacgttctctatttcggggatatccagtccgcgagcggccagatcggtagaaataagcacatggcaacttccgttgcggaatttatatagggagcgttcacggtcatcctgttccatgccgccatgaaaaatgccacattgaaacttcttggattgaagatactttcctaccctttccacactttcacggtgattacagaaaaccaatgtcgattggcttcccaaggtacaaagtagtttatataaggtttcaagtttgtctttttccggagatagtaccttatataaatgcagtcgctgggtaagctgctcttccggatttaaaaaattcaatttaatggtcttgttcagccccgtaaactgcggaatctcttccgcatcggtggccgacaacagaaaacggcgttgcagaccgggtaactgtcctatgacagtcgccatctcttcctgaaaaccgaattccagacatttatcaaattcatctattatcaaaatggaaaccgtgtctgcatcaaaattctgtttggaaagatggtcattcatacggcccggtgtaccgatgataactgatggctgcacccctttgatggtacggtgctcttccatggcaggtcgtccgccatagcaacttacagccttgaatggcgtattcatggatttgaatacctgatctatttgtaaagccagctcccgggaaggaaccagcactatagcctgtacgcctgttataccaggcttcaaactctgcaccaaaggcaacagataagctaacgtcttgccggatcccgtaggagacaataatattaagtcttttccctttttccaagcatcaatggatgcctcttgcatcgggttcagtcgctcaattttcaaattggctagtatgttctctatcatatttattttcgttttatacaaaagtaaagaaaaagcccgataaaagttcacttttaccgggcttattttcattattaataaaaggagatcctgatattatcctccgaagttatcgtacatgatagaagaaggttcaacacccagactatccagcatcttaacgactgcattagacatcggaccgggaccacacatgtagtattcaatatcttcgggagcttcgtgatccttcagataagtttcatacatcacattgtgaacgaaacctgcggtatacttcacgcctgctgcatcggctgcgggatccggacggtccaaagccagatggaagtggaagttcgggaagtctttttccaattgttggaaatcttgcagatagaatacttcattcaatgcacgcgcaccatagaaatagtgaagttcacggtcggtagtgtgcagtgtcttggtcatgtgcataatctgcgcacgcaatggagccataccggcaccaccacctacccaaatcatttccttcttagaatcgaagatcgggtggaagtctccgtaaggaccactcatcgttaccttgtcacccggtttcagcgtgaaaatgtaagatgaagcgatacccggattcacatccataaagccgggaccctgatctttcggtttgaacggaggagtagcgatacgtactgtcagcatgatacggtcgccctcggcaggatagttggccatagagtaagcacggattgtttcttccgtattcttgcatttcaagccgaacaggccgaatttttcccatgcgggcagatactccggaccgataaggtctttgtcaatatccttgttgtagtccatttcaaatttaggaatcttaatctgggcgtatgaacccggaacaaagtccatgtgttcacctttcggcaaagccacaataaactctttgatgaaagtggcaacgttcttgttgctgattacttcgcattcccattccttaacacccattacagattcatcaatcttgatgcccaggtctccttttactttcacctggcaacccagacgccaatgatcctgttgttgtttacggctgaaatgtcctttttcagaaggaagaatctcaccaccaccttctacaacctggcatttacattgaccgcaagaacctttaccaccacaagccgatgacaggtatataccattaacagacagggtgttcagcaaagttgaaccttgttctacttccagttctttctctccattgatagttatctttactttgccgctcggagtaagatactgcttagctaccagcaaaataacaacgagcagaaggataattccaaggaatactccaatactagctaatattaaattcatatccattgtcttattcctttccttttagattttcaaaccagagaaacacataaatgccattgccatcaaacctacagtgatgaaagtgatacccagacctttcaaaggagcgggaacatcagagtaagccattttttcacggatagcagccagaccgataatagccagtgcccaaccgatacctgagcccaaagcgtaagttgttgcctcgccaatgttgatgaaatgacgttgctgcataaacagtgaagcacccatgatagcacagtttacagcaatcagcggaaggaagatacccaatgaagcatagagtgacgggctgaaacgttcaaccgccatttccaccaactgaacgataccggcgataacggcaataaacaggataaagctcaagaaactgaggtctactccttctaccagcgcattaggtgccagtacgtaattttccagcatatagttcaccggcaaagttacaatcaacacgaaagtaacggctgcacccagacctacggctgtctttacgttcttcgatactgccaggtaagaacacatccccaggaagtatgcgaaaatcatattgtccacaaagatggactttacaaacaaacttaaatattccatattcttttcgttttatagcggggattaattattactttcctgcaattctttgtgttttgcacgttggtaccagatgatacaagcgcagataatcaacgccataggaggcatcaacatcaagccgttgttcaagtagcccaagtcataaacagcctgcgggataacttggaagccgaacagtgtacctgcacccagcagttcacggaagaatgccacgataatcaggattttggcataacccaatccgttaccgataccatccaggaatgattcccaaggaccgttcatcatagcaaacgcttccagacgtcccatcaggatacagtttgtaataatcaaacctacatatacagaaagctgtacgcttacatcgtatgcgaatgctttcaaaatttcactaacgatagtcaccaatgcagcaacaaccaccaactgaacgatgatacggatacggttgggaatggtgttacgcaacaaggagataacgaagtttgagaaggctgtaataatggttacagaaagccccattacgatagccggttccaactgagccgttacagccagtgcagaacagataccgagcacctgtacggtgacagggttattcaaacccagtggggttaaaagaacttctctattctttttagaaaataatgcgctcatattctatttaccctcctcttatttattagttaaaaatgaattgtacatgctcaggcaatccttaatcatcgcatctacacccttagaagtgatagtacctcctgagataccgtctacctgatagtcaggttttgccaccttgccatgtttctcaacgcctaaagctacaataccgttttccaacacatgtttgccaaggaattggtcttgaaacttaactgtcgtgatttccgcacccagacccggagtctcaccggcgtgtgagaaataaacgccatatacggtgtctttatcttggtctaatgcaatgtatccccatacaggaccccaaagtccggcaccgtaaacaggaaggatgtatttggtctgaccatctacattacattcgaaaacgtgcagacggttgtttgctatttcacccttataagaagtctggaacgctccgtcgttaggagccaatgttccgtccggctgaaccagcatgtccttaatctcatattttgtaaattctgcatcgacatcctttacatcataaacgttcagagcagccagaatttgtttcttggtgtccatttccacgttcttatactgtgtttctttcaaagaagaagaaacgaatgccagcaggaatgctacgacaacaaccattatcgaagcatagatgatagtataactattactattggtattcataatgtccgatattttagttgttagttgattttaatctgttttcgcgggctgtgatgttcttctgtacgatacagtagtcaatcagcggagcgaagatgttcatcagcaggatggcaagcatcataccttcaggataacccggattcaacacacggattacaatggccatcacaccgatcaggaaaccgtagatgaacttacctttttccgtacgtgcggaagttacagggtcggtagccatgaacacagcaccgaagcagaaaccgcccaatacgatgtgttcgtaccaaggcaactgagccatcatgttatctgtagaaccgaacacattgaagatcaatcccatcacgataccaccggcaaagactgagaacatcgtcttccaacttgccacacctgtccacagcaggatgatagcgcccagtgcgatagcgataacgctggtttcaccgatagaacccggaatcaaacctacaaccatatcccacatggtagcgggagtaccgttcacattaatcagttcgcttgcacccggagcggctgtagcagcctgtcccaacatcgtagcaccggtaaaaccgtccactacctgtccgccgccaatgccgaaaatgctgtcagtgcttacccaaacggcatcaccggacatcttggtaggataggcgaagaacaagaaagcacgggtaatcaaggcagggttgaagatattcatacctgtaccgccgaatacttccttagcgaagataacagagaatgcagtagcgacagccagaatccacaacggacattccacaggaacgatcatcgggatcaacagaccggataccaggaagccttcttgaatttcttcattcttccattgtgccaccacaaattcgattcccagacctactacgtatgatacgataatcttaggcagaacagccaggaaaccataaataaacttttcaaagaaacctgcctcctggcctacagccaagaagtgctggtaacctacgttgtacataccgaacaacagggccggtatcaacgcaataaccaccattgacatgatacgcttgctgtcaatcgcatcatgaatgtgaactcctgttttcgaagtgctgttgggtacgaacaagaatgtttcgaaaccgtcgaacaccgaacgaaatgcgtggagtttgccgccctcttcaaagtttggctttatcttgtcgagataatttcttaacgctttcattaacttttaattcttagtttttaattatttagcacatttccttgcgaagcatgtccaagccctgacgtacgatgcgttgcaattccaatttggaagagtcaacaaattcgcatacagcgaagtcctcgggagccacttcgtaaataccaagtgcttccatgcggtcaatatcgccggcaatgatagctttaattaaatattcggggaaaatgctcatcgggaataccttgtcatattcaccggacatgatcatgtggcgttcgccacctttgatacgggcatccagtgtatattccttgttaccgcacaaccaactgaaataactgcggttggcactgtactgatcggtacgcggcatgataaagcccaagaattcgtgctggtcatctccttcgggaattacagtgaggcttgtagcgtgtgcgcccaggaatccgttaggtttcaccaaagttccggtcagcacgttaccgttaatgtagcgtaagtttttacctccgttcacacgtcctgcaaaaagatctgtcagcagggctcctactttcagcttgcaatacgccggtttctttacttccgaaccggtcagggcgatagtacgggtaaggtctacgcgacccgtgttgaacaggcgtccgatgaagatcacttcttccgcacggagcgtccaaacagtttcgcctttgttaataggactgatgtggttaatctgaacgcctacgtttccggcggggttaggaccgtcgaaggcagttacagttacatttttggcgttggtcagtgcaggactcttctgctctacgctgatattcagatacgtctttgccatctttgccagtgcgtccagacctgtctggaaatctttttcctggcctttcagaacaaattcgaaatcagcagccaatgggttagtatcaaatgcagaaacgaagatgccttttggttgggcattcggatcagccaccacgatgtatgggcgctgaatgatgaatgaaaagagtccggcttccagcagagcagcttttacctgttctcctgtcagagtcgaaacatctttctttccaaactcttcatagtcctgctcctttgctgctgcaatggagatgcttaggactttacgacgctcgcctctctccacgctggtaacgacaccgcttaccggagatacgaacttcacttcggggtggttcttgtcaacaaacaatgttcccccggccatcacatattcctgttccttgaccacgactttcggagtcacgccatgaaaatcatcgggcactatcgcatagatgtccggctgcttcacgtcaaagaactcctgaacgggttttcctttcaggttgatgttcaagcctttgtgtaatttaatcacatttgccatattgggttataaaaaatggtttttaaatttgagcgcaaaagtacagaaaaaaaatgtgaaaaaagaaagaattggcgcttattatggaaaaaattctgtaataatagaaacctttctgaatgtatgtgcaaactcaggcagatactcactttttttttagaacacaaatgacgggaatggcataaatttatcttgatttttaatttatgtcattcccgtcatttgtgtttcattccggaaacacttacagtttgacggttttcactttgccgggaatgatggtcaggtgtaccgtgccattgttttctatatctaccttctggtagcaggcttccaccatcactttcccgtccagtgccatcaccccccaccggcaggcgctctcttcaaaagcacaataaacgcccacaggaggaagaatctttctgtatttgggaggaacgatgatacgttcccccagtttcaagccccatttcatgcccatacggtacggaagggcatctcttatctcctccagcctcttccgccttttcgcttcctcgttccttctcttctgccggtccgtttcctccgcccgctgtccggcttcctctttcagcttctttacagccgtgtcgaagtcctgctcaccgggtctgggaaggttagtggcaatgtaccgcttcctctttcctttttccacatggtaataccttccagccccgtccatcaccacgatgctccggtcggccagacggccgcagcaccaataaacttcctcgtcatcccctgccaacaagcaggcgaacacatcaaacaccgtggaccatacggaatccaccagcttgcaggacttcggtacgcgataatccggtatcttcaagtaatattcataaaagcagatactgtctttatgcaacccgttcatggaggcgtatgctttttttgtacggctatggaaagtctcccctaccctcagcaatttcacaccgccgtaggaaaacaccaccggcttctcccggtaagtgcggcctgttttcatgtccatgtaggaaaccgtgccggcattatccgtaacagccagcagttcctctttcaggaacttcaatctccgacaatacccgagtatcacttccggctccccggaggcactcaccactcctgcctgtccatctttcaaacggactgccacacggtttccctgaatgtcaaagacttgcagataacggggagacactgttatcttgtttccacgcttcagcccccacaggctactccgccggtcgggataagatttcaaggcggcttgtgattcctttccctcttctgcttcctcccgattccggatggcttccagcaaccggtcgtgagtcataacaatctcccatacctcctcctcctgcccgccactgtccgtcaatgacaaagcaggtaggtacaatccgccttccgtccgtgcccgggacagcgcgttgccaatcatccgtccctcgaacatcgccgcccagtcatggttccgggcaggcagaccgaagatgcggtacagacccacattgtctatcagcatacaggactccttgtttgccgatctcctcaacccacgtcctacctgttgcaggtatttcgccagggaaagcgtgggacgtgccagctgcacgaactccacatcgggacagtcgaaaccttcggagaagatatccacattgaccagcactttaacctttccccgtctgaaatcatccaccagttccttgcgttccgaagccgg

SEQ ID NO: 14452 - DNA, 34244 bp, Unknown
  gut microbiota DNA sequence
atagctacagcccgtaacttgaaatctttgaatattcctattgctgttattgttcaagctacaggcttgtctatagatgaaatagatagactttaatgaatgaaggtatgtcaggattctgttgtgtaatcacggattctgtcattttgagtcatggtgagggatcttgtgagaacaaatggatgtgattggattcttcatttctcttttttcactttccgtttttgtcatcctcctcctatttatcacggaactctttctttttccaaaagttgaatcctgcatatatacggacagttccgaaagtattagtgagggagaagtccttttttcgatagtcgtatgtatgcatcaccaacgaagctcctataaaatatttgttggtgttatagaccacggcagcacgtgttatcaggtcaaaattgatatcctttatccaatgattgtcagtattaggtgtatcgtctatttttgattttttataggcaatggccggtaagagtgaaagattggaaacccagttttttgcaaatacccagttatagccataacccacgttgatgctgtaatcagaatatttcactttcttgaaaagtaaagcatcatgtagttggactctcacttcaccgggaagcttttcgtaatcaaaagatatgttgtgctgggaataagaaaagcccgccatcagggaacccgcgcttttacgctggttggtggactggctataggctgccggataagagaattttttataattgaaaatccaataggcgttcagtcctttgattttactttgcaatccgttgaaattcaaatttttaatgggagtattcagatcaaaaccgctggaagaacgtatcttgaaatcgcttcctgtctttctgtaatataaatccacaccaaatttggaactataaagattcagtgccatttcggttttctttgccttgtttttatgtccgccgaaaatatcttttacatcgaaagaatatcctagaaatatccagcgccatccgaaatagactcccagcttgaaactggcattgggggagaatcccaaactttgttcgccgttgtttcctttactacctaaccgatagtattcgtaccaactgctggattccagcatgaaagccagattgtaaaggttgggcgagatataggtagtgtcaatcgcattgaattcttttcctactttccttatttttcttccggtatggcggacagtcgttgctattccgtcagtcaatgtaatgagaacacccttgttgtcctgtactgtcgagtctttcttttccgcttgtgcatatacattaaaggcagaaagaaaagacagacagagcaggcataatttacggatgtccataggcggaaatcagagtttattaagtatacggtccattacccagttggtgggtgtcgcactgatgccgtcgcaggtacagacagcttttccctgcaggtgttctactacggcttttatgagcggaagttgtacatgagggggattttcgggaagaaattcctcgcgtcctctttcagtatgcagggcgatgggatcgtaagtgaaaacggaaaaacagatcatccccttgtctccgatgatttctatacggtcttccttggccgattcatgggcgacaaaacaccatgatcctgatcccggcagaccggaatcaaatttgaagcaggcacttatcgtatcttctgccggatataacccgccacggttgctcttgtatccttgggcttcgagaatacagccgaacatatcttgtaataaatccagctggtgaggagccagatcatagaaataaccgccgccggcaatatcaggttgtacacgccagggcaggttggtgctgttgtaatccaaatcacggggaggctgggcgaaacgtatctgtatattgatgacattacctatttcaccatcctctaccatttggcgtactttttggaaatagggaagataacgtctgtagtaagcgacgaaacaagggataccagtttcttgtgatatgcggttgatgcgtgcgcagtcctcatagctggctgccattggtttttcaatatacacgggctttcctgccttcatagccataatggcgaaagtggcatgagaggaagggggagtggctatataaatagcattgacatcttcatctcctattaactgctgcggatcggagtaccagcggggaatgttgtgtcttttggcgtatgattgagctttttctttgtcacggctcattacagccactacctctgaaccttcgatcagggcaaaggctggtccgcttttcttctcggtcacttctccgcaaccgatgaagccccattttactttgtctaatttaaccatggtaataacttttttgtcattccgcttaaaataataacaatttatattgcaaagataggactattttgcaatttcagctggataaaaatcagttattgtaatatttcttgcgcaacagtttgaatgcaggagtcttgacgtaatcatttaaccaggaattcaggctgtcaagcaatattggagaatgtttgcttactccccatgaatagaattgtgagaagctgatggctgtttctatatccaattgtggaaaatcattgatggaagctttggcaatgctctcgtcgcatacggcatagtctatgtcaccatgtgctaccatggccagtaattgttcttgtccgtatttctccacttctttgatatagatggtatcacctatttcgttacttaaattatgtatgcgcagaatggcaggtgagtttttgactagatgaagggtcttgcgggctagttccaactggctgtgaatgtacagactatcgttttctttttcgggtttacgctgtaccagtacttgtttgttcagtataatggggcgggtaaacaacagggagtctttgtattctgtggtaactaccgtgctgttggccaatatatcgtatgttcctttttgtacgccttccagtcttttggaaaagctcatttcgggagtgatttccggtttcagtcctttgctgtgtgcaaaagcatggagcagttcgtagtggaaaccggaaacggtgtcgccgtcggcataaaaactgattgagttgtactcggtaacagcacgcaggattcccgatgccgctatttctgcataatcgcggggcagactggtttcagcctccgttttctttttgaagaagatggaggatagggttgctgcaaggatacccatcagaacgtatttcagatattttttcatatagaccgtcaatcaaagaaattccatgaaaggccgaactttatcattcgcggattgattgggtagtgtggcgccaggaagtaattggattttcccgaaccggcattgacatgatacatcataataaagaagcgggtacgttttaaatgcaggttggcatagacgttgactatcggaaaagctcctatctcgattttgtcatcaggattctggttatagaattgtccgatgacgggggagtagtctggcgcgtaatatttactgaaataacgcacatctgctcccatttctatctggagtacttttttggcgagaccgaatttcatgtacaagttgccgtaagccgacaattccggtaagggtagaatgtcttgctcacttgatttttgataggctacttcaccgtcgagatgaaaaattcctacttttaatttttgttgcaacattgcagtgaatatttgtatgttgccggagtgttgtcttacggctgcattgttcttgaaaccggtgacatttccttcactgtcttttaccggtatgctggtattggccagataagtgtaattctttatattttccactccggcacgcagctgggttccccatctgtccagacttagttttccttccaggcgggttctcattattttggataaatcgttgttgtcccaccagtaatgtttggactggaaatgcctgaaatagaatacggggttctggttcttgatgaatgcatttacatccagtctcaccgtatctccgaataaacggagattcagatcccctctgccttctacgctgaattgtcctgcgtcttcaccggctatggctaattctcctaggatattgtaatgtaatagttttccttgttttttggatagttcgccgccaatggagagtgaactttccttatagttgttgataatgcgttgtcccggtatgtttgttgtgtcggtcaaggcgaagtttcggtattcataacttaaaaaggcggtaagtccggcttttgcccatttgttgaatccttcttgtaaagcaatgccaatggtgtttttgatggatgtacgcttcgtcttgtctatagagtcggtccccagatagttatgttcaaaatacttctgattctgtgcgtcatcgtatgagatgtatttgcgattgttcaagtctacttgtagtgtatgtatgaagcttgtgacaggaacaaatacctgcgttatttttacagagtccgtatccacactgtcctgtttttctttatagaaccctaggttgtaacgatgtgtcaggaaggcatggtagctggtgttgtgattccatatctgactcagtcgggttgggatttcgttggcggaatattcttttttgccttctgccatatccagcgggttggtgatataccggtcgtccgtgatacctccgttttctgccatcttcaagttatcgttgttgaatatgaaatgcatgtcatatttatctccccggtagctggagaacaggccaccgttgaagaaggctgtggactgatcttgataaagcccccggccatacaggtaatctatgtagaatccgaaccctagccttttgtttgcattgatggcaaaataggatttgaaacgttcttctccgtcacggctgcctcctcctttgtaataggtcaggtttgtgaatggagaaagtgtattggtgaatatgacatcttccggacgttgtacgcaaaaatcgtatgggtcggtgaaaaagtattggctggggtcccgacggtcaaaaaagatgcgtgagaggcggggggagcccaaatttcccaggtaattgtattgtccggtatagccgcccatgtcatttgagttttggaaagcgtgctgcaaggtatctacggggatataagtgacattgccaaaacgactgtccactttccatgagtacagtccgatggggattgtgctggcatctactacggctgtcgtgtctatggggtttccgttacggtcatattgatctctgttcagtccgcttgctgaggaaccgaactggttgttcagggtattcattgtccgctgtgccatcaaggaagtatggaagcacaggaataataaaaaaataatagagaatattcttttcataacggcggcaaagatacaatataaaaataaaaggaagagcttttccgctatggaaagttcttccttttattattcgtttagagttattttaacttactgaggtttaataatctccattccgattcggatggcttcttcattcatcggtatcagatgatggtgacgttcgggtaatgttttgcgtaaagcttttattacacttttaatggatactacgggacgtagttttagcaagcctcctaagacaatcatgttgaaggtctttgccattcctttttcgttggcggcatccattgcgtcaatacgatagattcgtatgtccctacgtgtcggaggctcgatgattccgtatccgtcataaatgagaataccacctggtttaattttgccttcaaacttttccaatgagggttggttcagtatgatggctgtgtcatattggctgagaatgggtgaagagatgcgttcatcactgacaatcaccgttacgttagcggttcctccccgttgttcgggaccgtatgccggcatccaggttacttccttgtcttccatcagtccggaataggcaagtatcttacccatggatagcacaccctgaccgccgaatcctgctataatgatttcctgtttcatggtttctgtctttttattctttatttttcaaatcacccagcggatagaaagggaacatgtgttccaccatccagtcattggatgcttgcggagtcattttccaaccggaattacaagtcgatacaatttccaccaaattagaacctttgccattcattgaattttcaaatgccttgcggatagcctttttggctttgcggatggcgggaactgtatgtacggactggcgggtaacgtaggcggtgccttccaaagtggcggcaatttctgtcattttcagcggatagccgtgaatggctacatcacgaccataggggcaggtggctgttttcatgccaaccagagtggtaggagccatttgcccaccggtcattccataaatggcattgttgataaagatgatagtaatgttttcaccacgatttaaagcatggatagtttcggcagtaccgatacatgccaagtcaccatctccttggtaggtaaataccagacgtccgggccataaacgcttaatggcggtagctacggctggtgcgcgtccgtgggcggcttcttgccaatcgatgtctagataattgtatgcaaatacggcacatcctactggtgacacaccgattgtcttatcttccatgcccatttcttcaataacttcggctattaacttgtgaaccacaccgtggctgcatccggggcaataatgcatcggattgtcattcatcagtgtcggtttcttataaaccaggttttcgggttttatgatttcttcttttgtcatagtttctcctcctattgtttataacatgaaccgcataaagaattccaccagtttgagaaaaatagctgctgcacagacatagatgaatactttgaagtcacttgccacgaagtaagtgatgacagctgctaatgccagtgccatgaaaagtatgttcaatatatttctgatcagatcgatattcatacggtcttattttattagtttctctttcagtgcagtgattacttcatccggatcggggacaataccacccagacgtccgaagtgttctacaggcactttacattttacagccagacggacatcttctaccatttgtccggcgttcaattctacagtgaggataccttttacctgtgcggcgcgtgctgcaatagctttcgacgggaacggccatagggtaataggacggagcaaaccaactttgatgccttcttcccgagccatttccattgccttttgggcaatgcgggcgcaagagccgaaagctacgatcaaatattctgaatcttcgcagtgaagttcttcgaagcgtacttcattctcttctatttctgcatattttttctgaagatgaatattgcgcttttccatttcggcgggatcgagttctaatgaggtaatgatgttgggggtacggtggtgggttctgccggtagtggcccacggacaacgggcaatgacttcttcatctgtcaggcgtgtgcgctgttcgggtaatactactttttccatcatctgcccgataacgccatctgccagaataatggcgggattgcggtatttgaaagccaaatcaaaagctatacctacgaaatctgccatttcctgtactgatgcaggtgccagggctatgagacgatagtctccgtgaccgccacctttcactgtttggaaatagtcggcctgactaggttggatggttcctaatccgggacctccgcgcatgacattgacaatcaggcaggggagttcggcaccggcaatgtacgagatgccttcctgctttaaactaacgccgggactggaggatgaggtcattaccattttaccgcttgctgcaccgccatataccatgttgattgctgcgacttcactttctgcctgtaacaccaccataccggtagtttcccaaggtttctcttcggccagcgtttccaatatttccgattggggagtgatgggatagccaaagtaaccgtctactccgatacggatggcggcgtgggctatggcttcatttcccttcattaaaacgacttcttctgccatatttgttacatttattgttgttttactttatacacagtaatgcatccgtccggacagactgtggcacatgatgcgcaaccattgcaggtatcctctaatacctggtgggcgaatgtgtatccttttttattcacttgtttggcattgagcgcgattacatgtagcggacatgccactacacatagattgcaacctttgcaacgctctgtgtctactacaatagcacctttaatctttgccatgggttagttattattgattatacatgtctttgttatagaaattcagaatattcataatcatgtcacgggcggaaacggcgggactttccggattacgctcgatggcttccaaataattgttcaaagcttgttgccagtttcccattttgcggtaggcgttacccagtaagtaatagggttcatcgttgacgtgcgcatcgtttcggatgaaattagttagcgcatgaatagctctctccgtatcaccctgttcgataagtgtctttatgtcctgtaattcttccgtcataaggcatgattgtctcattgttgtttacaaagatactctttatttgttatgaaagggaagattggagcagaaaaaacgactttcttgctaaaaacatttaaaaaaaggagagaaagatagggaaaaaatggaagaatgatttcttctaatggtttgattattatagaaatggtttcaagtgaaacggttgatagaggaacggtgttatttattcttaaaggggggatatgtttgaattgtatttgtcatgatatttttggggggaagtatatggtaaatcgtttgtatgttttttagggggagttgtcaggttatctccccccctaaatattttatgtattatcgtatagaattaactgtcacggcataaatatatagaagaaaagattattttattacttcacctacatacatattatatgccttctggccgttgttactggggttcattttttttgcttcctcaccggtaactgtctgtttcatcagtttcttacagtttactatcaaccacggctcactactaccttgcttgtagaacgaaattttataattgtcgctttgatccattagcatattgcccattgatttggattggtcaattatgcagaatgctacttctttgccgaataactgaccgaaacctccccaacattctttaccaatttcgaattgttcatcgtttccggcagtaattgtcatacgtgaagatgccttgatttggtcatctatgctttgttctttgctaggagttacattattggctacttttatttcggtattaccctcagaaccaccgatgatagccggttgggcagggggagttaccggagtggcggtaatgattgtggttgtatttgatatcggagtggctgttacacccgaagtaggagcaactgcaatttgtgagttgttcaagactttgttgcccaatgtatcttggatggatttgaacagtgtgtctttcaagtcaattgtttctcttctgaatttgccgcagatgggagccagtttggttttcgatttgtttaaagccatatcgtctacaatccattcctctgcgctgtatttttctcctccgtcacgagcttcatcataccaatagcggatacgggtcatttcgatatcacattttccgtttccgcaggtgataaacatctgataataaattctggttctgtccaatgacaatgcagaggatgagaataccagatattcttcgccacctgctgcaatggttccttcatcttcattggtgtaaagaacacgtgcattgaacttgccttcgggcttgaaacgttctgtagcccatttcagcattgtctcatatagctggtctttcgttaaagacggtgcctgtatttctgttttgaaagaaactttaccgtcatccaaagttattgctcccgccagatatttgggatctgtctgtgccatagcgatgaatggcaggcataagagcattaaaaaaagaattttcttcatagtaatatatcttattttatattttaatctaagcaaagataggaataaaaaaaaagagaagctataaagcctctctttttttacttttattattattgcgtgaattttactttacaggtatcttttcaatgcgtttttggtgacgtccgccttcaaagccgctgttaaagaattcatctaatattttttcagccatttcatggtctatgaatcgtcctggcattaccagaacattggcatcattgtgttgacgtgacaaatgggctatctcgggaatccagcatagtgccgcacggataccctgatgtttgttcaatgtcatgctgatcccttcaccgcttccgcaaatagctactccaggtccgcattctccggcttctatagccagtgcaagcggatgggcgtaatctgcatagtcacagctttctgtactgtatgtaccgaaatctttgcatggataacctttttcagtcaaccatgtttttacaaactctttcagttcaaatcctgcatgatcggatgccagtcctacttttttcatgccagcatttcttttacttggttatacacgttctgtgcggtaaagcccagcttttcatccaatactttgtaaggagcggagaatccgaatgattccagaccgaatactttaccgttggcacctaccaaaccttcaaggtttacaggaagaccggcagtcagaccgaatactttagcctctgtgggaatgacactgttttggtattccttgctttggctgcggaacaatccctcagaaggagcggatacgatacgtatttttatgccatccttgcggagaagttctgcacctgcttccaaagtggaaacttcggaacctgaagcgactaggattatatccggattttcgtcggaacctgcaacaatataagcgccttttgcagcctgtgagtagtcgtttcctgcaggcagattcgcgatattctggcgggagaagattagtgcggtgggggtgctggtattttccatggccaatttccacgttacagtggtctcttccgcatctgccggacggagtaccaacatagaattgtgccctttgtggtttttcagtttttccatcaggcggatttgtgcttcttgttctaccggttcgtgagtaggaccgtcttcacctacacggaatgcgtcgtgtgtccagatgaacttgacgggaagttccatcaaggcagccatacgtacggcgggtttcatatagtctgagaatacgaagaaagtagcacatgcagcaatcacgcctccgtgaagtgccatacctaggcagcagcaagccatggttaattcggaaacacctgcttgcagaaacgcgccggtgaagtcatctttagtgaatgcatgtgttttcttcaagaaaccgtcggtcttgtctgagtttgacaggtcggccgaagaaacaatcatgttttctacttctgtagctagtacaccgagaactttggcagaagcactgcgtgtagcatctccggctttttgttcaatagcattccaatttactttcggagctttgcctgagaaccacagttccaatttagctgccagttcgggattagctttagtccattcagctttagctgcatatttttctgcaacaatttttttcagttcttctgcacgtttggcatacaactcttttacttcagggaagatttggaaaggattggttggatcgccacctaagtttttgattgtattgatgtaagcatcacctcccaaaggggcaccgtgggtggcacagttacgttcataactggaatcatccgctttgcgtgcacctttacccataatggtcttaccgataattaatgtgggctgaccggttacggctttcgcttctgtcagagctgtgcggattgcatcgggatcattaccattgataataattactttccagtgccatgcttcgtatttcttggcaacatcttcgctggtaacagcatcggtagcggtagacagctggatgtcgtttgaatcataaaacatgatcagattgtccagtcccaaatgacctgccaaacgtcctgcaccctgagaaatttcttcttgaatgccaccatcggatatataggcatagatagtctggtccatgacattacccagacgggctttcagaaatttggcagcgatagcagcacctactgcaaaagtgtgtccttgtcctaacggaccggaagtattttcaataccgcgcatgatgtccacttcagggtgtcccggagtcggacttccccattgacggaactgtgccagttcttccatggtgaacttgccggtcagtgccaaagtggaatataacatcggtgacatgtggcctggatcaaggaagaaacggtcacgtccttcccaacgcggattttcaggatcgtaaactaaaaactcagagaaaagtacattcacaaaatcagcgccacccatagctccacccggatgtcctgaattagctttctctaccatcgaagcagccagaatacggatgttgtccgctgcacggttcataagtttcttttcgttcatattaaaataatattataatttgaatgctattagtgagtcggtttatccttgctattttatttaatatctgcaaagataactctttatgtgtaaaccacaacatgtaaagaggctcttttttaaacctgtttgactcacttcttaaattgggtcgctgcttcttcaacaggcagtcctgccttatagttttcgatatatgtgttgaatccggctacatcttcggctgttggcgatatttcaataccggcatcaccggtgaatactttgtcttccagaaaatctgccagggattgtttcttttcattgttgacaaggtaagaacctagcagggcgattccccatgcgccaccttcaccggcagtttccattacggaaataggggagtttatagctgctgcaagtattctctggcctacacctttcgtcttgaataatccgccgtgtcctgtgattctgtctactttgattttctcttcattgaaaagaatgtcattacctatcttaagaactccgactgaagcgtataaatgggtacgcatgaagttggcgaggctgaatttgtcatttgcagaacgtacaaacaatggccttccgtcggcaagtcctgtcacgggttcacctgaaatataattatatgaaataagaccaccgcaatctgcatcacctgcgagcgcatgattgtaaagttttccatataattcattcatatctacaggtatacccagcagttcttggtattccttaaacagattgatccaggcattgaggtcggaggtgcagttgttgcaatgtaccatagctacaaggcttccgtcgggagtggtgaccatgtcaatcatttcgtatggcttggacaactctttttccaacacaatcatggaaaatgaggaagtgcctgctgatacattcccggtacgttgcttgacagcgttggttgctaccatgccagttccggcatctccttccggaggacagacaggtatacctgcttttaaatggcccgacacgtccagcctcttggcaccttctggtgtaaggaaccctgcattctcgccggcgggtaagactttgggcaggatatctgtcagtttccaggggtatcctttaggagctaccaacttgtcgaacttggctatcattccggcagaataattcttggtagccgggtctatgggaagcattcctgatgcatcacctatgcccagaactttttgacctgtaatttgccaatgaatgaaacctgcaagggtggtcagatagtcaatgtcacttacgtgctcttcattgtctaaaatagcttggtataaatgagaaatgctccatctcagaggaatattatatacgaataattcagataaagcggctgctgccggaccggtattggtgtttctccatgtacggaaaggtacaaggatttcttcttctttattgaatgccatataaccatgcatcatggcactgacaccgattgctgccaaggtttctatttctgtgtcatatagcttttttacgttggaacggagatctgcatagcagtcttgcaggccatgccagatagcttccacactgtaagtccacagtccgtctaccaattgattttcccagctatggcttccttgggcaatgggcttgttttcctggtcaatcaaaacagctttgattcgcgttgatccgaattctatgcctagaatagcttttcctgcttcgatggttgattttgcatctgatttcatattaaaacctataatttaaggtacaacaataatgatgataaaataaggtgggatgtgccaagaatcttattagccttgacacatcccctcttcatggatgaattagcaaagtgctttgttcagcatatagtagacttcgttcatgcgaagctctttcttgaagttgctgatggtagtatctttgtcaatacggatcatttcgatacctgcaatttcagcatagtcttcccaatattctgctgtcagatcataagagaagcaagaatgatgtgttccacctgccaggatccatgcgcctgcacctacttcgaagttaggcatcggaatccacagggcggaagcaaccggtaatttgggcaacggtttcggttcgatgcattctacgtcgttcacgatcagacggaaacggttacccaagtctactacagtggcggtacaacctgaacctacttttgaagtgaatacaagacgggctgtctggctcttgcgaatacctatacctaggaagtgtacttccagacgtggtttggaagcggcgataagaggacaaacttccagcatatgtgattgcaggatagcactgtttgcaccatcgaagttcaatgtgtaatcttccaagaaagaacaaccttgggaaagtccttggttcatcacccatacagtgcggtagagagctgctgatttccagtcaccttccgcaccgaatccgtagccttcagccatcagacgctgggaagccagtcccggaatctgatcgaagtagctgccgtctgtttggcccaaatcatcaaaattagtagtgaatcctttagcgcctttggctttgaggatggcacgaagagctaattcggcttttgcagcattccatactttctgataagcttcggttgatttatcttctaatgaagcatcgtggtcgtattcgttaaagtaagttgctacaagtgcttctacatctgtatccttgatatttttatggtattccatcagttcgcttgccggacagtaatctacgtggtaccccatacgttgttctgcttccactttatcaccgtcagttacagctacattattcatctgatcgccgaaacggatgatcagcatatcctgagagtctgcccaacctgcacaaacgcgcatccaaacggcaatcttgtgctgggtgtcttcgtctttccagtaacctaccactactttgcggcggatgcgcatacgggtacagatatgtccgaattcgcggtcaccatgggcggattgattcagattcatgaagtccatatccatggtatcccaaggaatttccttattgaattgagtgtgtagatgtaacagtggtttctttaactgctgcagaccgtgaatccacattttagcaggggagaaagtgtgcatccaagtgatgacaccgatacatttttcatcgttgttggctgctttgaacactgcttccacttctttagaagaattggctgttcctttatatactacttttacaggaagtttccctgattcgttcaatccgtttaccatttcattggagtgagcgtctactgctacaactgcgtcacctccgtacagaagctgtgctcctgttacaaaccatacttcatactgatcaaatgctttttccataatgttatattttaaaagggttattaatttctttgtttcttatttctgtccataataggcattgggaccgtgtttgcggctgaaatgcttttctattaataaagaattcatcgttaaatgagggttggcggcaaaagcgatacttgccattttggctacctgttccatgactactgcattatgcacagcatcattggcatcttttccccatgcaaaaggaccatgattttttactagtactcccggagtatgtacagggttcagtttcttgaaacgtttcacaatcacattgcctgtttcctgttcgtaggcaccttttacttcctcttctgtcatatctgcggtacaaggaatggcgtcatggaaataatcggcatgagtcgttccgatattgggaatatccattccggcttgtgcccaggcggtggcataggtggagtgggtatgtaccactccacctatttcggggaatgctttatatagaactacatgggtgggagtatctgaagacggacgaagagaaccttctaccacgttgccgtccagatttactacaaccatgtcttcagctttcatatcatcgtatgatacaccactgggtttgattactaccaagcctgtttcacgatcaatggcagaaacatttccccatgtaaaaataactagtccgtgtttcaccaaatccagattggcacggaatactttttcttttaatttttctaacataatgaataattgggtaatgtggcaatatgctaatttgtcaattagcaaattattgcatcggcacattattttaaagtttaaatttcggatcctttctgtaggccttatcattaaatttataaagataagcacctcgtcgggaacctgatttgtctatcaaatctgttttttcaatgaaatccatttcggctacccgcttgcggaaattccgcttgtccatcggttcgccatagattgcttcatatagattttgcaactgtgtcagggtaaacaattcgggcagcaggttaaaaccaattggattgtatgatgctttgtgcttcattagttcacgtgctttggaaatcatgatcggatgatcgaaaatgagctgtggcagttcgtctatttttgtccaatgggcattgtgctgctgcactagttccctgtcatattcatttacattgactaaagcataataggctactgatataactcgttctcctggatcgcgctctaagtcgccaaatgtgcctacttgttccatatatacattttccaatccggtcagttctgccaatacccgtttggcggcagcgtctacactttcgtcttcttgtacgaatcctcccatcaaagaccattttcccatagctggttcaaaatttcgttttagtagaagcagttttaattctccttcgtcaaaaccgaaaatgatacagtctacagatacatagaatttaggatttatgttataataggtggtcatggtttagtgtcggtttaaaattaacaggctgtattcttcaagataattcaaagcatacagcctttaatttatggtttaccagaaataagcatagaatagtgcgcaaagcagaactacacctaaagaggttataacatcccatttgttccagctctttctgataagttccttgtaactgccggtaaaggtgatggcttccacttgtttggcggttggagccggagtgaagcatgatacaacaaccattaacaacaaaaggaatacaagtaaccatatttcaaaaataagccagtttgtctgccaaaaccaagttgtattttcccaaaaccagccagtcatcacatcttttccggtgttggtgaggatattagtcagcaaacggatcataccaattaggaaaccgacaatcatggcagtttcaccggctttcggagtgattttcttggagaatataccaagtgcaaatacggctaccattgcaggtgcaaggagagactgtataccttgcagatagtcgtaaaggctgccgagactcatcattacaggaatccatgccatgccgaggataactacaactacggtagcgatacgtcctaccataacataagtagcttcacttttgttcttaaacatgggtttgtaaaagtcttctgtaaaaagtgtggcacatgaattaaagaaagcagccagtgaagcaaccaatgcacagatgaatccaatagttacaataccttttacaccggcaggcagaacatcctttaccattacagcaaaagctgcatctgtatttgacatatcaaattcaccttttgcagctaaggcggcagctaccatccccggaataagaaacatgaagacaggcaggattttaaaataaccggctgcaatagtacctctacgggcacgcttcattactacatcattatcttcgcctttacgttgtccaagtacacgctgtacgatatgctggtcggtacaccaataccagaaaccgatgatagaagctccgataaatacccagaatccaggataatcttgatacatcgggtctgcttcagtccagtgaaacatatggttggcaccataagcgtgtccgtctgctcctatattcatggcgctacgcgcatgatccatcatttctgtccatcctgtagcaatattaccgtctcccaaggctgacagtcccaggaaaagaaccaagaaagaaccaatgattaaaataggggtttgaatagctgagagggtcattactcctttcattccactcagtacggtgaagatgccggtcaagacaataagtccgattgccccataccaaaaaggaagtccaagtaaaaattccaaaaagatacctccggtataggcggttacactaactttagtaagaatgtaggctatcaatgtgatgatagaaagccatgaaccggtacgtggggtataacggtatttaaggaaatcgggcatggtaatgattttgcccattttattgtttaatagttggtagaatggaacaaaaagccatcctagaagaagaatcatccaaccttgcatttcccagtgtgccatacctactccggatttggcaccggttcctgccaaacctaccagatgttccgaaccgatattggctgcaaagatagcagcaccaatgatgtaccatggctcacctttaccaaatagataatcttcactgcttgctccttgttgcgagcgtttgtctttttgtacagagcgccataccgcccatatcacagctacaatgccgactgccagtattgtccagtccagccagatgaattcatgtgaattccaattcatgatattaaatatttaaagtttaacaattatttttcaacaccgaatttaaagatacattggctgtgataggtctgtcccggttccaggattacagaaggccattgtgatttgttggggctgtcgggatagtgctgtgtttccagacaaacagacgcgcgttgcggataagtaattccctttttcccttttacagttccatccaaaaagttgcctgtatagacttgtattcccggttcattagtatatatttccaaagtgataccactagtggggctggtcagtttggcagccagttggttgatatcacctttcgtgttaagtacccaattgtggtcgaacccgttgccgaattttatttgttcgttttcaaaattagtcacatcgggggcaatagttttaggagtattgaaatcaaatggagtttctgttactgctatcatttctccagtggtcatgaatgtgctgtcaacgggagtgatgctgtctgcatttacataaagaatatggtcggtggctggattggcagggtttccactcaagttgaaataagagtggttagtcatattgataacagtctttttgtcagttgtcgctttgtagtttatgtcgatggcattgtctcttgtcagtgcataagtaacagtagcggttacatttcccggaaaattggcatctccatctggtgacttcatagttagtgtcatagtactgtcgtttaattggtttgcttcataaacttggtattgccatcctttaggacctccatgcaggcagtggccaaaattattttggggcagttgaatggtttctccatctattacgatgactcctttattaatacggttggcatagcgtccgatagaagcaccgaagtcgctgggaatattttggtagtcagcaatgctgtcaaaacccagcactacgtcttttagatttccgtttttgtcagggaccatgatagatacaatacgtccgccaaaattggttacgcatacttccattccggctgcattttttagcgtatacagtttaacaggttttacgccatccactattgtttcataattagtgggggctaatccggactttgtaagtgcttcttgagattgtttgggagcgcaagcacttaacaatgtcagtgcgataccggttcccagaaaggtttttttcatgcttttcatgatataaaagtactaattagtaatagagtatatgattttgggtgtaaaagtaacactattactaatacattggatatgaaaagagtatgttgtgcaacataaaagtgtatttcctacacttttatagcataaagaagaaaaaaaccgctttggattcaaagcggttttttcatatgttagcgaatttgagatattttttataccagcttgcgagaaccgtcactgatgactacatcgtaaacttttggacttcttccgaatttttctttgaatctttctttggcagtggtgatgaatgtttcgtatagttcatttttaactaggttgattgtacatccaccgaaacctccacccattacacgtgaaccggtaacaccgcagtcgaaagcaacatcattcaagaaatcaagttcctcacagcttacttcatacaatttactcatgccatagtgagtttcatacatcttctgtcctacggtttcgtaatcacctctttccaaagcgtcgcaaacatcgagtacacgttggatttcttcaatgacgtattctgcacgcatatagtcttcttcactgatctcggcttttgcttcctgcaacatttccattgtacaatcacgtaaaaattctacatgaggatgttttttctgaatggcagatacggcagcttcacaactttgacgacgcttattgtatgcagaagaagccaattcgtgtttgactactgagtcaactaatactaaacggtaaccttccggtttgaaagggaaatattgatattctaatgaacgacaatccaaacggatcaaactaccttcttttccaaatacagatgcaaattgatccataataccgcaatttacaccacaataattatgttctgttgcctgacctaccttggctaattcaaatttatctattttgttgtcgccgaaaagttcgttgatagcgaaagcgtatgtactttccaatgcagcagatgaagacatacctgcacccaaaggtacgtcacccgcaaaagcagtgtcaaaacctttcacatctacaccacgtttgatcatttcacggcaaacgccgaaaatatatcttgcccaactggctttaggagcatcttcttcgttcaaaccgaactctacatagtcttttaaatcaatagaataagcacgtaccttattggtaccattaggtttgatttcagcaatcatacctttatctactgctccgggaaatacaaaaccaccgttatagtcggtatgttctccaataaggttaatacgtccgggtgatgcatatactgaacctgttgtaccatcaaaatgtttgatgaagcgacttcttacgtattctatatccatgatattaatagtttaaagttaatactatatgtttttataattattctacaggaatgtctttgtttacgttcttgcatcctatcaaaccatagaacaacagataagcaagcaaagcgataattaaccaatagctggccatatatcccacagcgtcagaaatgaattgctgcaataatgggaagataccgccaccgacaaccatcatcataaaaatacctgaagcttgtgcggtatatttgcctaaaccctctacagcgaggttgaagatacctccccacataatggacgtacataaaccacaaagtaccaaaaatagggcactgacaggtacagaggccatttcgaatccattttctacactatatcccggcatagagacagtgatttcttttggagtgaagattgcgattaatataaaacagatagctgttgcggaaacaacaatcaattgtgtgcgtgtagctactttaccgctgatgacactacttgcagaacgtcccactaacatgagcaaccaatagatggcagcaatagcaccaccgatagcggcaccgttggcaagcaggcccgcacctttttccgttgggtcggcaaggtagaaatttaatgtgcctggaataccgatttcaatgcctacatatacaaagataccgattacacctaatacagtatggcgaaaattccaaggactatgagagaatttctctttttcatgacctgcttttcttagatggggctctggaatagcgatgaatgaaagagcgataaacgctgatacgaatacacccattgcgatgaaaagcagaggagctacatctgacatagctgtttgaggggtgacagaaccaatcaaggcacctacgaaaagcggagtcaaagtacccgacaatgagtttagagcaccaccggcttggattaattggttacctttgttaccaccaccacctaaaagatttagcatcgggttaactactgtgttcagcatacatacacaaaaaccacagacgaaggcaccaagcaggtagataataaaattcattttaatggcatattctcctaaattgaatacgtctatatctgcaccgaacaaactggaaatatattggataaacaaaccgatgaaacctactgccatggcaatgagggctgtttttttatatccgatttttacaagcatattacctgaaggaatccccataaacagatatgcaaggaaattcatcatatttcccatcatacccaaggtattggcacctgcatattggtttttccatattgtgccgaaaggcgcagcaagattagtaacgaaggaaatcatcgcgaaaaggaagaacattgtaatgatagcgatgatattaccgttctgtttttgttgattcatggtcttgaaaaaattataagtttataaattaggttatttcataaaattatttttctacaccgaatttgtagatggttacttgactgtaagtttcccccggatgtagaacacaagaagggaaatggcctttattgggtgtatcaggaaaatgttgtgcttcaaaacagatggcacttcttgctgggaaagttgctccatgagcaccttcgaaaccattatgccagtttgaagtataaacttgtacgccgggctctgtagtgtatacttccatgctacgaccgctttcgggctccacacattttgctgcaaaactcagtgtgcctgcttcacgtttgtttaatacatagcagtggtcatagccggcaccgaattttagctgttcgaatggggcattgattctactgtctactctttgaggagtacgaaaatccataggagtaccttctactttggcaatttcgcctgtagggattgatacattatctatcggagtataaaaatcagcattaatggttacgatgttgttatcaacggttgccgtaggattggcaatgcctgataggctgaaaaaaccatggtgagtgaggtttaccaatgttgttttgtctgttgtagcgtggtaagtaatgatgaattcattttgattacttaaagtgtacgttacgtgaatatccaaatttcccggaaatccttcttcgccatcagcagataaataatgcaatttcaaactttgtggagtttcctgttctgcatcccaaatgcgggtatgaaatccggtaggaccgccatgcagcgagttgggaccattgttgatagtcagtgaatattctttcccttctaaaatgaatttgcctcctgctatacggtttccgtaacgaccgataagagtactgaggaaaggttcgtggctattgattacatgggttatactatcatgtccttgaatgacattggcatatttaccgtttttgtccggaaccataatagctaatactgctccaccatagttggtaacagctatttcagctccgttttcatttttcagaatgaagaggtctgtttgtttcccgttcactgttgtctgaaaatcggcccgtttcaggccacataaattctcatcggaagtagatgtgtttatcatgttattgaaaatctttttattgtatgtataaaactaatgcaaataaaaagattttcttcggtattcccaaactttttctataaaagtgaacggactaaacgtgaaattttaataaatccgcaacgataaagctgcttcctccaacaaaaataaagtcatttttgttagctttttctttagcggctgctacagcggtttctacatcaggataagcatctccgtgcagcctggattgcatcgctaagctttgtaattctttttcggataaagcgcgttttacactggctttggtaaaataatatgtggcatttttaggaagcatggacaatactccactgatatccttgtcgtttaccatacctattacaatgtgtaatcgttcatatttctgatgttttaattgttctatgatatacgaaattcctcctacattatgtcctgtatcacatattaaagtcggttcactttctaatttttgccatcttcccatcagaccggtgagttcacatacttgtgagaaccctttacgtatattactttcggtaagctgataacctgcttgttttaataggcggatggcagataaaagcgtattggtgtttttaagttggcaaagtccttccagctcgccttccagattgaggtagtcggttgtttgatatattcgtttacctttttcatttatactggaggagtgtaataactgttcttcttctgcaaagtagataggagcgtttacttctttagcacgagttgtaaatataggtttggtttcaggtgtggtttcaccaataactaccggagtcttttctttgatgattccggccttctctgtggctattttggctaatgtattacctaaaaattgtatatggtcgaaactgatattagttatgacacatagatccggacggatgatatttgtacaatctattcgtcctcccaggccgacttctataatggctacatctatttggctctgggcaaaatagtggaaagccattgcggtagtcagttcaaagaaagaaggatgcagaggttcaaaaaagacacggtgtttttctacaaagtctatgacatattctttggatacaggaattccgttgacacgtattcgttcacgaaaatctatcagatgtggagaagtgtaaagtcctgtcttgtatccggctgattgtaaaatggcggctaaagtatgtgaacaagagccttttccattggtcccggctatatgaatggttcggaattggcgatgaggatggttgaaatactcgtctaaaagataagtattctctaatcctgctttgtatgcatcttttcctatatgttggaataatggggcactattatataaataatccaatgtttcttcgtaattcatggcaaatgtttttatttaccgcaaagtgtcacaaaagaatgccaggcagatataaaacctagtattctttctgtgacactttgtagtataaaaattaatcgaagaagtttttgaacttcttgaatattttttctttaatgcttgtattcggtttgaagttatccgattcttgcattttctctagtgcttgtttttcatctttattcaatgtttctggaatatatacgcttatattgactaataaatcacctgtaccgttactgtaaccataactattgacgttgggcaatcctttacctcttaggcgtaagaccttacctggttgggtgcctggttcaatttttacttttactttgctatcaatagttggtatttctacagtacctcctaaagcagcagtcggaacgcttagtaacagattgtaaatcaaatcattttcatcgcgtattaggtctggatgggattcttcttctatgacaacaagtaaatcaccgggaacaccgttatgtttgcccgcatttccttttccattgacagaaagttgcattccttcagccacaccggcaggaattttcacttccacgacttcttctccgtatacaataccttctcctgcacaagctttacatttgttcttaatgattttcccttctccgttacattgtggacatacgctttgtgattgtaccattccaaaaatgctttgttgggtgcgggtgatacttcctgttccatgacaagtgggacacgtttccgttcctccttctccttcggctcctgaaccatggcaatggtcacatgttacgtactttttcagtttgaatttcttttctactcccgtagaaatttcttttaagttcagttttacttttacacggaggtctgaaccacggaacttgcgttgtgcggaacgtccgccaccgccgaaacctccaaagcctccgaaacctcctccatgtccaccgaagatgtcaccgaacatagagaaaatgtcatccatggacataccttgtccgaatccttcaaaaccgccaccggcggctccactcattcctgcatgtccaaattgatcgtaacgggcgcgtttatccgggttgctcaacacatcataagcttcggctgcttccttgaatttttcttccgcttctttatcccccggattcttgtccggatgatattgtattgcttttttgcggtatgctttttttataacatcaagggtggctgttttgtccacctccagaacttcgtaatagtctctttttgccatgtcgttttatgatactgttttattgagccacaactactttggcgtggcgtattactttgtcattcagcttataaccggtttgtacacagtccaatattttccctttcttctcttcagaaggagctggaactaatgcaattgcttcgtgataatcggtatcaaagttctcaccgtcagtctctattttctgaagtccttcctggttcaatactttcaggaatttgttgtagatcaactcaattccttcacgcattgcttttacatcatccgaagtttctgaagtttttacagcacgctccaagtcgtccaaaatagggagaatggcagtaatggccttttctccaccattcttaatcaattcggccttctctttcatggtgcgtttacggtaattgtcaaattcggctgaaagacgcaggtatttgtcatgcagctcttctattgttttctgagcttccgccaattccttattcaccttctcttcagcgttcagttcttctgttgcttctttctgagtttcttcatcaatggcagcttctgccgcttcctgatttttcaaaacttcctcgtcttgaggttggttcttctctgttgggttcatattcttattaaactttttgtttttcttatttttactcataacagtcaggtcttttaggttaatttactgctaacaaatttcgtgcctagttgtttccttagagtgataattttgcaaaagtacggaatttctgccacactggcatacttttctgaattaaaatacctacctttgcaatttcaaaatagaataattatataaataaggtatattaggatgattacagtttcgaacttggccattcaatttggtaaaagagtgttgtataatgacgtaaatatgaagttcaccaatggtaatatttacggggttatcggtgcgaacggcgccggaaaatctactttcttgaaagcaatttcaggtgagctggaaccgactaagggttcagtggtattaggaccgggcgaacgtctgtctgtattgagccaggatcactttaagtgggatgaatatacagtcatggatacggttatgatgggacatactgtgttgtggaacattatgaaacagcgtgaagaactgtatgcgaaaactgattttacagatgaagatggcttgaaagtttctgaactggaagagaagtttgccgaactggatggttggaatgccgagagtgatgcagcttctttgttgagtgggttgggcataaaggaagacaagcattatatgttgatgggggaactgagcggtaaggaaaaggtgcgtgtcatgttggcacaggcactttacggtaatcctgataacttgttgttggatgaacctaccaatgatttggatatggatacggtgacttggctggaggaatatctttctaatttcgaacacacggtgttggtggtaagtcatgaccgtcactttttggattctgtttgtactcatactgtagatattgatttcggtaaagtgaatatgtttgccggtaactatagcttctggtatgaatcaagtcagttggcacttcgccagcagcagaaccagaaggctaaagctgaagagaagaagaaagagttggaagaatttatccgtcgttttagtgccaatgtggctaagagcaagcagacaaccagccgaaagaagatgttggagaaactgaatgtagatgaaattaagccgtcgtcccgtaaatatcccggtatcatctttactccggatcgtgaaccgggtaatcagattttggaagtatccggcttgcgtgcggaaactgaagacggtatggtattgttcaatgatgtgaattttaatgtagaaaaaggagataagattgtctttttgagccgtgatccgcgtgccatgactgctttttttgaaataatcaatggaaatcgtactccgcaggctggtaaattcgcgtggggcgttactattactacggcttatttgcctttggataatacggatttctttgaaagtgatttgaatttggtagattggctgagccagtttggcgaaggtaacgaagtctatatgaaaggtttcttggggcgtatgttgttttccggagaggaagtattgaagaaagtgaatgtgctttccggaggtgagaagatgcgttgtatgattgcccgtatgcagttgcgtaatgcgaactgtctgattttggatactccaactaaccatttggacttggaatcaattcaggctttcaataataatctgaagacttataagggaaatgtgctgttctcttcccacgaccacgaatttattgaaacggtggcgaaccgtattattgaattgaccccgaatggtatcattgacaagatgatggaatatgatgaatacatcacttctgatcatattaaagaaatgcgtgcgcgtatgtatggagataattaaattataaatatgagctgaaaaagaaagagtcattgggagccattgttcctgtggctctttttttatggtttagccgcaattctcattctgtatgaatcataatgagttcaaaaatctatgataatggacgataatccatgtcgttatattagaattaggattatttttgtgtccattaaaaacatgaaatgatacttatgaaaaacttaattttgattttgattttgatttttgcagctgttagcttgaatacgatggcttccaatcctgtacatgtgattataactgccggacagtctaataccgatggacgaactcctaatgaagatttgccggcatatattaaagcattggctacggacacactgacgtataccgaaggtgcctaccgttattgtcagatagctcagaatgacgggaaaggagaatttattcctttctggcctcgtgccaaacgtagcggaaaaaataatatgtgggcttttgatgcagtgacatattattggttggagcagttgttgcaggagaaattttatgtggtgaaatgggctgttggcggaacttccattgcacctgattataatgcttccaagggacgtttttggtctgcggctcctgaatggctggcacaggctaagccaacttctgatggaggaaattctttgttgctttctttcattcaagagatagacatgtgtatagacaaaactctttcccggctgaaggatggctatcagatagatgcatttctttggcatcagggggaaagtgattatgctaaaagtaaagattattaccgtaacttgaagacaatggtggcttatgtgcgtatgcatctgacagaaaaaaccggaaaggattattctcgtttgccttttatttttggtactgttgcccgaagtaataaatatttcagcagagaagtggagaatgcgatgaagcaattggctgctgaagatccgaacatgcacctgatagatatgtcaggcgcagaattgctaaatgacagacttcattttacggctcattcggcagagtatttgggacaacaggtatataagcagttggaacaaattattaaaggagttatcgtcaggactgatgaattgaaaggaaaacgtttgggaattattggagatagttatgtgaagaatcataaggaacctgttaagaatacctggcattataaatttgccgagaagcatggtatggaatatttaaattatggcaagaacggcagcagcattgcttatagtagcccgcgttggggggaagcgatgtatgtaagatataaggaaatgccggatgatttggattatgttattgttgtgggtgggcacaatgatggttttaaattggattcaattggcggtattgatgtatttaaagagaggctggcaatgctgtgtgaagggcttattgaaaagtatcccacagctaagatttttttctttacccgatggaactgtaaaaactttgcgggaagtgatgctgagaaagtggtggatgctatgattgaggtttgtggaaattatagtattcctatttttgacagcgcccgaaaaggaggaatttatgcaaataatgatcattttagaaaaatatattttcagaacagcaaaaataatacagatactgcacatttgaatgaaaaaggtcatgaacgtttcttgaaagtagctgagagttttatattgcaatactgaataatgtaaatgtaatgaattatttttgaaatgtgatgacgcagaaataatccatttacaaattacttactgttcggaggaaaaagtgaggtattctttctccgctagggaaagtaattctcttttgattttctaatagtcggtttgctttgttgtaaatgtcaactgaaatgtcttgctctctggacttggcaaaagagtgattggcagtaatgatgcgtcgggatgaaagtttcagtgtccagcgtatatcttcagcagctacataatgccgagtaggacgcatgacgtgaatgcgcaatatatatccttttgccagtgcctcattgactgtttgcagatttcctgcctctagccggataccaatagctcatttggacatagtgtaatcttgcgcttgaatgcttcccatccatgatacgaggtctttcggattatttaaaactggatttattaactgttggctgtgcagacggatggtaggtatcatttcagataatttccatcaaacgataaaggtaaaagtccacttacgttttctaatatataaatatcagtcttactataaagcagtatccgcatgggttttccatatcgtttttcagtttctaataatacttgccgacaggcaccgcaaggaggaataggtgtgtcaagaaaatcattttctgtgcgggcagcaatggcaagtgtttttactgcttgatccggatattgagaattggcgtaaaacaaagtggtacgttctgcacaaagaccagatgggtaggctgcattttcttgattggttccggtaataacgatatcattttccaacagtgcggcggctccaacagcaaaatgtgagtaaggagcatagcttcttttcgttgcttcacacgcagcgtctatcagtttgcggtccttctctgttagttcgttataatggcaagcctctatgtttatttccagtttgatttgtttcatgatacgttcctctttgttttcctgcaaatgtaatgttttgtttttaatctcccaatgtttcttttctaaaatctggtttttaatttatttactttcttattgcttgtcagagttgaatgtgaaaagaataatatggttaccgataaaaaaggagaaagttgcaactttttcttttatttgtgcgtctaatgaatatataattaaaaaagagaaagattatgttagcaacaacaacacctactatcgaaggaaaacgtataaccaaatattatggcattgtaacaggtgaaactattatcggcgctaatctgtttcgtgatttttttgctagtattcgtgacattgtaggcggtcgttccggttcttatgaagaagtacttcgacaggctaaagataccgcgttacgagaaatgcaggatcaggctgctttattgggagctaatgctgtagttggggtggatttggattatgaaactgtgggggacagtggtagtatgctgatggtaaccgcaagcggcacagctgtcagaatagaagattgaggtaaagcagatgtgcctgttgcaatattttttaggtttattgcaacaggtacgtttgcttttactgtattagggtattcctaatatctctttggccttgtttttacttgaaatgaaatctagtgagttgacaatattatcgtaatttgttgtgtcagctatatggtctttcaatacttgtaacatttttaacttgtcattatcaaaagtataaagtgacataagtttaaggcattgtgcgcaacttaattttttatttataatggccttttccagagttgaatctttgaacacggaattttttgtttcattgtatatcttttcaaattcgttatcgtctattgaaccaacggtatggagggatattttgctggaatataggtctcctactgaagtttctttagctatttcattgtaggaatccatgcctgttacctttccgtttctaaattcgataattagaaatttgcaagacgttgcaattcctccgctctgatattcccattgttccaaagaaccatcgaaacgtcggaaatcgggttttccaagaagttggcctatttcttctgttgtcattccctgctgtaccttccatgctttctgcttgatacttcctgtggtatgacagccgacaagtgttatactgataacaagcaataataattgtttaaattttctcatatatttatgtttttgtgtgttgtttaggttgaattaccatcggtcagtgattcccaatattttacgtgcatcatcttgtttaaataaagaatccagtgtcttgatgatttcttttccattttcacggtctacaatgcggttggaaaccattcttaatactttcattttttcatcgtcccatgtaaatatggacatgagtcgggcagtttgtttacaggtgaagtagttgtttacaactcctacagataataattccatttggtcgtccttaaatgctttgttttttacttttttatagaggttttcaaaatcatgtggattcatagctttgtgttttggtctgtgcgggccaaaatgatcagggtggctgggtggaactaccgtaattatttcatttggcggacacactgcaactggaggcggagtaatgttgggctcaaaagaatccatgtttgttaccattccgtctacaaaatcgataataattaccgtgtttgcagctgtggacatattggtcttggtgtattcccattgttccgagccgttgtcgaatctacggaaatcgggttttccaagtaaatggctgacttcttcttgggacatccctctctgtactttcataatagtgctactagtagtcaaaccgcaactgatgactaaagtacaaatggttaacgctaataatgtttgtttcaatcttctcatttttttgtttgtaacaaagataagttgggaaaaggtatattcttctatctttttccctatttatttttagggatttccctactgtttatatggtaattcttctaagaactgaaatttattgttaggaagattgagtttgaaatctttaaattcatattctggaagattggttgtatttttctcttgttggaaatgtg

SEQ ID NO: 14453 - DNA, 49827 bp, Unknown
  gut microbiota DNA sequence
ggcttctcgctgcctttcttcacgtaaaataagaccttgaatgtacttcgcataactcactcctttttttggttacaaaattagtttatagtgagttaccgacagctatgcagaattacgcaaatcgcagaaaaagaaccatttagcaagaaatatgcacccattacgggggtaatgaagtggtaactgaacttctgcaccgtttggcttcggggtggcattccgttggctctgcacaatagaaaaacaaagcgtaacgaacgctctttcagctaattcgctacgctttgctcaaatttgcaattccgctatgtgtttattttagaaagtgtatgcctgaagttgaattgtatggcctcatcttgtgctgttttgtttaattcttcagctacaaccaagtctaccatttcatcaattttggttgcttctttcaatgtgaaatcaatagaaggtatgccggtatcatcaatttgggaagtcacgattcctacacggcctccggatacattgctctcataaggagcataggcaaagaaagacactttgtctgtcgtgttgttcggccaatactttgtcggggaataagtccattcatttgcatttgtgtcataagtcactttttgattgaacataaaagatggagttacggttcctttagcctcatcccaatttttactccctgtgtaatatcccataatgccgaaaccgccataatgggtctcgtcacatgttccttgcatggttgtggtagaaacatctgtgcctctggtcgccacccccgtgtagacatcgaatccgacagctggattaccgactgttctgacctccgtaatttcattctgcgaacaacctgccaccagtaacgttgctatcgccattaataaatgttttgttctcatttttttattgattagtattatacttttgttttacaaaggcaattctgtgttttcttctttcccccagtcgtttacatctgcattgaaaccggagttgggatctttttcaggttctacatcaggtattcgtccgggtgtttttgcttctatatgtaggtagatggcacctgtttcatctgtgtcttttgagatactcactttatcgaagttttgttctatcttagtctttccgtctactagattggcactcagactcatgctgtggtcggtttcttcgtcaaatccgaaaacacagatttcgcctgtaagagtgccgtcggtgaaagatccttcgtggaaggtcgggtttcctatggaaaattcctgtgtaatcatcttttcaccgcattggccgttgtgcagcaatatggaggcgtggatgcctccaaggcggcaagtagcatcttttatgttgttcagtccgtctatgctaatctgcactttcactgtgcttgtcagctcggtaggggtgaagtgcagtgagcattctatgttgtccgtcacttcaaatccctcgatgacgcaggttgccagcttttcgggtgaggtaacgctaacttcgcttgcggaacgattttctatttgtttggcatacgcttcgaaggtgtggaaagcattctctcctcggaaagcaatgccgccgaaatcactgaatgaacggttgaataagatcacgttataatgtcctttgggcaaacgggtgatggcgtgagtacgattacccatcagtacggtttgaggcactcctccattttggggatagaaaacggccgtcgcgccataggtgtcttctccctccagtccggcttggctccagtctgccatgagggtgactcccacaacttcatagtaggtaagttcgcgcctatcgcaagatatgaaaagcagaaaggaaagcaagataaaacgcattctcattttacacctccttttactttatggtttaatatccatgcaagggagattttagctttggtgggaccaaaccatgtatatcgtccgttgttttgccacaacaatgtctgatggttatcgttggcgtggtaatgtttgtaataggttctcagcactcctattccgaggttgaattccaaatgcagatttcgggaaatgcgttttgcatatccgtagctgattcctgcggcaatgaagaattctccttgatagccattctctttccattgcaaatcgtactttccgcctccggcatacagcccggcgaagtgccccgtaaggatatttcgtttcttcttgttgtctagccagtaacgtgtttccagtcctccggataatatttgcatacagtatttgtcgttatcaaacagccaccacggaaacatcaattcgccgttgagcgaccaacatttgccaacgggaacttcgacttctatgtttggtattaaagcaatgtcaaacagcatgtttgttttcagggcgagaaatggaaccgacttattgtatttcgtttttccggctccatggtcattgccggtatcttcatttccaatgccgatatgcttagagtgaacacacgcggtttgggaatgcccgggatgtttcattctttgttcgtgtatgctgatattactcttttgaacatttgtttggaaacataaaaaactgtcttgtccatgagtgggcaggaagcaggctgttagaatcaaagtttgcaataatacgcgtttcttcagttttttttcacctgaccataaatgtgtactaatgtaattgcttgctactttaataatcagcaaactgagtatataaaataactttgtcattcctaatcaaaaaacgttcttaataggcaaacgttttttagaataatcgcaaagttataataataatttgataatcagcaaagtttattcaatttaatttatgataatagttcgttaagcgttaaattaacacttatgcggcaattgccgtaaactcttactccctccacttcaccggttttacatctggtaggtttgtgcgattaaatcaaccggaaatattgtttttagtgaatgtttcccgaattatgctcggtgagccggattattcataccgcttgggcacttttacgctttcgcttgatgatgatgacagatgatatgtttgaagaatgtagtaattgccaaaaaactgccctgtatcgggaagccggaacgaaccgaaaggatatggtataggactggcgcaaacccaaagtatccagaataagtgatatgctgtaaacaaaaatagggcaaacctcacggcctgccctatccgaaactttaatatgaaatgcctattgaaacaaaaatcacagtttttaccttaaaatattgcatttaaaagtttcctttatcagcattgtcccaccaaagatgtgttccgcctttgtcaccggagatgccaaatttgctggaattttcttggtccagaagtttgattccgccttctactcccttagcgttggcatcataagcctggctgctataaattacgcggcgtacaccttcttctgtgtttacggctccattactttcattgacgaatgcaggaaagaagcgtggatagccggtgcggcgttgttctgcccagccttcggtggatagggggaatagggcgagccatttttgggtgatgattctttccagtttttcttcgttgcttgcgctctcatcccattttacacttaatttatttacagccggggtacttaattcggctttgatgggatctgtatagtctatttgggtgcttgttccattgatgtaggcgtctactgctccttccggatattctttgattccggcataagccccccgataagctaattcattagtcatggaaacacggattccattttcatataggttctttacactttcactgccaatatcccatcttaattttgcttcagccaataggaaataggcttccgctgctttcatgataggcagtggcatggaataagaggaaccgttgtttccctgaatccaaccggagaagctaccccaactgtttggtttggcaggcaggccgctggcaaaacggatacccagatattgactattggcggctactgtggtagtaccggcttcgtttttgatatctccggtattcagggtcatatataatggttggcgcggatctttggttccactcataatagttaccagattggcattgaatccacaatcaccccaattgaacatcagccacatttcattctcaagacttttatcgatcagaatatccttgttgactgttgccaaggtgttttgggcagcctcggtagcgattgccttaaggttcattccggcgttgctggcttcggtttcccgtttggacaggcgtaacgccatgcgtagtttcatcgtattggctatttttacccataggtctttgtcgccgttgcaccaacagtcaaaggatttcaatttggctatttcatctgctcccatggcactgatgtcagtaatggctgtactcagatcttcaagcatggctttatataggtctttctggctgtcgaactcgaaatacacttcgttttcgcccgacaggatggaactgtaaggtatcggtccgtaggcatctgtagtcatcaatgttccgtaagcctgtacgatacgcatcacgcctgacagacctctttcaccactggcgtcgcattgtgcgatgatgcggcgggtgttgttgaaaatatggagataatagttctcatacataccgccactatgtccccggttctctcccatatcaccgttggtgaagttaccgttgggagtcataaagtaacctccataaaggtcaatggtcaggttggtccaaaactggaacatattttgctgaggaggataacagtaggtcatcggttcggtacattgtgcggcaaaaggaagatctgccggatttacctggatgttactggtattcaatttttcaaaatcgtctgtgcaggaagagaagatacttcctacggtcattgggaatgccattaaaaaggcgtatgttaatatcttattccgtttcatagtttcaagcattagaagttaagttttaaattaagaccaaaactgcgtgaggtaggcagtgcaaacatatctacaccttgtataccattgcctgtacctgctgatacgtccggatccatcggggcgtctttgtggaagaagaacaagttgcggccgatgatggctgcggtcaggttcttgcccgcacctaacaggttacggaaggtgtagccgaaagttacttcgcgaaggcgtatattggttgcatcataaacgtagttttctacagcgtatggactgttgaagttattgttaccggtggtgcgatagtacttatcggcatcaaattttactccgtctactgtaataccgccggcgtcacgggcttcacctgaacgtttggacacgccccaaccgtctagagccgcttcggtcataccgatcacttttccaccgaatttagcatcaatcaggaatgatagtgagaagtccttgtagcggaatgtgttcgtccatcccatatttactttggcattcatattgcctgcgtattccagttcgtccatagaatcaccacttacgataggctctcctttttcgttttgcaggggcttgccgttttcattacgcatcaggtgacgtacatataaatctccgtagtggccgccttctttcaagatcacttttgcacctccgaaatcggtcaatgtcagtccgttgggaaggtcatctaccaattctttaatcttattgtcattgtaagagaagtttaggttggtactccaactgaagtggtcagtgaactgctcataccatccgatgttgaattcaaagcctttgttttctacattaccggcgtttacataacggtttctcaagcctgattcgtaaggagccgcaacggagaagaactgattcttggtgttggtcttataataagtcagattgatattcagtcggttctgtaagaatgtaccgtcaaaaccaatttctaaagaatgagttttttccggcttcaatgttctgaacggagctttgtcggggggagtgatagcaccttgagaacctagagaatagagcagattactcatgaatacaggtacgtcattacctacgatagaatagcttgcgcggaatttgaacagatcaatgttcttacccatatctacaaatttgttcagcaggacactaccgccaaaagagggataaaagaatgaacagctttctgtgaaagctaatgccgaagaccagtcattacgtgctgatatatcaaggaatatgccttcacgataaccaagttgtgcggtggcgaatactgagttcagccgtttttgggtcatccagttgtcatctttgcccacggtggacatattgccataatagttgttcggagtaaagatgttcggataaaaaatgtttccggaaccgggctgtgagaactgggagccctcaccccataggtctacatgagaggttttggtttttgtaaaactggaacctgcggtagcagatagagaaaaatcattgaatgtatggttgtagcttaccaagacatcgccataaagttggtcactgaaatagcggttgtctttcatgcgtcccatcggataaaggtttcctacgctggatgcgtaagcattgtgtacccagtgttcttctcctctttcgtaacgcatacgtccttggatattcagatctggagttatgtcccatttgatgcttccgccaaattcatagcggttacggtcagtgatcggggtctgtctgtttaacatccaatatggattaccgaattgctgttgttgtgtatttgtccagttttggacatagcagcctcttgcgggatcatatacctcgaagttctctttatagccattccagtcttctcctctagggaagagataaacaccggtcagcggattccataaatagccggcagctgcctgattggtgatgtgctggttggtaaacttggccgtgaaatcaatatgaatgtctttcagaatattgaaacctacttttgaattcaaattgtggcttcggtagtcattctggggagtgataccttgtgaatagacattggcataggaaaaataagattggatgttttcattacccccgcttaaggagatagagttattcgttgtaaatccggtacggaagaatttttttgcatagtttggagctttgctgcttagtttctcaccccagctgaaagtaccgttgtcgctcatcccataagtagtctggaattcgggtagcaccattgggctctccattgtggtgttgctggatacattaacggaaactttacccgactgtgctgatttggtggtaatcataatggcgccattggctgctaccgcaccataaagtgctgctgccgatgcacctttcagcaaggtgatttgggcgatgtcgtccggattgattgtagacatggcgtcaccaccgtctcgctggcctccgtagttgctgtctacctgtgaattggtgatattcatcatgacaggaactccgtctactactactaatggctggttattaccgctgatggacttattgccacggaacagaatcttggaagaaccgccggctccggttgagttcggtgtaatcatcataccggcacttttaccttgcagggagttaatcatattgacgctcttgatgtcattaacgtctttacctcctactgtttgcgcagaataggttagtgtctcggattgtcgtttaatacccattgccgtcactacgacttcacccagtgtttctgtgtccgatgtcatttttacgttgattactgtacgtccgtttacaggttcctcgatggttttcatacttaaataggagaataccagaatgtctttgtcgccggcttgcagggtatactttccgtcgaggtcggtcactgttccgatagttgtacctttaattaatacgtttgcgccgatcagaggttcgttagcgtctttatctattacagtaccgctgactgtatgcgtttgtgcatacaatgctgttacaaacattcccaataggaatgtcaggaaaaaagtaaaaattcgtctcataaggttagattttgaggttcgttcttaattagatttttgtttttagattaaataataggtttgttgataattgggtatgtttacccaataggtttgatttgataatttttcgcataggcattcagtttaaggttaacttatcaaggtttatttattaaggtttctgttaatctctctttaagtcggtcaacattattaatacaaatatcataaccgggttactaaacaaaaacttatattttttgtattttatctcattcttgttttcttattttgaaataaatacttatgtttgtgtaaccttaaattaaaaatgacctatgaaccttaatgataaccgcttaattattaaaaccttgaggtcaggggatcaaaaagtattttccctggtttatgcttcttattacaagccgctatgtttgttttgttcctcgtatgtttctcttgaagaggctgaagaaatagtgcaggatttgatgatgtatgtgtgggaaaagcgtgagtcgctggtagaggacttgtcgctgaaatctttcttatttaccagtgtcaggaacagggcattgaattcaatcacccgttcccatattacccgtcaggtatatgaagagtaccagagccaacagttaaaatctctgccggcattggattctttttatagcacggagttgtttaatgcctatatggaagctcttcatgctcttcctaaagaacagcaaaaagtatatgttatgagtcgatataaacaactgacccataaagaaattgctgacacgctggaggtgtcggtgcagactgtcaattatcggataggcaaagctcttcagttttttcgtattagattgaaagatttttgcctaaaatagtcgcttcaatcacccgagggaaatattcgtattccaactggtgcacccgtgttgccaatgtatctggcgtgtcagtgggtaataccggacaggtggcttggaaaatggtatttccttcatcatattgttcatttatataatggatggtgatgccgcttttcttttcatgggaagctatgacagcttggtgcacgcgggaaccatacatacctttaccaccgaacttgggaaggagggccggatgaatatttactattttattcggataatcatgcaaaatggcatcaggtactttcaagagaaagcctgccagtacaataaagtcaatatgatattggtgcagtgtttccagtactttcccgtcggcaaattcttgagctgtgaggataagtgacggaacactcagtctttcagcccgcttgagtacaccggcctgtgctttgttgacgataaccaatgctacttcagctgttcttttctctaaaaaataccgaataattctttcagcattcgtgccttctcctgaagctaaaattgcgattttcttcatgatgatctctattttggtgcacataaaacaaaaaaatgtgcaaaattctgcatttatttgcctgaatatttgctcagcccaagaaatatttattcctttgcaaccgcaaagaaaataaaataattcaatttattaactaaaaaattaaagttatgtctgaaattgcatcaagagtaaaagctattatcgttgataaattaggtgtagaagaatcagaagttacaacagaagcaagcttcactaacgatctgggcgcagattcactggatactgtagaactgattatggaattcgaaaaagaattcggtatttctattcctgatgatcaggctgagaaaattggtacagtaggtgacgccgtttcttatatcgaagctaacgctaagtaattatccttattttataatatggaattaaaaagagtagtagtaacaggtcttggtgctcttactcctgtaggtaacaatgttgcagaaacatgggaaaacctggtgaaggggataagcggggcagggcctattactcatttcgatgcgtctaaattcaagactcattttgcatgcgaagtgaagaatttcaatggaactgattacattgaccgtaaagaacttcgcaaaatggatctgtatacacagtatgccattgcagctgctaaagaagcggtggaggattctggaatggacctcgaaaaagaagatttgaatagaataggtgtaatttacggtgtaggtatcggaggtattcatacttttgaagaagaagtagctaattatacactgaataaagatactgtcggaccgaaattcaacccattctttatccccaaaatgatagctgatattgcatcgggacagatctctatcatgtatggtttccacggtcctaacttcacaacaacttctgcctgtgcatcttcatcaaatgctattgccgatgcatttaactatatccgtttgggtaaagcaaatgtaattgtggcaggtggtgcggaagctgcaatttttgaagctggtttaggcggttttaacgctatgcatgctttgtctacccgtaacgatgatccggaacgtgcatcccgtccgtttagcgcaagccgtgatggctttgtgatgggtgaaggcgcaggctgtctgattttggaagaattggaacatgcaaaagcacgtggtgccaagatttatgcggaacttgccggtgtaggcgcttctgccgacgcttatcacttgacagcttctcatccggaaggattgggcgctaaattggtgatgttgaacgcattggaagatgcggaattgaagccggaagacattgattatatcaatgtacatggaacttcgactcctgtaggtgatgtttcagaagtgaaagctatcaaggatgtatttggagatcacgcttataaactgaatatcagctctactaagtctatgacaggacacttgttgggtgctgccggtgcggtagaagctattgccagtgtattggctgtgaagaacgacattgttccgccgactatcaaccatgaggaaggtgataatgatgaaaacattgattataacttgaacttcacgttcaacgaagctcagaaacgtacagtaaacgctgcattgagcaatacctttggttttggtggacataatgcatgtgtaatcgtaaaaaaatatgctgaatagtcgtgtttagcaatataaaagataggataagacttctttttcgtaaggatagggagtcttattttcgtttttataagatgcttggattctatcccaaagatattagcatctacgaacaggctttgcttcacaaatctttatcagtgaagtctgaaaaggggcgtttgcttaataatgaacgtttggaatttttgggggatgctattttggatgctgtggtggcagatattgtttacaaaaggtttgaaggaaagcgtgagggttttctcacgaacacccgttctaaaatagtgcagcgtgaaacattgaatcgtttggctatagagattggtttggataagctgatcaagtatacagcccgccagtcttctcataacagctatatgtgcggcaatgcattcgaagcattggtaggtgctatttatttagacaggggatatcgtgcctgtaaatatttcatggagcatcgtattattggatcttatataaatttggagaagatttcccgtaaggaggtaaattttaaatccaagttgatagaatggagtcaaaaaaatcgttttgaggttacctttgagctgataacccaatcacacgatcagggatataatcctactttcgagagtgaagttttggtggaaggtatttcgggaggaaaaggaaccggttattctaaaaaagagtctcagcaaatggctgcgcgtgtggctttgggaaaaatcaagaatgattccggttttattgaatgtatttttgcggctaaggctgcccgtgagttatctcaggaggaggtaacggtttctgatcgtaagccttcagacagtggggccgttactccggatctttctttggaggagattaagaaaacggatgtggttgagcagataatcagtgaagcggaagaaaaggcttttaaggaaaacgcttagcggattttattgatattgtttataatttattaattagctattccggtggcttgagaaatgttcggcaggaatacataatacattggaatgtgcccgattacattaagaaaatgtagtcgggcatatttcatatactgacaggagttagatttcatctggccacgggcagggttttccggtggctttgaatgtgggacgttgtcctcctgttgctcgcaaatagttccctaattccttggagagccgttttacgatgccgggatgttgctttgctacatcatttttttcactgatatcatttggtatgttgaaaagttcttttttaccggtttcataataatagaccagtttccattcgtctttgcggatagagcaggccagattgatgcctggcccgtcattaccccagatattagggaaattccataccagtgcgcgtcctttagacgggtctcctgtacctttcagcaggggcataaagctgataccgtctatagggttgactgtcttatagtttgtgatacccgccatttcaagtatggtaggataaaaatcttcaattataagatatttgtcacaacgagtatctggggtgactactccgggccagcttacaatcattggttcgcgtattcctccttcatataaggagcctttaccactgttgagaggagcgttttgagtgtgaatttgtccgtcgcgccatccgggttcggcagctagccctccgttgtcactcataaaaataataacggtattatctgcttcatcatttttttccaaccagttcatcaaatcccccagacttttatccattccttcaattaaggatgcatatgcggcttctttgtcactaagtccttttttaatatacttggggaagaagcgcatatctttgtcaacaggaacgtggatggcataatgtgccatatatagataaaaaggttgattgtatttttttgctttgtccaatgctttgatagcttctcgtgtcagggcttctgtagcaaatatacctgttccccaataatcttccaagccggggatagccattagtgaatagggttttccatcgcgggtgtgcccgtagttctgttcgctcagataagtagccagaccaccggcggcatgtccggctatatttacttcaaacccccaatgggtagggttctctcccggtgtgtcaatagaaccgaaatgagcttttccgcagtggatggtatgataaccgttctgtctgagtaactcaacgaaagaagtgccgacaaaggtattggacgttcctgttacttggctgactccgttgtagttccagtctggcaattgtattgtattgcttggtctgtcggtagctttgtttttttcaagcgtccagtttgttacacgatgtcgggtgttgttggcacccgttatcagactgcaacgggtagcggaactgatattgcaggcgtatgcctgtgtgaacatcatcccttttttggccagacgttccatattgggggtttcataggtttcgttatagtgggttttctgtgtccagaaaggtaaggatgtatcttgccaacccatgtcgtccaccataaataagatgatattgggacgttgttgggttgtttctgaagacattttttcttttgcttgcgtcgagattcctgttaaggaagcgagagcgaaagatacaagtagttttttattcatatcggctggttttataagttatttttcgattacaattttttggggggtatctatggaaatacttctcagttcttgcttgctggaattttctatccatacttttagtgtacctgtacatagtacgttcagctccaaccgattctctgttaaagagatagtttggacggtgctcggggatagatatttttcctgtacgccaatgactgcccatcctttccgtatggggcagagatgaaacagtttgtctgtaaatccgatgagttcgaatgtactgctgtctgatagttcttctgccttttgtgattcccaattataaagcagcacgcgttcttcggaggtggcagacattttttcaaaactgttccgaagagaataatcttctttttttataatggcttggacttgctgatgccggggggaaacattcaggttgtaacagattaatgtcattgctccgttgcctgagggagctgctactcgatacgcttttccactccataatggattggtcagtatagattctggcataggtacggcgggagcttcgggacggaacagtttgccttgttcgtcaattaaggggaaaatgttttccttgataaagtcccgaggggcgtccgacaggtagaccggacctccggaaatagccttggaacgtgccatcaaggtgccgcaaacggtatcgcaggaatgaaacatatcatggtcgggccatacggtttgtcctagtagcaaggtattggtataagactggaatagatgtgattttgccatatcctcatcatatttcttatagtctatgctgacacgggtgctgttactgtatgacgtatggtcagtattgatgacgttctgtgccatacagttcattagtcccatattttgccggtgggtctcggcttctaggcttcggttacagtcggttgcctggcggatactttcatggcctcccatgtagagtggtagtgtaaaagcttggttatctactttcagaaaatcgaatccttgttcttttaaggtgctgacgtagtagcgatagaaggaacggatgcgggtgctgtccgttcctggcagaaggctgccggcgtgtgggtatagggcttgtcggacgacttgtggaaatccgttttcgggggataatcccatccagtatcccgaaaggctgtaccacagtccgatccatttgattttattttcttttttgtatgacatgatttttttccatcccgacgggaaacgttgtttatccggtatgaaatcggtcagttgcctgttcttgtgggcgagatgaccgtcgtcaatcagtacataccggataggaatgccggatgcctctatcgttttcatatcgtttattaccttggattcgtttatatcatcatgataatgttcccatgtacaccaaccgagatagcggaaagcttcgaaatattccttggctgtgcggctttttaagtcggcggcttctgtatttttcatcagcgcttgataggcttgccgaatggttgaataaatatcttttccttgtcggatgagtagaagagggacttccggtttcagatagtcttttcctaaggtggatacatatagggtgacagagccgttatcgtttacttgcagccagcttaaactgttacggccggcaatggctttggcaaacaagtattctccgtttgtcagttccagcaataatgcatctcccaacgtagatggggctgcattggaaggtattcccggatagcgggtgtcggttaattcttttaaatcgttgaacacccaaggtaggagtcggttggtattgttgggccattcaaaatctcccggacgggagtctcggctgaagaaaatacctcggacgtacccaggtaaccgtaccggacaggcaatagtctggatttgtccgggtctggatttcttatagggtatgggagaagaaatggaagttaaatcaatcgtatctgtcattgacaaagcgtttgtactcttgaatgactttccttttttatacgtgtaatctgtttgcccgaaggatttcggacaaataaatacattgcaaattagaatacaaatgaatattgctgtatattctctcatgattttttatttgagggttacgttataggcgctgaaatagctgattgcgggtaaggcaacggattgcgtgacggtgaggcgcaaggcggtggtttctaccgattcgaagtgcgcaatgcgtttgtgtcccacagactcgccggagcatactgtctgccattttccgttgactttcgcttctatcttgtattggcgtattctttcgcctttggtaatgtcttcttggataatacagtagttgaccggttgcttttcattcagattcagcgtaagccgttgcttccggccttgggtttctaccaatggcgtgccaaagcgccggtttatttcttctccccattcttttaaacgctgttcgtcacctgctggcaatagcccatcgggatcgggggtcagtccaatgattaacgtagcgttgcgtcccactgatttttcgtacatatccatcaacgttgtcaatggatagatattattctcgtcatcgggttcccaaaaccattcgtggcggccgttggcaccgcgcaggggactgtctgccatagctggtacccagtattttccttcgggatcaccttgttttaataatgctatttggtctttttggctttcaatacgtttatgatgtgaacagggggctgggaaagtagaccagcaggggtatcccactgtgccggtttctgaacctccccaacggaaatcagcacggtctatgttgtggtaaaacaggcagttgggctggtatttattgacgatgggttccacatcaggaccgtcacctcgtgggtcatcggctccgccatcaaaccaaatcatatataaatctccatatcgggtacaaagttcttccaccattttttcacagaagcgtttataccacgcctgtctgttggcggcaaattctccgtcaccggctaccttgaaattatggatacccaggagtgaattccaccggatgcctacatagatgcctggctggataccatatttacggcaggagttgacaaaatcgcggataatgtctcctttgccgttacgccattttacagctttcaggcagtatgggtttacgtcactttgccacaatccgaagccggtttcatgggtggctgtgagtacggcgaatttgcagcctgcggctttagctgctgagacccattggtcggtattcaattgggtggggttgaaaatgttgtaatcttcaatgggactgatacggttattgccttgtccgtagcggatgccgtcgaatacgtggaggtcataatgaaatacggctcccatttccgcctcatgccatttcaattgatgcggtttgggtataatgatttccggttgtgcaacactcagtacacagttcataaggaagagaagggatatatatagtatcttcatgggttataaataattaaaaaatggatcttctgttttttgtagccatgtttttaattggcttttcagtcggtttactaatttgggatgctgcatagctatattattcatttgataaggatctgatctcctgtcaaatagaataatcttatctacctttccatcggttgcatggatagtaaatgtatgtgtggcggtgcgcaatccccggtagcctgttgctggattggatgactgtatgtaatagtagggttggacaatgcagttgttttcttttccgcagaggagaatagaagcgaggttgaatgtttgtacttcttccggtatttgttgctgaaagcccatgatggaaagcagggtcggatacaagtcggcaaaagctatcatggttgtttggtcggttttcggctttattttttccggccatgagataaggacgggaatcctcatggattcctcataaaagatatcttttccggcttgttcatgagctcccatgcagatgccgtggtcagaagtgaatactacgatagtgtttttaaataatcctaaacgtttcaattcgttgattatccgacctatattttcatcgactccggtcatgcaggcgtagtaattgcggatattgttgcggaaatagtcgcccatttcagtgcctttggcgggaatgtcgggacggttggcacataatgtctctacattcagatttttatacatctccttgtattggtcgggcactagctcgtaaccggtgtgtggaggattcatggatacgactaaggcgaatggttgcgtcttatctatatgtttattgaggtactcaatcgctttgtcggcttcatactccggtccccattgattgacataataaaaactatcccggggagtgtcagtgtcccagtacatggggtttaaatggtagtcgtaagtgccataagcggtccaatagtcgaaaccgtgccggcgttctttgggaccccattcgttccaagcaactgcaccttggttgttgtaagtgtctacgtatggtttatggggagcatccagatgccatttgccgatataccctgtctggtatccattggctttaagtatattactccagcagcgtgcatcttgtggaagttctactccgtagggagcgttggcagaattgcaattgcctgttactttgttcttatgcggatacatgcctgtcatcaacatgcctcttgccggtgaagatacagggtagctgctgacagcattggtgaaattcacaccttcacgggccagttggtccaggcaaggggttttgacaggctcttttccgagacaacctaaagcatttcctctccattggtctgccatgatgaagaccaagttaggtttttcttgagcttgaatctggaatactggacacaaagggaatgccagcaagaaaatattaagtcttttcttcataatctgtaaaggattaatagaggtttcatcattcctgactgattgtgttttattgtgtaattatcaaataaaagaacttttattttaaatgttgataaatagcatcagcaaaacgctcacctaatgttagaatgccatatattcctaaatgtacatcatctttaggtgctggatctgatagtcattatatagcatttgtaaatcgtctgctggaattaataatgcattattaacggagaactcagagtttgagttgttggaaacagcaaattgggcttttcttaccagttcacgccctgtaaagcgagaagcggctataggtatgacagttccatatacaaataacatgttttcgctattaaattcttttcgtatttgttctataaaattctttagattcgaactatattggcgagactgttccattccagctatatcacgtgcatctgcttctccttgttgccaaaccatagccttaataatagggcgatatccttgttgcttcaaactgatgatagcatcttttacagtctttataaaatttatatattcttcgccacgaatatttttctgacggtttcccggattccattgttgatatagattggaaccagataaagcgtgttttatcaatgcaatttgaggcttgggatataaagactgtaactttgtacctaaacttaactctattccgaatttattttttgtttcagaagcttggcataaagggttccattgctcactgccctctcctttgttgaggaaacgagaataatagattcggactcttgtgtcaattttaaaagaggctgggatatttttaacataagcttgtcctgttgcatttgattgcccacctactaagtagacatctatttctttttgctgtgctaagataggtaagattattcctaaagttaacaagaatagtgatattaatcttttcataatatgtttatttttcaacctagaatagttcgtaagaataaaccgaaaaaacggtagttagaagaaaataaaactatcaccatatcggtaattatagtctattgctacattgattatgttttcaaaacaaagatattcatataatgtgaatatgctatgggaaggtaggaaaacttttcggaaattttccttttccttcccataaatgattgtagggctgtttctctacattgttatctgaaaacttctatgtttgtttattcaccttcaggtaaagttccatcatttctgctccatccggggttttgataaatggtagaactttcatattcattagaacctggaacagcggtagtcaggcggaattgcttgttactaataggatacaagtatttgcttgtattccagtttaatccattgaaaccaatattagcagcatttttacgataaggtaataaatattttccttctgcgtatgggtcggattttgctgaaatattggctgtcttgtctgttacgccatattctaaaagtgttatttggggaattggggttacagcgtcttcggcttgagggtttgtatacagttgatacatgctatcccaaaaattaaatccttgtacgtgtacatcttttacttggtccaaagcgcgccaacgttttaagtctgccatacggaatccttctgataccaactcgacacgtcgttcacgacggatgttgtacagagttgtgtttatttgttgaccggcagaataacttccccaatcttgtttttctttacttatgtctgtattgtttatggtcttttgatagtctgtactcataccggcacgtgcacgaagagctttccagtatttatcgcagttgccacctagatttccgtttaattcgtaataagcttctatataattcaggtaggcttctgctgcacggaagatcgggcatcctgtataggattcttttgttgactgcatatctccggatgtattcaatcctttgcgcagacagtatccggtcggattactattttctttttgggtctcgaaaatttcagggcggtaaaagtagccgtatccatcactcttctttatccaagtggcaaagtttggatcatcagataacaaatctcctgtttttaaaatagtttgtcccatacgtccatctctgtcggtaaagatatgttcatatgtatcgtctccttgataattggtactggcatagatgggtaggccatcagacattagataagaattaaccatggaacgtgtatagcctgtgtttcccccgccattgcgttgcaaatagcttacgacaaagtggtaagaagtggcatctgagttgacactgtatttacgccataataagatttcatctattccgcttaaatcaatagaattgaataacgaggcataatttccgtgcaaattgtgtccttgagctacgatatcagctgcttctatggcctgttgtaaaaaatatttaatttcagagtcaatgtcaatgctaaaatcttttaaataatccattgaagcaccaggccatccgggaccaccaggaacaaatgcacttcctttatgatatttttcccatgttgcttcaaatagggctgcgcgactttttactaatgcagcgcagtctttgtttaaccgattgcttacgggagcagtgggaagcatatattcgtaggctttatctaaatcagataagataaagcgtgcaacttcattacgcggacgccgtttggaagcttcacgtatggcattgtaatcatccggtaatatttcagttagaataggaaaatcacctagattctgcaatgctgtgagataaatataagcacggaagaaatatacctcgccaatatagtgtttgatatttgcatcattaccggatatttctctgttggcatatcgttcggttacagtttgaataaagtaattagctgcacgtatcttacggaaatatttatgccataagtcatcgtcaccgacatggtattgtccttttatgaaaagtttacttggtgagtctgcggtttgatcgtctgttccattatctttttggaataatcctaaattataagtggcagaaccatgagatggaagaatattgccatattcgtcatcgttttcgttttcactgtcattataaaatttggcagcataagcagctaggtctgtttcggaataaagatagacattggtgctgacagaagtgataggttcgcaatccagataatcattgcatgaggtcgcaagagcacttgcagcggctatgaatgtatataatagaatctttttcatatgttttattatttagaatgttgcatttaatccaaaagatatagttgtttgtagcggataagtttttccggagttcccatcagaataacttgaataagttgtttctggatcaaaaccgctaggtagactggtgatagtcaatacattctcggcactgacatatacacgtaatttttgcatatgtagtttgttgataatttgtgtcgggaaagtataccctagttggatattttttaaacgggcataggcaccgttttgtaagtaacgggtttgtaccttttgattcatatctttgctcatatacattttaggaaaataagcattggtattaggaccaaatacagaagttgtattttctgggcgataataatccaaatgctcttttaaaccagttgattgccattctcctcccgatattccccaaaacataggaccatccaaccataaatcgcgttttgcgactccttgccagaacatactaaagtcgatgcctttccattcacaacccaagtctaaaccaaacctgaaacgtggggtggagttaccaataattttgcggtctcccggatcgtctactgtattggctccttcgttgattactttatctccattaagatcctcgaacataatatcaccttcgccccagcctgaaccccatgagggattgttatcttttatccattcatccatttccgattgatttttagctattccatgggttacatacccccaaatggctcctaattcctggtctttataataggtgctgagcgatttagattcattgggatacttgtcaacaaatgagcgggaatctgccatgttaaagcctatattataattgatctgtcctatcttgtcgcgccaactggctgctatttcccatcctttggtacgtaagtctgtattattgcttgctggcataccgatgccatagatggaagcgacctcagaagcaggaccgaccatatccaatgttttacggataaaataatcgaaatttatgttaagccgatttcttaacattcctaaatcaaaaccgatatttaaggattgtactgtttcccaagtcaatgaactgctaagggttccaggcataccggcaacagttggtttagagtcccccattagccagcttcctccattggtcttgactgtttgtaataaatacatgggataataagatttagtattttgattacctagtgtgccccaagatacacgaggctttaattgattgataatgttttcatttacagagaaaaaatcttcggccgctatattccagcctaaagaaaaagaaccgaaaagtccccaacgatcttttcgaaggaagcgagaagaaccgtcatatcgcaagttgccggcaataaaatatttattagaataatcatagttaatacgtccaaagaagcctgctgtagcccaagtataggcactggcttcattgattttatcttcacctgttgcagcgccgatttcgggtattgattcggtaatgaggtccatacgtttcacagaaagataacggttattgtatttttctgtattaactcctgccatcactttgaattgatgttcatcgaatgaaaaagaataatcactgtacaggctggttgttaaatgattggctttagtccaatattgcatggctccggtttgtcccaccgcatattctccaccgtatgccagttctaatgcttctccggctacgttgtgttcatatactttattcagattctgtctttgtacttggtcaatcaagcgtaaccctacgtttgcatatatattccagtttttcaagggatgaaaaacaagttgtccttgcagataaacgttattattactggtgatggagcggcttccattagtaagttgccctaattttccgttgcgcatatagtaaccgttaggatctttaaacggcattgtaggccacatgcgtactacatcatgatagaacagtccattcatgtcgctataaagagggttgtctagtttggtataaacatatttagtattgacttctatatccaaccatttaaaaggctgtgcgttaaattttgcattggttgaaatacgttcataggaatcttttccgtaacgaaggttgccatcctgatccaaatagttggcagatacgtaatattgacttttgtcactgccgccattgatattcaggttgtgctcttgggaccatgcccacttgtaatgagttttataccagtttacattgtcattggctttttcatggaattgccagttaccatttgcattggcaatagtgctagttgtaatttgaccattcatgtattgctggatgcgttccatggtatcttcatcaaaaatggcttttcctcctccgttaatactaccttcattaaaatagttagcaaattggtaggaattcattaaatccggcaaatggttaggaccggcataacgggcatttccggaataagagacgctagcttttcctgctttaccttttttggtagtaatcaaaataacaccgaatgccgcacgtgaaccataaatagagctagcggctgcatctttcaatacggagatagactctacatcatctggattcaagttgttcatgttaccttctataccgtcaatcaggactaaggtagcagctttagaacctgtagaaattgtacctgtaccacggatgttcacatccatagtttgtcctaattgtcctcctaagcctccaacagataaatttaaaccgggaatagtaccttgtaatgattggcctaagttggtaacagggcgggaatctagtattttggtatctactgtggctacagcttctgtcagattagcttttctttgtgtaccgaaaccgactacaacgacctcatctaaagtttgtgtgtcttcagacatttgaatgttatacgagaattgattttcatttactttaatttcttgtgtggtgtatccaataaaagagataaccaacacatttccttttgaaacttgtaatgtaaaatttccgtcaagatctgtcactgttccataggttgttcctttgacaatgacactggcaccaataataggttctttgagctttttatccgtaactacaccggtgatgttgaattgctgggcgtacaggaatgtacagttacaaagcaatatcaaaaatagaatcaagttttttttcatgcttttctgtttttaattagacattaggttaatgtattgcaaatgtatgttaatcaatgaaatcgttttgtacatgttcatttcattcagtatgcacgtttaatgcatctctatattttttggtgaatctttgttgttatctcttttttattttattcctttgctacaagtaatgaattaaatatgaaccttaaaatcttatcactgcttataattgaagtatgtatattgctgccggatgtgtgttatgcttttttttcaaaagatgtgcatctgctcaatatgcaaaacggattggccgataataccgtatctgctgtttataaggataaagaaggtttcgtttggtttggaacccgaaacgggttgagtcgttatgacggcaggcggattacaaacttcgaaataagtagtagttatcctagtatctcaaacttgaaggaagcttttgatggggtgctggcatttgtggataatggtgtattttctgcatttgatttgaaaaaagaacgctttttgtctgtggtttcttcttcgggacagggcattccatctcgagggatgttgcagaagaatgattcgttggtttgggtgatttccggaagtgagttacatttaatgaagcggtgcgcatcaaaagaaggtgaacttcggctccgggttgaagaaaaatatacaggctgggataatcaggataatcttttggttgccataacttattcttcggataaaaaaagtatctgcctgattgatgaaaaaggtagaattatcttgctggatgcgacaaacctgagtttctttcgggtgattgacttgggtcgtaccggtagtctgtctgtaaattctgttttgtatgatgatggccggatatggatttctacaattgctcatggggttatttattataatgaacggactgggaaaatcaagcagctgacttatcatgtggctccggtatccgacaaactttctcatacagatgttttcggtgttatcaaattgaatgagaatagatatttggccgtaacgtggaatggatatacagtgatgacaatagataaaaataatcaggacgggatattgacagaaatttatagtaacacttcttctttgatgcaccgcaatcttgaaacgaggatgattgcggcttattacgattcacatggtattctgtggattggtacggatggtggaggagtaatctggtcggatttgcgtatgcagttttataatcgtttttatcaggacaggcataatgagatttgttctattgtagcggatgacgatcattatctttggttggcaacataccataaaggaattatgcgaagccgaacagcgtttggtacttcagaaaaaatagacttctttcaagtgggagatcaaaatgtgaaaaaacaacagacagtgttgtgcagtctgaaagatgagaaaggaaatttatggtttggaaatttagatggttcattgacttgttattataaaaaggaacgctcattcaagatattgcgattgattacggaaaatggtgaccttaacaaatcatcagtttgggccttattccttgatagcaaaggtcatttttggattggtacacataaaggactctggttattcgaccgtgagacgaacaggtgtaagaagatgcattttaaagtatccgggttacagaatttgtctcctctttatattcgtgctatggctgaaactgatgatcatacgctttggctgggcactgctaattatggtatatgtaaagtgataaatgaaaatgaactgcagaccggctatgaaaagaagtacggtatggttgagaattccgtgcgttcattattagcttcgtccgatggtaatctatatgtcggatatatggccggtctggcagttttctctcccggacaggatgcgataactcatgtatatactacccgggatggattgtgcagtaactttattggttgtatgactgaggatgcgcacgggcaaatctggctgggatctaattcaggtatttcccgttatagtcgtcatcaacatttgttttataattattacattgcgggcagtaaccgttctgtcctgcattgggaggatgttctattttgggggaataataagaatcttacttattttaaccccgatgacattaaagcgtttaccacttccgaatctgtcgtgattaccggattggaggtaaataataaacttgtagagataggaagagaggtaaatgggcagaccattctttcacaaagtattttctatacgccttttgtccggttgaatcatgcgaatcgtgactttgcgctgacgttcaataacctttcttattctgaaagccagcagaagtatagttacaggcttcgtccttatcagcctgattggcttgtggccaacggaggggaaaaagtttcgtatgctaaccttcctgccggggaatatgtttttgaggtgaaaaatatttatccggatgaaagagacagtaaaataacctcgttgagagtagagattttgcctcattggagtgaaactttctttttccgcttctgtatgatggtgctgggagggataatagtttatatggttatacagcgtattaaattacggcaaaagaggttggagcacgagttgcgcttggaacatgagatatttgctgctactgtagaacgtgacaaggagaagcagattcggatggaacgcgagaatttctttacgaatgcagctcacgagttgcgtacacctttaactttaatcttatctcccctgcaggaattgttaggaaccgtccgcccttcagacaccgtctatactaaactggctgccatgtatcgcaatggaacctctttgcagacattggtcgatcatttgctttatgtgcagaagattgaagcaggtatgattaaactccgaatttcgaaagtcgatatagtggtattggcaaagcagataaccgattcttttcatgaactggcagaaacagaagggattaactttacggttgaatcgctgaatgagccacttttgctatggatagacgtggaaaaaataagttcggctatccgtaatttattatctaatgcgtttaagtatacatctccgaatggaaaggtgatttttaagatgaaccgtatcgagatagatggatattcattttgcagtataatcatatcggatacaggtaaaggaataccggaagagttacgggggaggatttttgaatcatttattaccggagaaaatacacctttgttttctaataaggtaggcataggcttgcgtattgttaaaaatacgatggatcttcatcatggcacggtgaatttggacagtactctcggaaagggtagcactttcacattattgattcctgagggaaatgcacattttgcagaggaccggtatgagattgttggtactccggagatggaggaatatgctcttccgttaccgataatgcaggcggaagggcaggaagacaagccttcgaataaaaaaacatctcttcttgttattgaggacaatgaggaaatccggcactatgtctgttctttattctgtaaagattatgccgtatatgaggcggcaaacggtgaagaggggggtgatgtggcaatgagtaaaattccggatttgattatttctgatataatgatgcctgtaaaagatgggtttacctgttgccgggaattgcgtgagcagcctcggacagcacatatccctattttgatgctgacggcaaaggctgaggatgcggatgtgttgcaggcttcaaaaataggtgtggatgattatatgatgaaacccttcaatccggaggtattgaaggcaaaagtccggaacctgatactccagcgggaacgcctgaagaggatatatacaaagacgttgatgttgaagcagcaggaaagtgaaccggaaacggatgggaataatgctccggatgattttatacagcaaattattcatgtcatagaagctaatctggcgaatgaaaactttaatgtaaaaatgttggcagaccaattgaatatgagtcagcctaccctttatagaaaaataaagcaacgtagcgaattggctgctattgatatgatccggagtgtacggatgggcaaggctgcctcccttattatggagaacaggtattccattcaggaaatagccgaaatggtaggatatagtgatacacgtacgctccgaaagcattttaccgagcaattcggagtgtctccatccaaatatatggaaaaggaatgaatctgcttcttacccgaagcagattcccatccgtttaccttgtacaatcaggtcatggttttcattgacaagttttaatttaccagccacttcattcagagagatggagccaatttccgcaccttgcagagaaaccattcgtccgaattgtccggaagcgatcagttctgtggcatgtccacccatacgagtagccagattacggtcgtagggagtaggagagccgccacgttggatatatcccaatacagtttcacgggtctcgaatccggtttcatattctatttcttgagctatatattcggcggctttcttgccgtccatggtttggataccctctgcgacaacgacaatagaatagggttttccttttttcaagcgttcaataatggtattacctatgttatgtatgtcataagaaagttcaggaataagaatcacgtcaccgcctcccgccattccggaataaagtgcaatccagccagctttatgtcccattacttcaataaccataacacgttggtgtgaactggctgtagaatgcagccggtcaatggcatcggtagcaatggttacggcagaatcgaatccgaatgaaacgtctgttccccaaacatcattgtctattgttttaggtacagaaacaacgttcacacctgcttgggccagtttggctgcggtcttttgagttccgtttccgccgatacatacgatacagtccagacctaaatcatgaatattctttaacatcaaagctggtttgtcttccgaggctgccgacaggcgtttcttgaatggcttttctctggaagtacctaatattgttcctcccaaatttaacaagcctgataatgatctttctgtcaatggttctacgtcattgtccagcaacccccggaatccgctatgaattccataaacttccataccgtaatgatttatcgctgttttgcaaactcctctaattgtggcgtttattccgggacagtctcctcctgatgtcaatattcctatcttcatagcctttgatgttaagttgtaagtgaccgtaaagataacaaaaaataaaagtaatgtagaaaactataaaaaaaataatgttatcagccattataatatagaaataagctatttttgcaagatataacgaattgtatactaagacaaatgaattctaccagactaattagtacgctattcaagcccagacaaaaagcgacagccttgtatgcaactcaggctgaggcactccaacataaagtattttgccggctgattaatgatgctgccaatacggagtggggattgaaatatggctataaagacataaagagatatcaagacttccagcgtgtacctatacagacttacgaagaaatcaagccatacgtagagcgtatgcgccatggggaaaaagatatcctgtggcgtggagaggtgcagtggtttgctaaatcttcgggaacgaccaatgacaagagcaaatttattcccgtaagcagggatggccttcatgatattcattatgcaggtggtatggatgcagtggcactatatcttcaacaaaatcctgagagtcgtttcttctctggaaaaggcctgattctaggagggagccatgcaccaaactataatgtgaaacggagtcttgtaggagacctttctgctatattgattgaaaatgtgaatccgttggtcaatctgattcgggtgcccgagaagaaaatagcgttgctgagtgattttgaggaaaaagtagaaaggattactcgtgccacaatgaatcaaaatgtaactaacctttcaggagtgccgtcctggatgatggccgtcttgaaacatattttggaggtgaagggaacggataatttggtggaagtatggcctaatttggaagttttctttcatgggggggttgcttttactccttatcgcgaacaatataaacagcttattcgtagtgacaagatgcattatatggaaacatacaatgccagtgaaggttttttcggattacaaaatgacttcagtgatccttccatgttactgatgattgactatggtgtattttatgaattcattccgatggaagatgtcgatactgaaaatcctcatattgttccgttagtagatgtggaattaaataaaaattatgcgatggtcatcagtacttcctgcggattgtggcgttatatgattggtgatactgtgaagtttaccaacaaacacccctataaatttgttataacagggcgtaccaagcactttattaatgcatttggtgaggagttgatggtggataatgcggaaaaagggttagcaaaagcctgtgaggcgaccggtgcacagattgttgattattctgctgctcctgttttcatggatgcatatgccaagtgccgtcatcagtggctgatagaatttgccgttatgccagattctttagagaattttagccaggttcttgacacttctttacaacaaattaactccgattacgaagctaaacgccataaaaacattaccttgcagccgttggaaataatcgtggcaagacctaatctgttccacgattggctgaaagaaaaaggcaaactaggcggacaacacaaagtgccgagattaagcaatacgcgtgattatatagaagaaatgctaagcttgaaccaataagaacatgaattggaaaaaacataaattacctgctttgttgatgctgatgatcgtagtatattcctgtgcaagcatgggaacaccggatggaggtccttatgatgaggaaccgcccaagttcgtcagaagttctcccaagccatacgcaacaaacaacaaggacaagaagatagccattgaatttgatgagtttatcaaactggagaaaacatcagaaaaagtggtggtgtctcctcctcaattggaacaacctgatatcaaggcaagcggcagaagagttttggttaatctcatggattcattgaaacccaatactacctataccattgatttctcggatgctattgtagataataatgagggtaatccactgggtaattattctttttctttttctacaggggagactattgatacattggaagtttccggaactgtgttggcggctgctgacttggaaccagttaaagggatgatggtggggttgcatgttgatttggatgatagtgcttttgccaaaaaaccgttcgatcgtgtttctcgtacagacagtcgtgggcgtttcactattcgtggtatagcacccggcaaatatcatatttttggtttgatggacggtaatcagaattatttatatgactctaagacagagatgattgcttttagcgattctattattgtcccttctatggaagcggccatgcgtcaggatacattgtggaaagatacggttactattgacaccatcaaaacggtgggctatacccgctttttgccggatgatattattctgagagcttttaaagggataaacgaccgtcaatatctgtccaagagcgagcgtgataaagagaatcattttgtattatctttcagtgcgccggctgatacgttacctaccttgaaaggattgaacttcgatgagaaggatgcgtttatcatagaaacgactccacgaaacgactcaatttgttattggattaaggattcgttggtttatcagatggatacgctggaggttcagttggattatttatatacggatacattaaaccagttggttcccaaaaccgatacgatttatctggctaataaattgacaagagagcaacgggaaaaattgcagaaaaaagcaaatgaggaaaaggagaaggaacgtaaaaagagggagaaaaagggagataccatcagggtggaaccgactaaattcttgactatgaatgtcgatgctccgtcggcattcgatatatataggaatatctatctatcttttgaagaaccgatcgcaagtatagacacggcggccattcatatggaagtaaaagtggacagtttgtggcaaccggctcctttcttctttatggcagactcgttgatgccacggcaatatcagatattggcagattggcaaccggagcaggaatatcagttgactattgattctttggcatttacaggaatctatgggctgcatacagataaagtccagcaaacggtgaaggtgaagaaaatggaagaatacgggactattttattgaatataaaaggggctgctcccaatgctattgccgaattattggatgctagtggaaatgtattgcgtcagcaaccggtgacggtggaaggaacggcggacttttatttcttgaatccgagtacgaaatattatatacgtttgtttaacgaccgtaatgataatggagtatgggatacaggagattatgataagaagattcagcccgaagaagttttttatttcccgaaggtatgggagatgaaagccaactttgaatttgaagagaattgggatgtgaatgccattcctgtagacaagcaaaagctggatgaaataaagaaacaaaaaccggaagagactaaaaaggtacaagatagaaataaagaaagagctagaaagctaggccgatgaaaaaaactattctaatattattgtgtggttggtttgctataatggcaactagagcgcaatgtgcggcacaaaacgaagccatccaggcaggcgaagagttggtatacgacttgaagttcaactggaaatttatttgggttgctgccggacaggcaaaaatggacatgcaggctattacctatcaggggaaaccttgttttcgtagtaatctgatctctgtcagtaacaaacaagtcgatttcttttttaagatgcgtgacacattgacttgtattaccagcagtcgtctggaacccgtttattttcgtaaaggggccgaagagggtgaccgctatacggtggatgaagtatggttcagttataaaaacggaaaatgcattgccgatcagcgtcgtatgaggagggaacgggatacggtgaaatcgaaggaccaaagtgatgagtgtatctttgatatgctgagcatattgatgagagcacgttcatttgatgtaagtgactataaagtcggcgataaaatattgtttgatatggctacaggtactaaagtagagcagcaaacattgatttatcgtggccggaagaattttaaggcggagaatggtgtgaaataccgttgtttggttttttccttagtagagtataaaaaaggaaaagaaaaagaggtaataaccttttatgtaactgatgataaaaaccatttaccggtgcgtttggatttatatttgaattttggttcggcaaaagcatttctgagagagataaaggggaatcgtcatcctctaacttccattatagaaaagtagcggtttgtcttgacatagtaaaaccgccgggttttggcagatgccggatcggcggttgtagtgttgtatattcattatgaatgatattttattcatcgaacagtttggcctgtctggaaataagtttcaaggtctttccttcatttaatgcagtaagaatagtttcaccccctttgttcactttacataaagagattttcggtcccatgatttcggtaatccgtatttcaccgattttggtttctatattatgttcttccagtatgccatcttccactacgtcaaagcgtaatccttctttgataggatcatcatatcccaggttgatataaatggtttttgccttgtctcttttggtagatactactttcagtattgaaccgtatactttgaagtgattttcaacaaaaagtcccatttcgtatggcacattgattaatgaattctctaaagcgctatattgggtggcatctttaccggatgctgagcctgtttcttcataattgcgtgtgctgatagttactccgtcacttgtccgtattaaatcaagacgcagggtgaatttctctttataactgttctcacggctgtggtaacgtctgtgggagcttccgtcatcggttgcttctctttgtatcaggtttccttttaacaggtactctgctctgaagcggcgtgcatcttccagcggactcagactgagatcactgccagccgaaacggcgtccactacattgatacggttggtgttacggataccgtcgataaatgcgagacgaatcaggttgatcgccctattgggtattttgatttcactgtcgaagtcatctacataaatcgtatatttttgtccggatgctcctagggatattaccgtcaaaatcattaataataggatattacgtttcatagtcatatgaatttgcagggtttgtaatgtagttcctttacgaaaatacacagtttgctgttcatttgcaaatgaacagagttaaaaatagatttcaggctttgattatttgttgttggtctttatttttcatgtttaatcacttcgtattgaaatataatgattatcttggcacataaaattcaagggtagtgtaaatatggggaagattcaagaaaatgatgcaaggttgcagcagcttgtatcaatggcgcgcataggatggtgggaggtggattttgatgaaggagtctactattgttctgagtttgtagccgatttgttaggaatagaagggaataagatttctgctaaagatttcgctaatctgatttgtgagaattatcgggaacgtattttggaggaatttcgctctttccggatgatggagatttatgagcaggtttttccgatacattccaaatatgggatgatgtgggttagtactaaggtcggtgagaagcgtattaccaaagaaggtcatgtccgcgtcatgggtatgttgcaatgtatttcccggcaacggatgaatatgcaggagcagacagtagaccggttgaattctttattatctcgtttgaacggtatttccaagtcattgcttgattttttacattctgatgatattaccttggttatcaataagattttaaaagaggtattgcgccaatttcaagcagatcgtacttatattcttgaatttgacaggaaattgcatacggaagtctgtacctatgaaatagcagtggagggtataaaagaacgcaaggttttattatcggaatcttctattgattatgcctcttggtggacaggacagatattggctggtaatcctatcattctttttacattaaatttgcttcctgattcagccggggcggataagcgtagattagaggaatatggagtgaaatctactatggtggtgcctttgaactcaaaagacggagtgtgggggtatataggggtggatatggtgcgtgagcatcggaactggtgtaatgaggattatcaatggtttgtgtctttgggtaatattatcagcatttgtatggaattgagacgttctgaatctgaagcccggctggaaaaagcttatttgcagaatatttataaaaatcttcctgctggtatcgagttgtatgataaggatgggtttatgacagatttgaatgagaaggagatggaaatcttcggtctccggcataaggaggatgtgataggattgaatttatttgataatcctttgctgccgcaggggctgaaagataagttgaaagcaggagcacctattgatatgtcgtttaattatgatttcgaccgtttggatggctattattctacttctcgtaccggtactattagtttaatctcgaaattcgctccactttatgatgctttgggtaatctgataaatatattgttgattaatattgataatacggaaacaacaaatgcatacagcaaaatacaggactttgaggagtttttcacgttgataggtaactatgccaaagtaggatatgcccattttaatgccttgaaatgtgatggctatgctgtgaatagctggtatcggaatataggtgagaaagaaggaactccattgaatgagattatcaaagtgcattctcattttcatccggatgaccgcaggatgatgcttcgcttctttgatcaggtattgatacgggaagccagccatttgaggcgtgatgtacgtatattacgtgaagatggcacttatacgtggacaagagtcaatgtaatggtacgcgatttccgtccggaagatgggatcattgatatggtttgtgtcaattatgacataactgaactgaaagaaacggagcggaagttgatagcggcaagggataaagcggaagaactggatcgtttgaaatctgcttttctggctaatatgagtcatgagatccgcactccgctgaatgctatagtgggcttttccagtcttttaacggaaacggaagatatgaaggaccgcaagcagtacatggctattgtgcaggagaatacggagttgcttcttcagcttatttcagatattcttgatttatcgaagatggagtcgggagcttttgaatttgtcaagagtgatacggatgtcaacttgctttgcggtgagattatccgttctttacgcatgaaagtaccggctggtgtggagctggtgtttgaaaaatgcttgcccgaatgtcatgtatgggcagacaagaatcgtttgaatcaagtcatttccaatttcattaataacgctttgaagttcactttttcgggcagcataacgttaggatattataggcagacagatgggtatctgcgattttatgttcgtgatacaggaatgggaatcccaaagaataagataaaaacagtatttgaccgttttgtgaaactgaacagttttgttcatggtacgggacttggcttgtctatttgtaagagtctggtggaacagatgggtggaactatcggtgtggagtcagaagaaggagaaggctcttgtttttggtttacttatccttatcaggatatagttggtagtattctgccaccgtaggggcttgactaaaaaggtttattagctgtaggagtgaattgagctcatccggatacattgattttgtggcatcgggtgggaacatttcatccctacagtgaaccgggattatatgttagtccagtttcttcatggcgctgtgtacggaacctgcccaataattgcgtagtccgaaaccgcgtgctttgccgttagtcggtgcgctatacagtatctcacgggttttcgtgttgaagaacacaatttgataggttgctcttgcatctgccttgtttaaaagcatggcaaccattatcaatcctgttttttcttcttgagagagaataggaagtgtcttgatgacttcttctatctgtttttcatccagggtgtatccgctgttggtcgtcatgatctcatcgggattgatggtcttgttggcatcgtttactgcctctaatgaggtcacttctacattgacacccaatcttttgccaatatcatacttcttcggctcagtgatgaaaagcttgttgatgtcatcaaaagtatatttgaactgcatggggccttcttttgctccgtacactttggcacgggtaaagtctatgccataaaatgtcacagaagagatatctttcaatgcgtctttgttttgtccgaagcaagccatgctgcttacaaggaataataaaacgagtaactgtttcatattagttcttttttaagtgttgttttgttgctgccaaaggtagaaaaatattatcttaaatcaataaatttaactatttttcgactcatgggcggcatttgtattttcgcgatatactctgccgattcaaaattgatactcggagccacccgtactttggaacggaacaaatccttgatttctttagcaaaagcttcactgcggttttcacttccgatgcggatcagtatttcatccgttcccagttcattggtataaacttctacaatgtaattcttgatatgggggatgttatccagaatatcgaataaagcgggtgggtaaagggtcgtacctttatattttatcatttgtcctttgcgccccagtatggagctgagacggatagtgttacgtccacaggcgcaaggttcggtataatggtaacagatatctccggtcttgaaacggagcagcggcattcctcttactcccaaagtcgtgatggtcacttcgcctgcttccccttcttttacaggctggttgttatcatccagaaactctacgataatcagttccggctggaggtggccaccgtgaaattcattacattcggtaaacgaggattgcatttcggtagatgcgtaggtggagtaaagttgcagggaatcccatttctcgtgtatccgtttacccagtgtgttcagggtgaaatcgggattgcggagtgcttcgcctatgcatacgcatttctgcatggagcagtgatggtaatcaatatgattcttttcagcaaattcaatgagtttgatgaggaaagaaggaactaccatgccacacgtgggatggatgcgccggatagtgtcccattgcagttctggaatgccatttcccacgcgggctactcccatgcccagctcacgggctcccatatagtaggcgaggcctgccatgaaacgtctgtcgatggtggtcatcagctgtagtatatcttgtctgctgcatccggtggtggtgaaggacagatattcgttgtaggccagccggtcaaggtcctcggaagttaatacgaaagtgacggggtcgcccaaggttcccgaagtggtgacatagtcaataatttcatcgcggctcacgcagataaaatcttcattatgaagttgcaggtccgtcttggttgtgacaggtatctgttgcaagctttctatggtttttatctgttgtatatcgatatgatgtgcttggaacagacgttggtagaatcgtgaatgattctgcaaataaagcagttcctcagccagccggctttcctgataggctttgatttcctcaggggagcggaattgtatttccgggttctttttcatcttagttgtttattttatgttctatacgttctgattcacttcgcttggggataggaagcaagagggctttcttccaattgcgcagggctttgtcctgctgtccagtggcatggtaataatctcccagtaactcgtacacataaaagaaatgagggttggcatgttggaaggcatgcagtgtttgttcgtccagccgttctttctttttaatctgtttccgtagtacaggagccaatcttttgtaagccatcagttgttggtattcctgttgttgcaggaaggagtccgcaggcagggtcaggtctccggtatagatttcatggttgaaatcgatggaatcactgaaaatcctgttcaggtcgtatgccacgtacttaccgcattgccagggagaggtggatacccacatcagctttttctccggttggaaaataacggaatgatgagcgataaattgattgatagccatctcattggcaagtcccagttccgctcctcccactcctttccggttgcggaggatagaggcggctttcgaagcatctatggggatgtttgctttcagcagctcctgcaaacgggcaaagcggtagggactgtccgaagtttctatgttttcccggttgcgtttgtcatggctgaatgtttccgactgataatggttggtacagataatctgttgtccgtttcccgtgaaaagagctattttctccggtgatttctctataatcgccgctttgccatcttgagccgaaccgactagtatggactccgagacaaatgttttccgtttccgagcgatagcgtatgcttcctcaatggtagaagcatattgcaatatttccctggtcagaatggaaataggggtggcggatgcggcaggcagatccgatttggcggcattgatggtgacagtcagccccgtttcattcatgccggaaaggacaccggtcattccggcccatcccacggatgcgaaacgatatccgttttcgggctggtaaaatgaaacgagtttgttatgtgcaaagtcatcgcccatgtagaaatcgaaattacggccgatgataagggaggagtcagcgctgttttcaccccaacaggcaaaggaactgcatcctaccagcatatagtcctgcatggcatgtcccaaatcgtgggcggagtggtaattcaactgacgctcgtaaggagtgccgataaaatcatattcgtgggtacaggagagtgagatgccataaatttcatcccgaaactcttccggcacattctttcccagattccggttgaaaaggacaatgaagaagcggaggaatttaagataactttcagagggaactatctcttttatctggtccacaaatactttttcttgaaaataaagcaaatcggaagtcagcttgcctatggcttcgcccctttcgtaggcaggtccgcttactttcagctcccaaagtccgctctcactgtgccgcaggtagtttccgccatactgccggaggctgtctttccgtatcacacgatccgtttcaggggtagacgcaaattgcggagtcatcatatcggcagatagatagagataactcatgcctatcatgatcgtcgctatcagaatcaacagggctatccccccgtactttattgttttcttccaaatcttatgcattgcctactttttttgctaaatattcctgacctacaaattccgaacaagtgagcatggctgtcagcgtcacgcccaaggcaccgtgtacattcagattctgccctgtgaggaacagattcttcagtttggtgcgtgtagacacaaaactgatttgcggatattggtaattcttgacaatgccgtatgccgaaccatctatggttccggtatagtcccgatagctcaacggagtcgtagtatgaaccttttcaatgcaatgactccagtgaaacccgaaccggctcaggaactgcaagatctgttccgtctttttttctttaaactggcggtatgcctctccacggtgctcgggagttgtatccgtccatgtgctgacctcatccatatacatgggagtcagtatggaaaccacatctgtgaatctgctgtttccgtggggtacttgcatggaaatcatacaactggggatatttcctttgtgtgcctctttgtcataccatacatcctcattgccgtgcaggtatatattatagttttgataagggcaactgtcttttttcatcatcagattgagcgtgaatatcccgtagctgttttccaatgatttgatgcgagacacaaaagccggtttgatggaatggttcttatccagcagggataaggtgagttgcggatgcaggttggatatgacgtaggtactttccagtacctcttcatggttcacttctactccttgtatggcttcatccttgacaaggatacgggtcacttctttccggttcagtaccgtgccgccgttggcacgtatgatatggattaattccagactgacttgcatacttccttccgtgaaacgataggcgctctccatataagagttgttaatcatggcgtgctcataaaaggtagatttatttttgatcccgccataaagcagggaggttgcggcaagtacattctgtaaatccctgttcgtggtaacggatgctatcatcccggctgctgaggtggcaaagaaatccatgccttcttgggacaggcggccttttctcaggtgatctatgctgatcaggtttcccaccgaccggatggatgccacatactttttcaagttcccccgttcatgagggaatgagcaacacagggtttccataaaacgttcatatcccatggcataatcatagatagcgtctttataataaatccggtcgaacacttcttcatccatccgtttgatggataacttgtccatgattccgaaataacggaaatactggttcataatttgcccttcatccagactaccgatatagtgaatgccggtatccatccggtgcccaccgcgttggtaagtttggaaacagccgccaaacaattcgtttttctccagcacacagacgtggtagccctctttgcttaagatggctccgcattccagaccgcccagtccgctgcctatgatgatgatatcgtacttactcatgctccggtttgtttttctggaagatataaattgtattcgaagtatatctgtcgttaggtaaaatttccagctgcatcccacatgcttgtgcgatactacttatttgctcttcggatgtgaaacacagttgttctgtcgttttgttaaagttgaaaatgccggtagacagcagttcggtgaaacgggtcagacggtgttttcctgtattggcggcattgccgtcccgcacaatcagcttccctcccggacgcaaccgttccacgcatctgagtaataaagttcgctgatgctcataactcatataatgaagcatgtcattcagtatgaatacgtcactttccggtaaaggatattccaatgcgtcggcgcatacaaattgcaggtggggagtgcggagccaaccctgttgcgccactgctattttgtcctcatcataatcaatccctgtaatctcccgttcctcggaaagctgggaaagcatatagcaaagcggtccgaatccgcaaccgatatctgtaatctgtcctttgacaggaaccagttggttgaatagcctgtagttatcttccattttcaccttgatgcgtatgtaccattcctccaccggtcctttatagatatagttctgtaccagattttcgtagaagacgggattgtccgttgtgctttgttcccgacagatacgggcatattcttttttcatccgcgcggagatgcttttggtacgttcctgataagtggttccgtacgtagcatcgttggctgggatacgcggtagaatctctgtcagcatgatgcctttccgtacattgaacggctgtgctttcgctatgattttacagttgccgtaaaggatgaccggaataatatccagttgcagtttttccgacagatagaatgctcctttatggaaacgcttcatccttccatcgtaggtacgtgtcccttcggggaagatggcgatggaatatccttccttcaccttttggcgcatccgttccacgtaaagctcataaccgtctcctacgtaatagaaatcggcataacggataatggctccgaagaaaggagaatgccatacccagtgattggtaaccatgaccagtttgggagtcagtgccagcaataccagtatgtcgatgaaagactgatgattggctatcaggatggcaggctttttaaacgtttctcccgtccggtttatcttttctttatgtacaaatgtggctatatggatcaggcctttgcaggtgacatgtatcagttggcaaagtacttgtttcttataggctttgcggataggaagcaaggtcatgacagctatcagcaagcgtaggaacaggcatccgataaagaacagcaggaacaagcagccggttcttgccagtcctgtcaatgtataaggaggcaaccctttggaagcaggggctgtgatgaagaatcggaaaaggatgggttgcagtgtgtaggccaccagtacgacggcaatcattcccaaaatggagatgagggaaatggactgtaatgccggatggcgtgcgaagaccaatgtgcccatacctatcacggtggtgaaagcggagaagaagatggctgtcttgtgcgagttcagcaactgccgtcctgtgcggtatttattctgcaatccgtccataatgaaaatgctgaaatcatccccgattccaaaaataaaagtggacagaatgatgttgatgatattgaactcaatacccagtatgcccattaatcccacaatgataatccagctgaccagcatcggtaggaaactcatcagagtcagttctatgcgcccgtaggaaatccatagggcaaagaaaatcaggaaagaagagatataaagaatcagataaaaatcctgattgacggcagatacccattggttggcgaaataaccacggtcaaagataaccaccttctctttttgttggaaaagggggtacaccgcttccttgtcggcctcgttcatccgtacctgagtaatcagcatggtcagggaatcagcggaagtctgccattcgttcagaagctgggtcgtgatttcattttggtagtccaaaggctggaacggacggtcgagccattggaaaaacggctcgaatgcatgttcacgaaaatgataacgggcagcctctgtccggatggttttgcgtagccaggctttcttttccggagtccagtagttgtgccattgtttcaaccgtgcttcctgcacctcttccggtatcagaaactgtccggcagaggcataatcttttatttttccctcttctttcaattgggagagcagccggtttgtttcggcgtattgtcccgtggcatctcccatatctttgcctgtactgacaaagagaacggtcttttcttgcttgtcaaagagttcggtcagcttgttttccgcttgtttcaagtgggcaggctcatagttcagactcatcatatcctcgttgaaacgcacgttctgcgaagtgaagatacatactaaggtcagaataaggatgaaacctaccagtcctttgttcttttcgtatggataagcgttcagtttctcgataaagcgtagcaccgccccttgttttacatgcgcctgccctttcaggaaatgcggcagatagaccaggcaaaacagcgtggttcctatcaaggcaagcgaggcgaacagaccgaaatcctgtaataggttggaactggtaaagaggaggccgaaaaaggcgccgatggtagtaaaactgcctacggtaagcggataggcgatttctctgattaattgttgcaccgatgatacatgattctgatgcgccagcatgtgtatggagtagcttaaggcaatgcccattacggcggaacccgcacctacggcaatggctgaaatgccgcctttgataaagtagatgaggcataaggcgaatagagctccgaacagcaccggggtgatgataagcggaatggatttcttatgcttgaataccagagatatgaagacaataatgataatcagtgcgatggaagaagtgacaaacgtatctttctttatctgtcgcgcattgtacactcctacggaaggacctccgaaatattcggcaactaattgggggtgttccttttccgctttttgcagttcatcttcaatcagccggatgagtttgtcatttttgcccgtgcttccggtgttgaataccggagtgatgaacatcagcagggtggagccgtcctgtgagaaaatatgttcattaatcagttcgtaattggattccaactggaagtcttgcaggtgtttcagcgtctggctgcctagccccaacgggtctcgcataaggtagtccttcaaggcgaatcctgccggagatatcaggttggaatagtttttctgcatcagggcggctatgttttcgtcggtaagcaaggtatccagccgttggtactcctcgtcggaaaggaacaagggtagattgtcgtaaacaaaatctccggcactgttgatcaggttttcgtcggctttcgagaagatctctttaatcagggttccttccgcttgttgttgtaaatcctgttttattgtctcggcagcttcaatcaaggaatccgcatccgccatgccgtccttgccggacagcatgattataatcttatcctttatcttcagattttcaaatacgttgatggagttttgggagtccttggtatccggaaagaaactggttacgttttcctcgaatctgacttgggcggcaaaaagggccataaagagaatgcatacgctgagggacaggtaaaacaagactttatgcctttcaaaatagttatataatccaacaaagaatttagtcatatccgttttttctcctacatatggccagcaacgcggtggagattactcccgacagcagactgcaagccattgcaaagataatgcttcctattaaatattgctctaaaactgatttgacattttcaagagaaaggtctccgaggtgcaaatcgggaggattacccagtaccatgcagcctgtccggtaactgccatacagcaataggggaatcatgggtggaatactgatattggcggcgacaagggcaatcactttattcagtctgaacagatgcgcaagaaagagggtgatcagcatctgataaccccataacggaacaatacccataaaaatacccagcatgatggcgagtacaatcttcaggttggattcccgtgtcttcagcacattgtcggtaaagaaccgcttgcagttgctccatgacagtttgcggagcaggttacggggaataatccaaaggcaggtaatcagcaccagcaccgtgttcagcacactgatacgggtaaaatcccggaagggacggaaatgggatacccgttccgcttgcgggggatagtacacatggataggaatgttcttcaccactacatctccccatgcggcgaagacgatggcttccaactcaaattcatatttggcggtgtaccagcagctttgcacatccattttgcggagagggtagagacggtatcccgactgtgtatcttccagtttcagcccggtttccagtctgaaccaaaaattagagaatttattggcgaaggtattcttgcccggcatattgtcggaggccaagtttcgggcgcctaccagcagcgtgtcgggctctttttcaatggcttcgataaaacagggaatatcggaagcgaaatgctgtccgtccgaatctatggtgatggcatagcggaaaccctctttttttgcttgggaaagaccatgcttcaaagcggttccttttcctttattcactggatgggtaatagtgcggatagccggatattgttccagaatgttggctgtatcatccgtagagccgtcattgatgacaatgatatcgtctgcatacctgtatacctcctcaatgactgccgccagtgttttcccattgttgtaggtgggaataacgacgacaatttccagttcctttaatttcttccgccaaaccgatgttgtgtttgtattcatcttgtttttcagtcaaactattcagatacgtttgggatgaatactttcgtatctgaatttatgtggtttctaatgggtgacaaagatagtatattttcggatgcgggcattctggcgttaattatttatttggagatgcatttttaattttaaagcaggtaaacaccaacttgttctcgtcgaattgcggattttccagattgttctcggatatatacagtccttcccttcccacaaaactcattttatagaaatatttctttccggggaatctcgtttctccaatgatttcaaaatccgcgttcagtacaatgacggagaactcctttcctttgggttcgtcataggggctttcgttgggagccagtttgtaaggcatctcagcaaaacggtagtacacattgcggtatttgtcatacatgatatgccaatatttcggtgtttctctgagttttataatggcattgatgccttccatagaatttccgagtttaggtttcatgcttttcagatatctgcttttggcgttataccatcggatgtgtttcaagtcatctgtgaccatcaggctgtcatatccgaaaaatccgcagaccaaacggctttctttgtagttgtaatcataactaaaaccgtatcctcctgcgatattgtcatattcctctttaaagatgggtggatagaaaataggaatccatttaacttctcctgttcgcagatcctgcgaggcgaacatatgtgtctcgggccagtcttttttcttcatgttgggcttgtgggcactcatttccacgaacaggcatgagtctttgacaaaagcaggcgtgttgtaatagctgccaaaatgtaacggagcgaatttgccttcaggagtttggaaatcatagtttcgtatcacttctcccttgtcgtttatggagctgagccggctgatatcattttgtgcgatcaatatgtatttagagtcgggggaaggcctgcttccatatactgccggcaatccgttgggacctgtcttgtgaagaggtattcgtttggctatctgtttgttttcgatatcaaaaatgacgatgtcatataatgattttcgtgtattttcaaagtgaaggtattccttcccgttttcttcaaattgatatatggatatgcttaagtaataggtctgttcgtctaaagggaaggccagctgtttttctgctaccagttctacttcgttctgtctttccgcattgtttttctttgtggactggcaagacatgaaaatcagaacaaaaagtgctgttataaaaagatatgctcgattcatagtattttcgtttttatgatggt

SEQ ID NO: 14454 - DNA, 248 bp, Unknown
  gut microbiota DNA sequence
tttcctccttgtcggtcagggcaactcccaatccgcagttttcgcaccacccgtaataaaaagcttcgtccgtgaagtggtcgaacccttttgtgttggggtttaccattgcctcacacctgacattggccgatccgcatctgctgcacactatattatttcccattgttcttctgctttacgggcgactcacggccgcccttgtcatacaattcggttgttattctcttaatttatctttacccggt

SEQ ID NO: 14455 - DNA, 9124 bp, Unknown
  gut microbiota DNA sequence
atacttaaaagtattcgtaaatccccattcaaatttaggctgataacttcctacaacatcataatcagctgaagttattttcccatcatcatttacatcgacccattttgtatcaccaggtttctgccctgtataaatcgctataccaggcttaggtgtaaccccgtctgcctcaaaatcagcagctcttaaagttctatcaacacgtaacaacatatatgagttgataggatttcctacacgctggatgatggtattaccctgccctgaccgtatatcagaattatcatctcctaaacttgttattttattacgattcaatgaaatgtttaatgaagaattccatctaaaagtgtttgtcgttatatttgcagtatttaattcaaattccagtccccaattatctacatttcccacattatccatcatattagcaaaacctgtgattaaagatactggagctttaagcaacaggtctttagttgtttttttataataatcagcagataaataaattctattattaaaaaggccaaaatcaacacctacattatatgaagtagttgtttcccaccccaacatattattagcaatatttcctactacataaccactatttagagcttgagactctcctaccggataatttaatgtagacatattcgataaaaattgtgccgtaccaatccggtcattaccggcttgtccccaactcaaacgcaatttagtggtacctacccaatctaaatctctcataaaagcttcttcattaatcttccatgcgccagaaactgagggaaaaaagccccaacgattcaacgcaccaaatttagaagaaccatcacgacgtaatgaaatagtcataagataacgatccatcaaagcatattgaatacgcccaaaataagataaaagtgcattttttgtatgttctatctcattattatttgtagtagcgcctttatctttatcaaaaatccaacttttatcattagggaaatttgactgtttttgatatgacttattctgactaaaagtttcctgagaagcaccgatcattgcatcaatactatgaattccccattccttattatatgtaacaagtccctgaaacaataatgaattagaagaaatagtcgcatagcttgagctggaatattcaccgggatgagtagccacatcccattttccattacaccatgtaggagtatatatacgttcattattattacggaaattccatgctaccataccaattacattaagtcctttaataatattaatagttgcattcaatgatgtattaatgcgcgtatcagcattttttctttctgtggcagtagcttgaacataaggacttacattattgggaccaggcccccaagtatcatagtatttataaggatctgcaccagcattgcgtccacttccagccaatacccatccagggaagcttaatgatctagcaaccgcattatctttaccatcaacattggctccttgttgtaccccatacgaaggagcaatagtgagtcctacttttatacggtcagtcatttgagattcaatatttgcacgtaatgtataacgatcaaaagaagaaccatgcacaataccctcctgagaaaagactcctcctgaaatagaataattcaatttttcagtagcccctgaggcatttaattgtatatcataggagggagatgttctaaagagctcatcctgccagtcaatcatttccagttcatccgttccccaccaaggatcataaataccataagtatttcttatatttcccaattctgcacgtgtagtataagttttgccagtaactcgttcagcaaatgctattctatcctcttgacttacattggtagattgtcccgtactattatgccattgacgatcgtaccattttttattgaattgtatccattcatttccatccattacatctacttttctttccaaagaagaaaaagcagcatatgcattcaatgaaattaccggttttcccgtttttccttttttagtcgttaccaaaacaacaccattagagcctcgagagccataaattgcagcagaagcggcatcttttaaaacatctattgattcaatgtcattcggattaatacccgatagactttcaatgggcacaccatcaacaacataaagaggagtgctttctccattaatagaagctgccccacgcacattaatggtaatatcgcttcctggtgctccagaagtgcttcttacagaaacacctgccatttgtccttgtagggcttgttccacacggctgacaggtctgtcctcaataacctcagcacctaccttcgctatagaaccaacaacatttgattttttaaccgttccatatcccactacaaccacttcttccaaagtttcagtatcttccaataatgtaattttaaatacagattgtcctgccactgaaatctcctgacttttataaccaatataagtaacagaaatgattcctttttcaggcacatttgtcaatgtaaaattcccatcaaaatcagtaatgaccccattcgttgtccccttgacaacaatattaactccaataatggattcaccggaagcatcaacaattgtacctgaaaccgttttagtttgagccttaagccccacacttagtactaacaacaacaaaatccagcaaagcctagagttacaaattttccagcttaataacaggctgattcttttaatgtttttcataatgtcgtaattaaattaatattttttctgtcactaataaaataccaaatctatatgcaaacctttttaaattatttttctcttcaatcctaataattatcaatagtgcaaatatacagagttgaaaccaatttatattatccaaatgcgccattatgtaggacaatatcgacttttacctgagataattcaaaaacgaataccaaaacaggtgatttgatatgaaaatatcgatttcccattggattatatatatacttttgcttactttgtacgaaactgaatctttcattctaataccttaaggaatatgacacaatcaatcgaccaattacatttacttatattaaatgtaggactagccattcacaatgcagactggaactggaaaaacgtaagcagcccttttaccagactctattatataatggaaggaactgcccaaataatatttcccgacggaatacaggaactaaaaccacatcatctatatctggtgccatcattcactacccatagttatcagtgcaattctcatttcactcattattatctccatatatatgaagaccatcaatcagaatccggcattctggaagattggaatttcccgatagaaatacctgcggacaacctggaattaccacttattaaaaggttatgtgaaataaatcctaccatgcagcttcctcaatccgacccgacaagctatgacaacaaccccacattaatcagaaacatcattaaaaataaacagcgtaccttctgtgacaaagtcgaatccagaggtatagtatatcaacttattgcccgctttttaaaagacgccaaacctaaagtggaagtcaacgataaccgtatccaaaaagtcttgtcccacatccgaaaaaatatctataaaacagtagatatagactcattggcagcaatctcatgcctctcaaaagatcattttatccgtcttttcaaaaaagaagtcggtaacacaccgctgcaatatattaatcagaaaaaaatagagaaagcccaattaattctgattacagaggatattcctgtaaaaaacatagcttatctccttgcttatgaagaccattcttatttcaaccgcttattcaaaaaaatcacaggcgttactcctcagcaatatagagaactatataaaaagtaaccgtcttattatttttacgcaaaggtttacgtacttttttcaacctcttccaccacatacctaaaggttattcctctatttttgatgccggaaataaatctaaaaataaatagaactatgaattacaatgaaatcgggaaaaccggtatgcgggtttccaatcttagtttcggcgcatcttcattaggaggagtttttcatgatatccgcgaagcagagggtatcaaagctgtttacacagcagtagagaatggaatgaattttattgatgtatctccctactacgggcactacaaggccgaaaccgtattaggcaaagcattgaaagaaatcccacgtgacaaatattatctctctaccaaagtgggacgctatggaaaagatggaatcaacacatgggattattccggaaaacgtgcaacggaaagcgtttatgaaagcttggaaagactccacattgaatatatcgatctgattaatgtacacgatgtagagttttcagacatgaatcaggtagtcaacgaaacattacctgcactggtagaacttaaaaagaaaggtattgtgggacatgtaggtatcacagatttgcaattagaaaacttaaaatgggtcattgatcactcggaaccaggaacagtagaaagcgtacttaacttctgccattattgtctgaatgacgagaaactgactgattatctggattattttgaatcaaagaatatcggcatcatcaatgcctcccccctttcaatgggcttgctctcccaacgtggggttcctgcatggcatccggccccccaatcactggtagaagcctgtcggaaagctgttcaacattgcctgtccaaaaattatcctatagagaaactggctattcaatattctgtcagcaatccacgtatcgccaccactttgttcagttcggccaatccagataatgtattgaaaaatataacatacgctgaagaacccatcgattggaaccttgtaaaggaagtacaagaaattatcggaaaacaaatgcgtgtcagttgggctaattcataatacaaaggagaataatgatggattttaacataatagatgcacattcccatctttggttacggcaaaatacggaagtcaacggattgcctatccgtactttaaccaacggacgttcgttatttatgggagaagaacgtcagatggttccgccctttatgattgacgggcggaatagtgccgaggtttttctctcgaacatggactatgcacaagtatcggctgccgtagtcactcaggaatttattgatggcatccaaaatgaatacctcgcaaaagtggcccataaatacccggaccgtttctttgtatgcggtatgtgcgaatttcgtaaacccggttatctgcaacaggccaaggaattaataagttctggtttcaaagcaataaaaatcccagcacaccgcctttttctaaaagaaggaagagtcatgctgaactgtgacgaaatgatggaaatgttccattacatggaagataaaaacattatcctttccattgatctagccgatggaaacacgcaagtgcaggagatgaaagaaattatccaggaatgtccgcaactaaaaatcgctatcggacatttcggtatggttacaactcctcattggcaggaacaaataaaactggcccggcatacccatgtcatgatagagtcaggaggcattacctggttgttcaacagtgaattctacccgtttgcaggagcggtgaaggctatcaaagaagcagcagatttggtcggtatggacaaactgatgtggggatcggattacccgcggaccattacggccattacttacaagatgtcttacgatttcatccttaaaacgactgaaatgacacaagaagagaaagcactttttttaggtaaaaacgccgaaagattttatggtttcaaaaatctcatatctcttccttacattaaaaacatgtcagaataatcaactgacacttattaatccataccatgaaaaataagacctattatgtaccattgatgctcatattctgcctgtttttcctatgggctatcagcagcaatctactacctactatgataagacagctgatgaaaacctgtgagttaaacgctttcgaagcatcattcacagaaacagcctactggcttgcctatttcatctgtcccattcccatcgctatgttcatgaaaaaatacagctacaaatcgggaattattttcgggttattactggcagcatgtggtgggttactgttcttccccgctgctatgctgaaagaatattgggcatatctatgtatattcttcatcattgccactggaatgtgttttttagaaacagcagccaatccttatgtaaccgctttgggagatccagaaagtgcgccccgtcgattgaatctagcacaatcattcaatgggctgggagcttttatagccgccatgtttctcagcaaactgattctgagtggcaaccactatacccgcaacaccctgcccgcttcttttcccggtggctgggaaggttacattcaaacagaaacagacgccatgaaacttccttatctgctgctagctatgttactcattgttattgccatcatctttatcttctccaaattacctaaaatcaaagaaggaaatacgatggaaggagtagaatataaaggagaaaaattaattgatttcggagtcttaaaacgttctcaccttcgttggggagtcattgcacaattcttctacaatggtggtcagacagccattaacagtttatttctagtctactgttgtacctatgcagaactacctgaaaatacagccaccacctttttcggtctttatatgctggcttttttggcaggaagatggacaggcacactactcatggtaaaattccgtccacaagacatgctcttggtatatgcgctgattaatgtcttgctatgtattgttgtggtttgttttggcggttggacaggtctttatgccatgctgggcatttcttttttcatgtctatcatgtatcccactcagttctcgcttgctttgactaatttaggcagcaacacaaaaagcggctcggcatttctagttatggccatcgttggaaatgcttgcttgccccaactcactgcttatgtgatgcatctgaacgaacacatttattatatagcttatgctattcctatgatttgtttcctgttttgtgcctactatggttggaaaggatacaaagtaattgattaaaaacttataaaaataaacagaagatgaaagcaattcaaattactgctccttccgagatgaaggtagtagacattgagaaacccgctcttaaaccgggagaagttcttgtaaaaattaaatatgtaggcttttgcggctcggacctgaatacatttttaggacgtaatccaatggtaaaactacctgtcattccgggacacgaagtaggagctattattgaagccataggcaaggatgtaccagaatcattaaaaccgggtatgagcgtcacagtcaatccttataccaattgcggaaaatgtgcttcatgccgtaacggcagagtaaatgcctgcgaacataacgaaaccctgggagtacagcgtaatggtgccatgtgtgaatatatcgcactgccttggaacaaaataatcccggcaagccatatttctcctcgtgattgtgcactaatcgaaccaatgagtgtaggtttccatgcagtttcacgagcgcaagttacagacatcgatacagttatgattattggctgcggaatgatcggtatgggtgctattgtacgttcaactcttcgtggagctaccgttattgccgtagatttggacgatgaaaaattggaactagccaaacgggtaggcgctcaccacaccatcaactccatgacagagaatgtacacgaacgcttgacaaagattacagaaggatttggtcctgatgtggtcatcgaagctgtcggcagccctgcaacctatgtcatggcagtcaatgaagttggatttaccggaagggtcgtatgcataggttatgcaaaatcagaggtgtcttttcagactaaatattttgtacagaaagagcttgatatccgaggttctcgtaatgcactacccgcagatttcagggcagttatccgctatatggagcaaggtacttgtccaaaggatgaattaatcagcaaagtagccaaacccgaaaccgcactacaagctatggaagagtgggcgaaagcccccggaaaagtattccgtatattagttgaatttgactaataaccagcacccagatacaaagaatgtgctcaaagtgaattaaataatcatattctactttcagcacattctttcgttggttaaaccctacttgattggataatatcaattaatatcggacgaagtccgctaacgaaacattccacagctattaccatcaaaataagtcccatcaaacgcatcattacattatttccagtttcgccaagaatagaaaccaaccgggtagacgcccgcaatataagataagtgataaaataaatcaaaccaatcatcccaatcaatacccccttcatagtccaagtattggcatcatccattaacattattccgttagctatagcaccgggaccgcaaagcataggaatagataatggggtaattgaaatatcattggcatacgttttaatttcttcgtctttcaacttagtattagtaaaacgtgcctgtaacatatcatatccaatcttcaaaataataaaaccggcagcaatacgaaagccattggtcgatattccaaaaaatttgaataaaaattgcccggagaaagtaaaagccagaagtgtaataaaggaaatgatagtagcgcgtttcacaatatgacgccgttcttcatcatccattcctttagtcatagtcaaaaatacaggcatggttcccaacgggttggttaatgtgaaaaaagaggtaaagcatagtaatgcaaatggtaataatgtatccattgacgtattatttttaggttatgggcaaaagtaatccataattgggagatgagcaatagtagaggtcatatttcacacgtggatacaaaaaaagcctccggaacttcttcaagtccggaggcttcaatcaaaaacggcagctacctactctcccact

SEQ ID NO: 14456 - DNA, 37858 bp, Unknown
  gut microbiota DNA sequence
gttacgggctgtagctattttttcttcttggcgacctaccatgataccttcctcacgtccttctacacgaccttcctccaatccttctaatttagcggtactcaatacatcattttgtatcatcaatgcatccagatgccgatcataagccagtttatcagccttattcatattataataaataagtttctgtctcgcctcctccaatccgggagtcgttgtatccggacggatagttccagtcttaagatattctatccattcttccaaaggagtaaccgccactttattaaactcattcacacgaataagaaaatattcaggaaatatttcggcaggcaatttgcggataatagccccttgttctttagtggttactttcaaacagtcaccagtatggacaccgaggaatgtattctgaccatggtagaggtaatcatttccttggccaatatcaaaataaagaatactgatagaatacactttcttgacatttgcataaattccacctaaatctatatgttcggttattgcttttgccactccataaagtattcgttcaagataatataactcccgcgtattctgcacttccactagtattatttcatccttgctattacgggctttaatatctacccggttgaacttatcatcctcccgttgctggttaccttcgctctcaaggatttccatgatttgaatcttctcacccaaaagtacggtaagaaaaccttctaggacaccaaaattggctttgttgcgtaaaagacgcttgattgcccaatcaaaccgtatgtatttatctttctgttccataaaaacctctttttacaaagataacccttttgtttgaaaaccaggatgaaacattagcaaaaaatataccggaaagcaataaagcattcccggtatatcacaagttaattatattagactcacaattaattcttagaaacgagcaccgacagtcaaaagcaactgatgccgttcattgtccactttagttgccggaagatctatatcatcaaaagcataaaagtttgatttatacatatcatatttatatgccaaatccgcataaattacactgccacggtatccaagaccaaacgtaaatgtattcttagactccgtattattaaaatcagtacgcgtgctatataaagacaaggcactataagcatctttagaaaaagcagccgaagagtaattatatcctgcacgaatgctaaactcaggtataatcctcgtttccattccgatacggaaagtatggacacctttcaaataattctcaacgctgggctgatctcccaattcataaccatccacatccttgagcttactggaagaataatcctgatattcatattccgcacctactgccactgcacccgcaaaagtagtacctgcgctgatattaaatttccacggagtggtaagattataatcataggtcaaataatcatattccggagttaccaaaaaatcactcaatgtctggttatagggtgcctcacaagctaaaatattagaagataaagcggcattatagctttctcttaaatcataccatgtaggcgtgtgcacagcaaatcccaaacggaaaggggaactttctataggccgtataataacacccaattttaaatccataccagtcccttccagcctataataattatccaatgtataccccccattatccgcaccgttatcatcattcaaattttccgtataagaagtataacgatcataattcacatcatagacccccagggtagctcctaaatagaccctatcttcaatattgaatgaaacattaaaatcatattgactgatacctcctgtttccttactaaagaagttattgttaaaaccattccacccccatggagcatgaatattcttttcagaatcattaacccagtcaaccacaccggttctcacccccattactcctaaaacaggtaactgattccaatatttggtataaggattcttcacatccagtatgtcattaaactcgctttccgtcaatccatatcgttccatctcctgagccagctggaagctttgtgacaaattatccaacgcccctcccatagagaaaaggcgattgaagtttttacttttatggtaattgaatccgaaattcacaaaacgcaaagaagtattattgcctatcttattgctataaacaaatccaatctggtcaaatgaagcgcgcgttttgttttcattcattgacacaccactaaagttactctttgtcgaagtattattaaaaccaaaagaaatagacacgtcattactacgaaaaatgccgatacccgcagggttggagcttatgacagatatatcaccgcccaaagctcccatggcaccacccataccaacaaatcgtgctgttccattcaagtcattccccagcaacttttccgcatcataagcattttgtgcgcttgccgttgtcattgccaacaacgcacaagcggttactattactttatttttcatacatcaattctattaaattcaactgtctagtttaatctaccacttatctggtacgcgatctgccgccaccacttgaacgggaaacaccgccaccggaactgcgagaagcaccaccgccactagaaaaactactacgggaagaagaagttccactactacggtaagagttagacgaactattacgagaaggactactgctacgagagtatgaactgctacgagaattcgaaacgccactattgttacgataagcgccacgacttgcagcccctgttctctgataagcagatcctgctgcatttcccacactgctccgagtactgcttggtctggtataggaagaaccccttccttctgtcggacgtgaatacgaattacccggacgaactcctgctgcctgacttggtgaaagagtttctccggtacgggttctgatagcacttctattaggacgaaccgaatttacactgttagatcccgaaaccactcttcctgatgaagaaccgttacgtgttgcggtacgataactattagcactattacggacattttgtctggaatttcctacgtatgaattacgactattcctatcataactattcacgtaattattccggcttgggcgtgaagaactatagctattggtatatcttccggcatgtatccccgggttacgtctgcttgagccataccatccatgactacctccccagtagccaccaccccaaccgtgaccgaagtaatgcggataataatggtgatggtgataatggtagccccaatagccaccccagtagccgccaccccaataaccgggatagtaccaactattgtagtaccatggcgaactccatccccaactgaatccccaactggcgccatatggataattccaacgccaatcccaccataagcggttcgtgtaagtgggaaagacgtatgcatacaatccgtcatcatatacattccaatcccatgaaggcaaaccgtaaactacatcccaatagagcggactgcttaccggaatggcgtaacggggattacggaaacggacgatacgcatcgcgtattcataatcgtcttgagaaccctcaaaaccattaacccattctcctctctcattcaaaggtttctcctcaatatacaaggtatcattctccatcgagaaattattatcacgtgaagtataacgacgattatactcatccacatcgcgaacctttcctttcacatccttcaccaccactgtagaaccgggggctgcgtaaacagtagtcgtgttctgcttctgcggaaccaccactttcacctcttgcttaacctcctctttcttttcagcttttttcttagggatgaaataaaggtcgtcatcaacgctttgtgacattgcccaataaggcaagcacaccatcataagcgaagttaatacaatctttttcatactcgtacctgttttatttgttattctatctactttttctagtgcaaagatagccagaggtttcagttcataacaaagaaaatccctattagttggtagggatttccctattttagtaacggacttcaactattttatctatttctgcacacacggaaaacagaagaacgtccgttcacatacgttgatggtaaacaaatctggtggtaaaacaactttttataataagttgcacccacttataccctcatgccctcactaaaagccataacctactcattattaaaccactacccacagtgagggcatgttaaaaagtgagagcattgccctcatgccctcactcctaatttcttgcttctctcactttaaatcattcattcacaacataatacccatttatcggcttataaaccggttgtttgggaagtcccacatttttcagctttccttcctcgcacaagcggcgtaaatggcggctggccgtgctttgtgtcataccgcaaagaagctggaaacttttccgctgcacaaaatcacaggttgtgaagtactccgtcagcaatgcgtcaatctcctcatcggtcagtttactggaatgaaacgagaaccgggtacgctgcacctttacctttcccacctcatccatcaatagttgatcgggacggtaaacaatccccttgagcctcaccttcgtattcttacgtttcgtcttttccgttaccggcccggtactcaccaggttgggacggaagaaaccgatgccgtccagatgcacctgtttgccttccgccaactcctcgcccatggcacgtgacagcgcatcgagcacggctaccacatccgtttcagtcaacgtacaatgtttctgaatacgggcacggagctgggccgtgctcacctttccgttcagccggagacgcgggtgcaacgtattctcttccccttgttgctcaggggatttgggattctcgtaccaatcaaatagtattgccatactgttcttcttttattaatgaactttcaatatctgttaatcacggacgtgattaagtttaactacctttgtggttaactttaatcacccttgtgactagacttaatcacaagggtggctaactaattataaacatacaaaaataagaaaagaaaaggtagaaaacaaataaggaacagggaaatacgcactgagactaagaataaaaacacaggaaagaaaggaaaaagaaaaaggcggcatttaatccggaaagcacttgcagaatccggaaagaaaccttacctttactaaaaatatgcacacatagacactcgccaaacgcggtcttctccacacgacagaacatcatctttttccatgggaggtacataaagccaaaaaacatttaaacgaaagacaaatatgaaaattacactcatcaggaaagatgaagaacaggggacagaagccttgtcactatgcgattcgaacacattcttcgagaaaataaagacagagaacaaagcaggacacatatcggaactgcgtgaaatactgccccggctgacaggatcgtccgcccactacgcccatatcgacaaactgccgcgtgtctatcctgctgtagaatatacccgtaagcaaaatggcgagaaacgcatgaaacattacaacggactagtgcagctggaagtgaaccggctggccgacctgtatgaggtggaatatgtgaaacgccaagtagcacaactgccacagacctttgccgctttctgcggttcaagcggacggagcgtaaagatatgggtacgcttcgcacgccccgacggcactctgcccaccatacaggaggctctcctgtttcatgctcacgcctatcggctggcggtgacctgctaccagcccatgcttcctttcggcatcacactgaaggaaccggacctgatgcaaagctgccgcatgaccgtggatgaacaaccttactataacccttcgtccgtccccttctgcatagagcaaccgcttgccctgcccgatgaagagtctttccgccaacgcaaacaaaacagcgaaaccgcactggaacgaatgacgcccggatgtgaaagtttacagactttgacactgatgtaccaatcggcacgaaaaagagcattggccgaaatggaaaactggaaacgtgatgacggactggaacccttgctgccccatctggtagaacaatgcttcaaagcaggcatccccgaagaagaagccgtgcggcgtacactaatgcactatttccacgaaacgaacacggaagccatccgcatggctttcggcaacggatatcgggagatgaaaggctttggcgagaaaggtggcctcaacaaagagcaggaagccaccttccggctggaggagtttttgaaacgacggtacgaattccgtttcaacaccgtactggacgaggtggaataccgccagcgggactctgttcatttctatttcaaacccttggaaaaacgtacccgaaacagcatcgccctttacgccttgaaagagggactgcaagtgtgggaccgcgatatcgaccgctttctcacttccgatttcgtccctctttacaatcccgtagaagaatacttgtgtgaccttccccgatgggacggtactgaccgcatccgcgcattggcccggctcgttccctgtggcaatccgcattgggaagaactcttttaccgttggtttctgggcatggtggcgcattggagggggatggaccgtcagcatggcaacagtacttcgcctttgctggtgggttcacaaggattccggaaatccacttactgccgcatcctgctaccgcccgaactgcgtttcggctatgccgacagcctggacttcagcagcaaacaggaagcggagcgtgccttgggacgatttttccttatcaacctggacgaattcgaccagattacgatgaaccagcaaggttttctgaaacatctgttacaaaaaccggtggccaacctgcgaaagccctatggaaccagcgtacgcgaattacgccgctatgcctcattcatcggcaccagcaatcagaaggatttgctcaccgaccccacgggaagccgtcgctttatctgtatcgaggtgaccgctcccattgatacccatgtcaccatagactaccgccagctctatgcacaagccatgacattgctttatcagcaggaacgttactggctgaatgatgaagatgaggctgttttgcggcaaagcaacagcgaatttgagcaaatttcgcctttggagcatttattccattgtaacttttcttctgcaaccactgatgaagagggagaatggctgactgccatggagattttcaattatctccaagaaaacacacgtgataagctatccgtcaataaaataaattggttcggacgtattctacataaactgaatgtacccaaaagagccagtatcagaggtactttataccacgtggtcaagttggaataatttatttttcaagaaatgagtatgaggtcaatgccctcatactcatttatgttaccatcatcaatagcacactcattataagcgaattataccactaatgagagtatgagagcattattgagagtaacttcctgttgatatcctaccggaatgaagaaaataaatagatgctgaacgggtataaagagagaagcaattaataccgattctgctcttattctcattttttctccctatctttgccactaccctttttaagagtatataaacctaaaataaacagccacatgaaaccagtgaaattattttatcaggaaagatgcccgttctgcaaaaaagcactgcgctatattgaagaactaaaagaagaacaccctgaattccaacctatagaaatagaaatgatagaagaaaaccaacatcctgatatagccgaccaatacgactattattacgttcccacgttttatgtggacggtgtgaaagtacatgaagcgggtattttcaaaaatgagatggaggcactgctccgtaaagtgatagaataaacgaaagcgtatgaaatatttagaagtaacctttacaacacatccctgtaatgaaacagtgaatgatgtagtatctgcactggccggagaaataggatttgaaagttttgtagaatgtgaagcaggagtacaggcttatatccagcagactttgttcgatgaggaagcattaaaagaaatgattgcgagcttccccctgcccgacactactgtgacatataccattaaagaagccgaagacaagaactggaacgaggaatgggagaagaacttctttcaacccatcgtcatcggtgaccgttgctgcattcacagcacgttccataaagacaccccgaagactgagtatgaaattctgattaacccgcaaatggctttcggcacagggcaccatgaaacgaccagctctataatcagcgagatgttagaagctgatctgaaaggaaaatcagtcttggatatgggatgcggcacttctattcttgccatccttgcctccatgcgcggagccaatcctgtgacagccatcgacattgacgactggtgcgtcaataattcaaaagacaacattgcactgaaccatatccataacattacagtggaactgggggatgccaacttgttgaaaggtcgcaagccgtttgatgtaattattgccaatatcaaccggaatattcttctggcagacctgcctcattatgccgcctgtatgcatccgggttcagaaatatttatgagtggattttatatgcaggatattccttttatccgcgaaaaagcggaaagtctgggaatggagttcgtacaccatcgggaaaagaacaactgggcagctgtgaagttcatcatgaaataataccatttttaagtatgaaaaggacttgataaagacaggattaccaccaatcacacaggatttacattgatttattcgaggacaaaagaacggattttctctcttttgtccttttgttcttcttacctgaaaattagaaccggaatcaagtggtgacaaacgcacgtaggacgctgcattttatccaaagtgacaacacgatcatatcggtatacaatatttatacaatctcctttccgaaaggagtaagtgccaagcccgccagcttgaaatgttgcagtccgaatggaataccgataacagtgatgcaaagcaacaccccgaatgccaaatgagagaggctgatccagattccacctacaagtatccagatgatattcatcaacacactgagacatccgccatcaccgggacaactgcgtatttcccgcccaaaagggcaaagagccagcatagacaacttcaaagtttggaaaccgaaaggaatgccgacgatagtgatcatcagcaacaggctggaaacaatatattccacgcagatcagaaatccgccgcaaatcagccaaataatattgagcagtaagttcataaagcaaatataaagaaagttttcgaaaccgcaggcacagtatcctttatttctttatagtcattagttgcaattcctccaacgaaccgttgaaaatattcaagtccaccttctcacgaatgcccggcaacgtacccacatccgtatgctgccagaatttccattctcccctgtattccaccgagtctacataataatgggctatccagtaaggataagaattgaagaccgaatcattcagataacgagttttaaacttataagaagtataaagaataggcttcactttgtagtgctgttctattttgtcaagccacagtttaaggtcacgacggagctgattttcgtccttgcctctcttctcgatatcgagtacgggaggaaggtcacctgaatccagctttacggaattaataaagaaatcggcctgacggatgggatctgttttcggattgtaaaaatgataagccccacggataaacccatgtgttttcgccgaatcaaaattggtgataaaagccttgtccccataatctcctccttccgaagctttcataaagacaaaatgaataggaaatttcccctgtcgggtctgagtcagcattttccagtctatgtttccttgataatgggaaacatcaatgccatgcacctgaaaacccgagggcatacatacaccgtatgctttaaagccatagcaaggcttccagcggtaagagtaaggacggataaagaaataaaagaaagcggcaaggaataaaaaagcaataagcccagcaatgacataccgaagccatgacggcatctctctttgcggtttctttttcgccttccgctgtgtagcccggcggacaggtttcgcggctgccttctttttaacgggagcaggacgtgtgcttttctctcttaccattttatcctatttagctgtttttacctttacctattcccacatactatgtaataaaacccatcgggagaatggttttacaatcagccccgatgggtttcctttatgctttatagaaataagaaagaattattttccttgttccaactgcaatgtcttggttgcctggtcacaaacttctgtaggaccgaagtactggataggacccggatatacatagtctgtttcaatagcccaacgttcacgctgtgcggcaaacgccttgaaaggagcaccatccaattttaccaacgctttctggataaccggtttcatttcaccgtgacgacgttccatgttcatcatcattgtgataggcacaccacctgcaatccattcttcggcaggagcagtagtgttacgtacagaagacatatagccggtcttaccgttggcaatcaacatagaagcggtgtaacccaacgagtagcaatagtcagcatcgaagtttgacggagcagcgcaacgtccttcgtaaccgaagaagtgatgctgagcggcaaatttacctacatacttgccttcttccttccactgagccaatttaacggctaccatatcagacaacagcttttctgtttcaatcaatgatacctgtacgtttccgtgcggatcacggtccaaagtaagctgacgtgcaacgccttcgggcagagaagcatagatttccgagttttccttagaaagcttggagatgatatattcacgttggtgagatttcttgatcaatgcgaactctgatgcgttagcagccaggaagtcattcaattcagcgatcaatctcttcattgcgggaatgaattcgatcaaaccttcaggtatcaacactgtaccgaagttattaccttgtgcagcgcggttagccactacctgagcaatgtaagtaaccacatcatccaatgacatgttcttctcttctacttcttctgaaacgatacatacgttaggttgaacctgcaaagcacattccaaagcgatatgagaagccgaacgtcccatcagcttgataaagtgccagtatttgcgggcagagttacagtcacgctgaatgtttccgattacttcagagtaagttttacaagccgtatcaaaaccgaaagaagtttcaatcatctcgttcttcaagtcaccgtcgatagtcttcggacaaccgattacctgaacaccgcagttcttcgcagcatagtattctgccaatacacaagcgttcgtgtttgagtcgtcaccaccgatgattaccaatgccttgatgcctaattccttgatgatttccagacctttatcaaattgttcttccttttccagtttggtacgtcccgaaccgatgatatcgaaaccaccggtattacggtattcgtcgataatatcggaagtcagttccatataattatggtctaccaaaccaccggggcccagaatgaaaccatacagtttgctgtctttgttcaatgacttgacaccgtcgaacaaaccggaaataacattgtgtccgccgggagcctgtccaccagacaaaatgacacctacattgatagcaggcatattgacagcttcgccttcaacgaactgaatcaacggcataccgtaagtgttagggaacaaagccttgatggcttcctggtcagcaacagactgtgtaggttcgccttcctttacttttacagcgcctttcaacgctttaggaagtttgggctgataagcagctctggcaatttgtaatgcacttttagtcatattctattattctatttaaaggtgtataatttcatttagtattctcgtgcaaatttcgctcttttttcgcaaatatgaaaacgtatacaaataaaaatgctacctttaccgcgaatttagaattatgtattaacttaaaacattacatttatggcaagtagaagaaatttaaagaagaaaataaccaatatagcaagtgatttgtttttagtcagtttgatggaaggtgttaaccgtgaagtggtttgcaactctgtacacaatgtgatcaaactgattacacgcatcagccacaccgagccgggtaacgtaaaaggattctacaagaaattgaacgaagatctgaacaaagaaatcaaagtggttgcagacgaactggctaaagctacaaaagcataagatttaaggaatgaaaaaagctatttgtagttttatctactacaaactgttgggatggaagaccaaggtgtctgctcccgattatgataaatatattatctgtgccgccccacataccaccaattgggacttattcataggcaaactgtttatgggagctataggccgcgaaactggttttatgatgaaaaaggactggttcttctggcctctaggccctattttccgctggatgggagggattcccgtagaccgtagccgcaagacttcattggtggaccagatgatcaagattgccaaatcgagtcaaaaattccatctggctatcactccggaagggacacgcaaagccaatcccaactggaaaaaaggattctattatattgcacaaggggccggtctgcctattattctggtagccatcgattacgcaaaaaagtgcattacagccgaaaaggtgatacatcccagcggtgatttggacaaggatatgcgtgagatcaagttgtattacaagaatttcaaaggcaaatatcctgaaaatttcagcatcgggaaagtagaataatccccgtctgttataattctttttaaataagggaacactgattatacggattaaaacaaaatccgcataatcagtgtcattgtatctattctcttaccacgctctcatccccatcctcaaaattattcttctctatcttcacattccgggtgtgaagcaagcggaaacgagtcttattatgatggaaagccggataatctgtattctggcggatcacattgtttttaaagaccaatccgtcaatggattttgcaaaaagaacggggcggtcaaaggtttcaaaatagttgtcttcaatcaccactcctttttctccttttccaccatggaaatatttcttctgatgctccaaatcgggaatctccggataaatagagataacagcttccgtaaattggaacatattagtcaatgcattgataaaacgattgttacgaatcagcacgttccggcaagctcccgtttcaaaccaaccattgcaatcaccacaaagcagaatagccgtccccgaagtatggtcaaacaggttacgctctactaccgttttcaaaggagtgctgaataaagtaccccgtgcgcgattattacgaatgacattatccgcaaaatacacttccggacaccaagacaggttttcaataccaaagccttctttatccgtaatctccgcatccaaaggttccgtaaaaataatgcggtattctttcgcacctttcaccgtatctttatcgttaggcaggatttctttcacccggttttttccaccggccagttccatggtgacggaacgtacaaattgcacctcatctccgttcactccccactcgaacccgtatgcttgcggatgcatgtattgagcaatcactgtatggtcatcaaggcgttgcttgattttcaaataagtgccgtgtacattaatcgcatcatccatcattccttcatacagcccgttgcgggaatcaatcttgcctctgcaactggagaaatgagtagcatccgcctgcgtggtaaaataacgaggatccttatcgccacgaagacaaacgctgaattcatccaacgtgatattttcacataactgagccaataatcccatgccttctgcataatgcactttcacattctgcaaacaagtatttttgtcaccggacaaaaatatacccggagcaggacgataataagtacgaagtgcaaccactgtccccggtatcaaccgggcgtctttccactgaggagcatggtagacacgtggagaaacttctttcaccccttccataggacaccataagtcactagtgcggtataccagacgctttgtcttttcttcaaaagcaatccctccctggggagcactggaccagccttcgccgtatgattcaaagaagcctttctcattgatgcgacatttcacccatgcggcaggttcaaaagtaattccttcctctccacttttcaacaccttgacctgagtaatgtggggagtttcaaaatctatgctgaaattacgtaaagtacaatcctctgaacgaagcagagaaagtggaagcatacggccatgaaagataaaatcggcaccttgtccgtccacggtcagccccttccaatcctccagaggaaaacctaccgttttcggattatcctggtcatggttggaaatataatactcacggacagccgccccttcagggtggaaatcgtaacgtccggattcaaaaagcagggtgaccttatcgccggaagcgacttgagtcttgatgtcttgtaacgccttctgcaatttagctgaaagattctcgtgtgtgtccggtaccagaccataatttcgcatttcgactactttacttccggcaaaagcggaaacagcgagccatacgaagcagaaattaaagataattcgtttcatttaggttcattataggttagttagaatgacaaaactaacaaaaattcctaacttcgcaaccataaataaagaagaaaacaacatgaaaaagatatttttgtccttcctgctggtgatggtaggaatatcgcacactttggcacaagggttagacgctaatgtggaacaacgtctaaaagatttcttcacccaatatgaaacatcttacgccaacataggcaagtgcaagttagaccgttatgaagtcaatcataaccaaaagaaactggacgtatatgccagttccagcttcggctaccaaccgttcacacccgaaaacacggaagccatctaccggttactcaaacaaagcttacccggccctgtaaattattacgatataaccatttatgccgatggaaaatccatcgaagacctggttcccaactatctgagaaagaaacaggacaaaagccgcttatggcaacggacagattataaaggtaatccatgggtaaaaaataattcccgcccctttactgccagcaaaggattggaaggcagacacatcgccctttggcaaagccacggaaaatattataagaatgacaaaggatgttgggaatggcaacgtccacgcttgttctgtaccacagaggatttgttcacccaatcattcgtcataccttatattatacccatgctggaaaatgcaggagccatagtgtatactccccgtgaacgtgactggcagcgcaatgaagtgattgtggataatgacattcatccccaaggttgcatctatcaggagataaaaagccggaaaggtaaatggaaaaccgcccccaccccggcattcgctcaaaaacggttgatttacagggacggacaaaatccttttgaagaaggtacagcccgctttgcctccaccgagaaaaaaccggaaaaagcctttgcacaatggattccccgtattcccgaaacaggaaaatatgccgtctatgtgacttatcagactttacccggaagtgtgagtgacgccaaatatctggttttccataaagggggtgtcactgaatttctagtcaatcaacaaatagggggaggcacctgggtttacctgggcactttcgagtttgataaagggaccaacgattacggcatggtggtattaagtaatgagagtagacaaaaaggagtggtatgcgccgatgctgtccgttttggcggaggaatgggaaacatattgcgcggtggaaaaaccagcggcctgccccgctacctggaaggggcacgctacgccgcacaatggtcgggctttccctatccggtttacagtcccagtgaaagtaagaatgactataccgacgatataaacgcccgcagccggataatcaattatctcagcggaaattctgtgtacaatccaaaggagaagggattgggcgttccttttgaaatgaccttgggagtgcacagcgatgcaggtttttccaaagaagatgatttagtaggcacgctgggtatttataccaccgattataataacggtgaactgaatgccggcatctcccgttatgcttcccgtgatttggcagatatggtcttgaccggcctgcaacgggatatctccgcccaattcggtatccggtggcaacgtcgcagcctgtggaaccgcaattacagcgaaactcgtctgcctgccgttccctcgatgattctggaactcctctcccatcagaactttgccgatttgaaactaggacacgatccgcgtttcaagtttaccgtagggcgttctgtttacaaatccgtactaaaatatctgagtaccatgcatggaacggattatgtagtccaacctttaccggtaagtaattttgccattcatcccggaagcagaaaaaacaccttccgactaacttggcaagcggtagacgacccattggaaccgactgcccaagcacaacaatacatcgtctacacccgcctgggacatggtggatttgataatggaacgttagtacgcggtactgaatatatcttcgaagccgaaccgggactggtatatagttttaaagttaccgcagtcaacaagggtggagaaagttttccttccgaaatcctgtcagcctatcaggcaaagaaaagcaaaggaacaatcttgatagtcaatggattcgaccgtctgagcggacctgctaccgtagaatctcctttcttgcaaggctttgatttgaatacggatccggggataccttatataaatacgcccgccttctgcggaacacaacaaagcttcaaccgtagccgcatagggtgggaaaccaaagacgggctggggtatagcgacagcgagctggaaggaaggttgatagccggaaatactttcgactatccgttcattcatggtaaagctatccaggcaaccggagggtactcttttgtgtcgtgtagtgatgaagccgttgaaaatggttttgtccggctggcagattaccccattgcagacctgatattcggagccgacagacgtcccttctccaacaccctacagcagctgatcacctcctactgccaaaaaggcggcaacctgatactcagcggttcatatataggaagtaacatgaacagtcccacagcactgaacttcaccgaaaacatattgaaatatagtttcggaggcagtatgctcaactccacttcgggagaaatatacggagccggcacccgtttcaatatcccccgtaccatcaatgaacaaacctatgccgtacccgctcccgactgtctgactccggtggctccggcttattctgctttcgtttacaatccgggaaattacagtgccggcattgcctacaaaggtacttatcgtaccttcgttctaggcttcccttttgaaagcattcaaggagtgaaggaaagagcacgggtaatgagtgctattctgggcttcttcggcagcaagtgatatttttaaacgaaaataaaagaacaaataagaggttatttcataaaaacgcctaactttgtccgtataaaccattaaaattaaacgactatgtacactatacagactaacgcctctggcacacgtagcatggaaatctcagaagagaacctgcaaactattgagaaatatgctttatttcagcatctaatagatagcaacggtatcgtggacgagtcggtactggacaaactgaagctgaatatccgctcactgataaccagtgaggaaggaaataataaagaattgctcgacctttgcattgatgtaatttatcataataatatgaaagctttcggacttcatcaacttattctgctttatatccaatgggagaaggagaaaaataaggatgaagaagagatataactaacttatctctgtagcaaaataaaaaacaatacatatcattgaaagaatacaaacttacagactggttgccgacaaccaagaaagaagtggaaatgcgtgggtggaaagaactggacgttatcttgttcagcggtgacgcctatgtagatcatccttcattcggtccggcagtgattggaagattattagaggcacaaggcttaaaagtagctattgtgcctcaacctaactggcgtgacgacctgcgcgactttaagaagctgggacgtccacgcctctttttcggtgtgtccgccggatgcatggacagcatggtaaacaaatacactgccaacaagcgtttgcgcagcgaggatgcttatactcccgacggccgccacgacatgcgtcccgaataccccagcatcgtttatacacagattttaaaaaaaatctatcccgatgtacctgtcattttgggaggtatagaggcatctttgcgtcgtgtcagtcattacgactattggcaagactgtctgcgtaaatcaatcctgatagattcaggagccgatttattgatctatggaatgggcgagaagccgattacggaactttgcaagagaatgaagacattggcggacgccgtcggacagccccatgaatctgctcctgcagaaagtcttccggttccacatgatattttgcaaacagcctacataacccgtaagggcgaacccatgcgcccgtctgatgacactcaggaaaagcccgatatcgtgcttcattctcatgaaacatgcctgaaagataaaaagaaacaagccgaaaacttccgcttcattgaagaggaaagcaataaatacgaagcctcccgcatcttgcaagatgtaggtaacaaaacggtagtagtcaatccgccttatcctccaatgacacaaggagagctggatcgttcttttgatttgccgtatacgcgtatgcctcatcccaagtataagggaaaacgtatcccggcgtttgatatgattaaattctcagttaatctgcaccgtggttgttttggaggatgtgccttctgtaccatttccgcccatcagggaaaattcattgtaagccgaagcaaggaaagtatcttgaaagaggtgaaagccataacagaaatgccagacttcaaaggctatctgagcgacttgggagggcctagcgccaacatgtacgctatgcgcggtaaagaagaaaaaatatgccgccgctgcaaacgcccgtcatgtatccatcccaaagtatgtcccaatttgaacacggatcaccgtcctttattggatatttaccattcggtagacgcacttcccggtatcaagaaaagctttatcggaagcggtgtacgctatgacctgttacaatatcagagtaaggatccggcagtaaaccgcagtacggctgaatatacccgcgaactgatagccaatcatgtcagcgggcgtttgaaagtggctccggaacacaccagcgacccagtgctgcaaatcatgaggaaaccttcgttttcgcaattttatgacttcaaaaagactttcgacaaaataaataaggaattgaatatgcgacagcagattataccttattttataagcagccatccaggatgtacggaagaagatatggcagaactggcagtgatcaccaagaaattggatttccatctggaacaggtgcaggatttcacccctaccccaatgactgtagctactgaagcctggtacacaggttatcatccatatacgttacaaccggttttctctgccaaatcacaaaaagagaaactggctcaacggatgttctttttttggtataaacccgaagaacggcgtgccatcatcaacgaattgcgcaaaataggacgcgctgatttgatagacaagctgtatggcaaataaaagggtaatgtatcaaattcaccacagatcatgtgcaatctgtggtgaaaccgttttttaaagtcttatttatctttcatcgtgttttaatgaaacacagaaacaggtctatgtgttccaaggtacagatattgatatttattttcccctaaacttaattagaaaagtaccgcaaatattaattgataaaaatattgcctatcctattgaatatcatttattttttctatctttgggcaaaaccaacttttaaatcaatactgcgtatggaaacgtatctcttctggattgtgcccattgcctccctcttggcattggcactcgcatggtatttctacaaacaaatgatgcttgaaagcgaaggaactccgacaatggaaaaaatcgcttcttatgtgcgccagggcgccatgtcctatctgaaacaacaatacaaggtggtagggctggtatttctgggattagttattctcttttctatcatggcatacggcttcaacttacaaaatccgtgggtgcccattgcttttcttaccggcggtttcttctcgggactttccggttttttgggaatgaaaacggctacctatgcttcagcacgtaccgccaatgcagcccagcactctctgaacaaaggactgcgcgtggctttccgtagcggagctgttatgggattggttgttgttgggttgggactgctcgatatttccttctggtatatattattggattattgtattccgccagataccttgaatccttccgccaaattatgtgtcatcaccactaccatgcttacttttgggatgggagccagcacgcaagcgcttttcgcccgtgtaggaggtggaatctataccaaggcagccgatgtgggtgctgacctggtaggtaaagtggaagccggaattccggaagacgatccccgtaatcctgctaccattgccgataatgtgggtgacaatgtaggtgacgtagccggaatgggcgccgacctctacgagtcttattgcggttctatcctggctaccgccgctttgggcgcagccgccttcattggttcggatgatactgtaatgcagtttaaagcggtcattgcgcctatgctgattgcagctgtaggtattttactctccatcatcggtattttcgctgtccgtaccaaagaagatgcaggaatgaaagagctactcggttcattagctacaggaaccaacttaagttctgtgctgattgttgttgccactttccttatcctttgggccttgggactggaaaactgggtaaacatctcttttgctgtggtagtgggattaatagtagggatcgttatcggtcgctctaccgaatactatacttctcaatcttataaacctacacaacgattggccgaaagtggaaagacaggtccggctaccgttatcatttccggtatcggactaggtatggtttccaccactatcccggtactggcagtagtagtaggcatcatcttatcctattggcttgcttccgggtttgatttcgccaatatttccatggggctttacggtattggtattgctgccgtaggtatgctctcaacattgggaattaccctggctaccgatgcttacggaccaattgcagacaatgccggcggtaatgccgaaatgagcggattaggtaaagaagtacgcaggcgcactgacgcactcgactcgttgggtaacacaactgctgccaccggcaaaggttttgctatcggctctgccgctctgaccggattggctctgttagcatcctatgtagaagaaatccgtatcggattaacccggttggggcagaccattctggaattaccaaacggcattaccgtagatgttcataacgccagtttcactgactacatgctttattacgatgtaaccctgatgaaccctaaagtgctaagcggcatgtttttgggcagtatgatggcattcctgttctgcggtctgaccatgaatgcagtgggtcgtgcagcagcccacatggtagaggaagtacgccgccagttccgtgaaataaaaggaattctgactggagaagccgaacccgactatgcccgttgtgtacaaatctccaccaaaggagcacaacgtgaaatggtattcccgtctctattggctatcatcgctccggttgccacaggattagtgtttggagttcccggagtcatcggtctgctgattggtggattgtcctccggtttcgtgcttgccattttcatggccaatgcaggaggcgcatgggataacgccaagaaatatgtagaagaaggcaatttcggcggtaaaggaagtgaagttcacaaagcaacggttaccggtgacacggtaggtgacccgtttaaagatacatccggtcccagtttgaacattttgattaaactgatgagtatggttgccattgtaatggccggactgacagttgcttggagtttgttctaatagaaaagcagaaagccgcttcagaggaggcggctttctaactttaaaaaagattctgataaactattttttatacttatccggatttccattactacaaaatgaatgaatatgtcaaagaaatcacaaactatttttagtcaaaacattacaattgagtttgttcaagatttccatgcatcgctccacattagacggacggataaccacatgtgccgtatctccctgagcaaaagcatacatatattcaataaagatattctctgctgccagatagtccaaaactttagccaaagaaccagccacattcgggcaactgatacataccacatcggttagcatcacggcaaaattctcggcacgaagtacttccaccgctttttccacatccgatacaatcaaacgaagaataccaaaatcagtagattccgccatgctgaacgcatgcatattgatatcatactttgccaatgtcttggttacgtcatttatccttccggtcttgttttccagaaaaacagataattgcttaattgtcatattgcgtactttttcattttaaaattcggttgtctatcacacgtttactcttgccttcactacgggcaatactgttaggctccatcagcttcacttcagcactgatagaaagaacgctcttcaatttgtcactcagcgccttcttcatagccagcatacgtcccatatcgtccgagaagaagtctttgcggacttccacttgtacctgcaaagagtcaagattattcttcctatccaccaccagcatatactgaggttcaaactgcggcatatccagaataacactttccacctgagacgggaatacattgatgccacggataataagcatatcgtcactacggcctacaatacccgacatacgaatattggttcttccacacggacattcaccctccatcagggaagtcaagtccttcgtacgatagcgcaataacggcataccttccttggtcagagtagtaaacaccaattctcccacttctccattcggaagacgttccagcgtttcagggttaatgatttcaggataaaaatgatcctcattgatatgcgaaccatgttgttcctggcattcataggaaacaccagggcccataatttcactcaatccataaatattgtagcctttcaagcccagccgctcttctatttccttacgcatactctccgtccatggctcggctccaaaggctcctatacggaggccgatatctttcttggtaagccccatacgttccaccacttctgctaaataaagagcataagaaggagtacaagcaataccggttatacccaagtcacgaatcagacgaacatgcttttccgtatttccggtagaagccgggataacagtcgcccccagattctccacaccataatgtgcacccagcccaccagtgaataatccataaccataactgacagaaaaagtatcattacgagtaaccccataggccgaaagacaacgcgacattacttcggaccatacggacaagtcacgacgtgtatatcccacaatggtaggattcccggttgtgcccgaagaagcgtgtacacgtacaatttccgaagcaggagcagcctgaagtccataaggataattatcacgtaaatcctgtttggtagtaaaaggaagttttacaatgtcttcaatagtctgaatatcatccggagataaatccatctcctgcatcttgttacgataaaaagggacattatgataaaccaggttcaccaacttgttcaggcgttttccctgcagagcgctcatttcgtcccggctcatgcactctttatttttgttccaaatcataataaataatttttcaatgtgctaattagccaatgtactggtgcacaaacacaccatatgacaatcggcacattatcctattagcacattattttcaatgatcttcatgaaaagctctcatgcgttcttccatcaccggataaagttcctcacgcattctggaagtacaggcgcggacaccttcctgctcgctaccggtagtagaaagcgagatgctgcttaccccataatacaataactcccggagcaattcaccccctgtcatatttccgtaacctatggtaaagaagaaaccatctcccaccacctgggtagcatcataatcatatacgatatggaaaccattgtcggtaaatattttcttcatgcgttccgcacgacgggcatattcgcgggtatcttccacaaaattgattttaccttcggtggacagacgaagcatttcagcgtatgcatactgagtggaagccgtacatcccgaagtaatcatataaagaatggaagcaatcagcgtaggaccgaatacccctgcatctttataccgttctgctaatgcagggaactggcggtcgaacagtttgtcgctgatacatgccaatgccatacgctgtccggcataactgaatatcttggaagaagaaagcatcagaatataattatccgtatatcttgccacagtgggcggataaggcggttcgaaaggatgccccatatcccgacggaagtccatgcagaaataagccagatcttccatgacaatcacatcataccgggttgccagttcaccgattatctgcagttcctcctcttccagacaaatccatgccggattattcggattagaatagataatcgctgctatatcgcctttactcaggaaactttccaatttctcacgcaaggcctgtccacgataatgatagatatcaaactcttcccactccacgccgataatgcgaagctgggatttctgaatgggaaatccgggatcaatgaacaataccttgtctttccccggaatacgctgcgtacaggctatgaacgagccgaatgaacccgccaccgacccggtggtaggcacacaagcgcgcggagagatttccagattcaagaaagcttttacaaaacgggaagcctcctttttcaactcgggcactcctgcagcagccggatattgcgatccgactcccctgtccaaagcggctttctccgcttcaatcccgatctgattggctgcaaggccgggagatccctgatccatacggataaaaggaatccccgtttccttttccagatactgggctaccagcagcacatcaccgatagtagcctgtgcaagattggcgatgtgcagttccttcaccgccttctccactaattcttcactaaatatcttcatggcattaccagttctttaccgcattcaagcctatatcaaaagccttctgattcatttcaacaatcttctcaccttttgtggcaaacacacgccctatgctttcacgcaactgttccggtgatacgatctcaatatacttcgcagccatgcccagcagaatcacattcgcgcatttaggcatactgttttcttttgccatatcctctatttccaacttcaccacatgcggaagactttccaaagttctcatcagatccacttcttcaggatagtcgggaatgttcttgaaaggattagcagaagtaatcacccaaccttcttcctgcaagtaaggcagataacgcaacgcctccatcggttccatggaaataatcagatccgcctcaccctgagcgatcagatccgaataaatcgtttcgtcggatagacgcagattggactgtacatctcctccgcgctggctcataccgtgtacctcagcctgcttcaaattgatgccttctgccgtagcagcttctcctataatagtagcgatagtcaggataccctgtcctcctacgcccgaaagtatgatatcttttctcatgccttatctgcttttttctgtcttagtttacgattcaatgtctggatacattctctgcgcggaataatgacagacacccctttatattctatttcctcacgaatggtacgggtgatttcttccatattctttggtaatggaaccaccacacgcacatgttcgggttctacccctaatcccaggcagatcgcctcgaatttgttcgtaccggcagagtcctgtccaccggtcatggcagtagtcaggttatccgaaatcaccacagtgatattggcatggtcattgaccgcatccagcagaccggtcataccggaatgagtgaatgtagagtcaccgataaccgcaatggccggaaatactcccgcatcggaagcacctttggccatggttatggaagcacccatatccacacaactgtcaatagcacgaaacgggggcaacgcacctaatgtatagcaaccgatatcaccgaaaatgcgtgcatccggatattccgcagccaccttgttcaatgcatcatacacatcccgatgaccacatccctgacacaatgcaggcggacgcggcatcaccacctgaggtttaccaaacggacgtttgattccccatccgattgcctcgcccacattatccggagtcaattcaccggtacgcggcaaagtttcggtcaggcgtccctttatctcatagtctgaggaaagaatcgcttttacctgctcttccacaaacggctggccatcttccactaccaaaacatatccgcaacggtctgccatcgtcctgatttcgtcagccggcaacggatactgcgaaactttcaataccggaatatggcaaccatccgtatctgcctctttcacataattataaccgataccgcaagctatcactccgaactcataatcatattcgggattcaacccttccagataattataaggagatttggaggaagcttcttccagtttttcctgctttttcactaaatccagatattgtttacgcgcattacccggcagcaatacccagtgggcacgttcatgatcaggattcaactgattttcctcacggatatcggctacttccacaccggcacgcgaatgtgccagacgggtaaccacacgcatcagcaccggcaacttcagtttttccgatagtgtatatgcgtaatccatcatatcgtatgcttcttgttgggaagacggttccagcatgggaatcatagcaaattttccataaaagcgtgaatcctgttcgttctgtgacgaatgcatggaaggatcatcggcagccagcaccaccagcccaccgttcacgccggttatggcagaattgacaaacgcatcggcagccacattcatacctacatgtttcatacataccaaagcacgctttcccgcgtatgacatacccaatgcagcctccatggccgttttttcattggtacaccaagtgctgtgcagttttctttcctttgctaaaggattattctggataaactccgtgatttcagtggacggtgtacccggataggcatatacacccgatatgccggcatgtatcgctccgagggcaattgcctcatcgcccaacaataatttcttttcagccattatctattattttgttaattgtttcatatcaatgtaaaggggtctgcatcatccaataccgggaatttcttccggaaagcctgcaatgcctccatatctatatcagccgataccgcgctttccctgctccacggacattcggctatcgtctttccgtagggatcgatgatagcgctgccacccgaatattcacaggcaggatcaactcccatgcggttcactccggctacataacactgattttcaatagcccgcgcacgaagcagcgcgctccaggcatccacacggggggtaggccagcttgccacataaagtatcatgtcataatcacccaggttacgtgcccaaacagggaagcgaaggtcataacatacttccaacaggatacgtaccccacggaagttcaccaccacacgctccgtaccggcggtgaaacgcttgtgttcgcccccaaaggtaaacaaatgcttcttatcataatgctgcacggctccatccggatggacaaagtaaaaacgattataataatttccattctcacataccgccacactgcctgcaatagcacaattccgctcggctgccttacgcttcatccagtgaagtgtttcgctgtcggcgctctccgcaattccttcgggttgcgtacaaaaaccagtggaaaacatttcgggtaaaacaaacaaatcagaatccggcagacagcttattgcctcgtcggcccttgctacattagcctgtggattggcccattctatatttctctgtagaattgttattttcattgtttttcatattataagacccacaaaggtaacaaatataataagatagcaagcattttattactaactatttcctttcacgcccctttttcttacatgttttcataaatattccctatttattcctcataaaaaaagagtattctcgctataagaatactctttttataatcaaccatgtctaaacaaacaacttggcaagattggcaagaaaacaaaaggaaaggaatctattgacagaaagaaaatagttcgggattcttcatagttttatcgtcttcaccttaccggggataatagtcagtctcaccgttccgtcaccctctatctccaccttctggtatctggcttccactactaccttgccgtccagggccatcagtccccattggtatgcattttcctcaaaggcgcaataaccaccgacgggtggacaaatgttccggtaatggggaggcactacgatacgttcacccaatttcagcccccacttcacccccatccggaaaggctggacatcccttatctcctccagtctccgttgtcttttttcctccgcattccgctgctgccgccgaatgatttcctccgcgcgccgtccggcttcctccttcagcctctgcaccacagaatcaaaatcctcctctccggttttaggtacattacaggttatatatcgcttcttttttcctttttccgcatgataatagttcccactctcgtccatcaccacgatactacggtccgccaggtgaccacaacaccagtacacctcctcgtcatctccttccagcagacaggcaaaaacatcaaagaccgtagaccataccgaatccaccaacttgcagtttttcggaacacgatagtcgggaatcttcaagtagaaaccgtaaaaacaaagactatccttatgcaacccctgcgtagaggcataagccttccgcgtgcgactatggaaggtttcccccaccttcagcaattccacgttgccatagtcctctccaccataagaaaacactaccggcttctcccggtaagtccggcttgttttcaggtcgatgtaagaatcagtaccgtcatcacccgtgacgccaaggagctcccctttcataaacctcaacctccggccgcggtctattattatctccggctttccggagtcatccacaacgctcacccggccatcttccaaacgaactgccgcccggtttccacagatatcgaacacttcccgatactgaggcatcatcgtcattctgtttccacgtttcagcccccacagtccgctacgccggtcatggaaagcttttagaacggaatgtgccctctgttctgcctgtttctcttctaaataaaacgagttccggttcctgataacctccagcaactgtccatgtgtcatcacgatttccaactcttcatcccgcttgtcattctccgaggacggacaggacacgggcagcctgttttctgttcttacccgggacagggcattgcccatcatccgtccctcgaacatcacctcccaatcccggtcacggacgggcagaccgaatatccggtgcaggcccacattgtctatcagcatacaggactccttgtcacctgatttcctcagtcctcgtcccacctgttgcagatattttgccagggaaagtgtgggacgcgccagctgcacgaactccacatcgggacagtcaaaaccctcggaaaagatatccacattgaccagcaccctgattcgtccctgcttgaatccctccaccaattccctccgctccgaagcaggagtcttgctgtcgatagctacggcctccaccccgtgcgcactgtagcaggcggctatctgccgggcatgagctatactgacagcatacacaattcctttttttccgttggcatacttctcgacactctcatacaaccgccggatgctgacctggcggttcagcacctcattcatttccttcacctgataatctccgtccgccccacgtttcttcaatgaatttatcatccgctgctccctgctgtctgcacggatggacacgtaatcgaaagccgacagccaaccttttccaatgaattccgcaatgctccatgaggtaatcagcgtatcaaacaaatcggtgaagcctttaccattcaatcgacagggtgtggcggtcatgcccagtttcctcgcttccggatatctcttccaaagttctttgtaagtctccgccagtgcatgatgcgcctcgtcaatgacgatcagtccgggggattcctccatattcttccagttacgtgacagccactggatggacagcaccttcaccgttccggattcttttcccattccatacctggccacggtttcctctatctgttgcaccagctccctgcggtgcgccactatccagacacaggtaccggaacggtggaggaattccctcaccaccgccgccagcagatgagtctttcctgtgcctgtaggcatttgcaccatgacactctgatgaaactcccactccttaaagagccgggacttcatttcctgctggtagtcacgaagactgttgtttttgcaatacataggcggatgccggtcgccaccgacaacaaaaaaaggaagagggcatgtcaaaactaaaatagtctatcattttgtcatcctaagggaacgctagtgaaggatctgtttgcaatcacttgatgtatacagattcttcgctttggctcaaaatgacaagctaattaatagcactatcggagttttgacacactctcataagtttttttcaactaaaatatcaatagagatgcgttattatgaccttaaacgcaaagaaagagattacagtattatcgtaaatactgttcttctaaccaattatatctaatctatttaactgatatacagttgtcgcatttctcactatacttcttccatccgcatcaaatcccaacccgagaattgcatcacaatcttgtgcatctgcgtgccttggcgcaacgcctccactcttggcgcacgagcatagctgtctatctgctccacagcttgttgccattgctccgcagcctttgcctcgaaatctttcttcggcagatatttcagttccactatgtagctgtgcttggactgatagtgtgtcaggttgggcaacaggaagaaatcacagtagccgtggctcaattccaattcaggggcggtgatgtaataatcgttcaggctcagataagccataaagaagccctggatgctgcgctcgccctcgatggagtcacgcacagaggacaggtttttataagcatcagcgatgtattgcaacgcttcccgccactgaccgtcgaaggacatccgggtgaacagagtcaataaggaagatattcgtattccactgtactcgttatagccttccagcagatattcataatattgtttgcgcacattgttgttcggaatgcacagaatcagctgcgaaccatacgtaccctttatagtcagcataccataatagaacagcagactggggaaaatattaggattggtcaggtctttggcagggaaggactcttccacttcggttatgatctgcccctcttcaacaatacgacggataacacctcggcggtcaccgtccaggcggtccagttgaagcagttttttcagcttgttgtaatcggttttcgtattggggtcaaccatacgctcgggcgaatggccgctatccatgtattggcgaatgtaatagagtaccatatcgcaattgaacacacgggcttcctgcttcaggcactccttggcaaaacaataattgtcataccacggtttcatttccgtcagcatcgcctccacgtaactttcagcaggcagcatacccacttctttatagtaaaggagcatggcacgcacatcctcggtgctgaagcccagcatcttgtcgaacttggggttcatggacaagtgccagccgatattgaagccgctggtcaggtcgtccagtgtcacgggacttacgcctgtcatgaagatacgctcgaacatgcccttgaacttcttgaacacatcgcggtagaagccgctggcatgggtgatggcatggtaaacctcctcgcctttctcgttaagcacgatgttggtaaagttgtcgtattcgtcaatgatgagataaagaggaatgcgcagccttactgcactgttgcgtatcaggtccagtttgtcggccatctgccgggtctcgaagaacgctttcactgtttcctcaggatagtcatcccgataagtgtgcatgaagtcgtccagcatcaaactgcaataatcattaaaacgagccgaaagctgttcaatgtctcctcccacccgtgaaaagtccagataaagcatctgataccgtccccggagcgatgtgggatgttcatgaacccaaagcccaccgaacagggagtcgaaacggtctgtcattgccttgtcatagtaagcttgcagcatactgatgaacaagctcttgccgaaccgacgaggacggatataaaacaggttgtccggctgctgctccagcaaagacaaatacatcgtcttgtctacataatacagattcctttctctcaccgtcacaaagtcggacacaccgtagggcacttgctttatctcttccattgcttcatttcacgtttatacagcaacattgcttgttacaaagttatataaacaattccaatcaggcaaaggttgcggacgaattatcttcagattgcctgttgtagcaagttgaaagttctttttattaaaaccgataatcgcatagcgacagaggaatccggtatttcttcagtttatctatttttactattgtccctattttctttgtcggcaggtaatagcagaacagaggatttccggctgtttgcccataacctatcagtactttatccaccttttgtcttaaagaaacagcagcgtcatccaatcggcattcttcttcgcgcgtttgtggaagccatagacacaacagtttcagttccttaccatccgaagtctgaatgacaagagtttgtttttgttgcaactcacaatgaagcacagcacggttgtggctaataaacttgcaagccataccggcaaatgtttcattatcttgcgctgataaaaaagaaataaaaagaaaagagaacaaaaagaaaagttgaattttatgtaacatattattacgtgtttatttcaggtgtactttgaacacgataccgccagagaagtatttgcagcgattcagttctactatggcattaatgtagtctttccaaaagctgtattccatacctacattcacttgatatttcggaccattgggattgaatgtcaagttctctttcacgtctgtataaccgggaacgacctcagccattaaattgactccattaacagcttttcgtgcccatgagccattttctttcaaatgaaatcggaagttcgcacccatagcaggattattcaatttatcatcgaaacggttactatatatccacgaaatgtgcgcacctaacgtacctatattatcaaaatagacatgtttggttattgccagataataacgattccaaaagccattaccatagtcttgttcctgctgattggataaggaaccgccattcgccgaatcacctatcgcgtcattggcccctatcaccacttgaggtgtccatgatttccaccaaccttccttccacacccgcaggcgaaaatgaaaagaacggtcctggttggtgaacttgccatacgtagacggaacccaatagccggagttattgccataatccgtaggaactgccttatgaccagtacacagatatccggcttccagccagggaaaaatagttatattgatataatagttccatgtatcataccaccaacggggtactgtggcatgatgattcagccagttgccacctgccataaaagtcttgtcacgctgcatgtcggcagtaggaagattcatcaatcctgtcgtgccataatttatttgggccgttactgtttgtactataaacagaaacagactgataaaacaatgttttattaccctcatgcacctcattcttcgaatttgttttttaaccgataccgcttccatttcttcttctcctcatgtcgcattatcatcagcatcaattttacgtccatcaatagaaaataagtgccacccaccatcatcagcagccaccaaccgtattcctgccagacaggcgtctcgtttaccacatagtatactcctgccactcccagccagaacagcagggtaaacaccagcatacgtttccatatcagttttactgcaaaatgataaaggcggaaagaaggaacaatcatatttgggaaatattgcgttgtgaaattaacttgctgatataaagattcatcagtgcccatacggccacatcacagaggaacagcaccgtattgttcaggtagctgaccaaaaacacattggaagcacaaaacaaaaacgaaatgcatagaatggaaatcatcgctttacgcggtgtgaatcccatggcaagaaacttgtgatgaatatgtgtcttatccggcataaaggggtctttaccacgacgtacacggcctaggaccacccttaccacatccaggcagggaactaacaatacactgaaagatatcaatatggcaccttcataattaatacccgcttcatacgtattcatagtgtattgcactgccaggaaacttaatatatagcccaaggtaagacttcctgtatctcccataaagattttccgtcctctatccgcatttccaaatacattataaaaaaagaacggcagcaacactcccacggtagtaaaagccagcaatgcactcatccatctgtcatcaatgacagccagtgtgccaaagacggacaatgccaccatactcagtcccgatgccagaccgtcaatgccgtctatcaggttgatggcattggtaataaaaatcaccagcaccaaggtaagaggaataccgatgaaagcggaaacggcatggataccgaacagcccgtaaaaatcattgatataaagccccgccaacggaaacatgaaggctgcaatcaattgcactataaatttctgacgatagcgaacccctatcaaatcatccgcaattcccacaatatacagcaatgtcaaccctgtacacataaacagtatctgtacccaatgttggcctgtatccactaaggagacccatcctgtcatataacagattcctatcaagaaagttacagtaaacaagatggccgggaaaaaggacactccacccagccgggataccggttttttgtgcaccttccgtgcgtccggagtatcaaacagacgtttacgaagggaaatgattaaaatacggggaatgatgatacgggcaagggctacggctatgaaaaagccacagaagaccacaataaagtttagcataatgtgttagtttaaaatgcctataatgaaatgagtgctcaaataagagcatagctattttgtaaagcactctcaagagtgccttacaaaaaaggagcaataaaattcgtttgggataattgattttcgggattattcagtcatctcccgttatatatatttacaaagaagtggaaatcgttgcagttctttttaatatgccgcattcattatcataatacagcagcaatttttcttactttggcaagtcgctctgcaaaagacttgtctcgtttagttaccagcatgtcataatcagcctgcagcctcaagagtaaataagcaggaatgttcaaagccttttcacacaagagggcaaacttggtatttacggaacgtttccctctcacgcaaagagagccaatttcttcggaatccgcaaataagttgattgtttttatacttacattatatttcagctgcctatcacctcctcataatgcttcagcacaatatccatgctgaattctttctgcattttttctcttcctttctttcccatttccatacgctgttcgggagtcatccggatgattaattccatgcaatgcgccaaatcttctgcatctttcagtttacaaaggaaaccattgacaccatcgtctatcacttccttacaacccactccattggtcgcaaccaatggccgtccgctggcagcaccctccatcagcgtaaaaggaataccctcgcgatagaaagaaggaagcactacgcatgtggaatcttgaataaaaggacgtacatctgttgttacacccaaataatccacaacaccttcctttacccattcatccatttgttctttcgctatagcttggggattatccactccgagaaagcccaatagcttaaaccgcacatcagagtatttttgtttcagcagtcttgccgcatccacataaccccccactcctttgtcccacaacatacgggcaacaagaagaaaagaaatttcttcaggttcttccactaccgcgaaatggctgaggtctatcccctcacccggaaggatatgcacctgggctggttgaattatccgaccagacacgaacgactccgcatcatccttattcagaaaccagacgctaggcgaatttctaaaggcaaatttatagagtcttttggcaatcttgcttatcagattatccactagaaaagtataacccaatccggtagtaacaggagtataggaaatgcctaatgaagcggctgccatactgccatatatattaggcttaatggtataaaaaaaacaatagtcaggcttttctttaatcataatctgacgataatgataacacgtacacaagtctttcagtgggttattgcctttagcttcaatatcaattggcaaaaccttacatcccaa

SEQ ID NO: 14457 - DNA, 12114 bp, Unknown
  gut microbiota DNA sequence
attgggactatggagaggggaatgctcctgttcccactgtaagaatgccgggaatgcgtacttggaataagtatgtcaatgttccgctggaggaccgcactccttataatgaaacaggtgatatgtggggaattaataaattaaatccttcggagccttcggtcaaagtgccttataaggaaagcgggcacatgatacgggggaataatgtcgagatcttgacattagcagaaaatgccgcttttgtttattgggtgacaggagaagagaagtttgcccgttttgccacagatatatttaatgtgtggttggtagggacgtattatatgaatcctattttggaccctgaaaagtcgtgtggcagtgtcggtggttgggaaccgggaggtatttgcggctattatgattacgaacagatacatgatgatttggtaatgcatgcggcaatggcgtatgattttgctttcgattatttgatacggcatcctcatgctcatctgaaagcaattgggaaagatacaaaaacggtagctgccgaagtctttaagcgttttatcaatatagggctggtacgcggtggcaaatcgggtaactggaatgtgaacgggtggaatataatgctgcgtcctatgttggtgctcgatcataatgaggcttatgctgacggtaaaggaaaagagtattatttgaatctgctggtgaacgaatctactccttatcatgatgccattcccgatatattgaaaacttacgatcgggtgacagggctgtggccggaatctcccggttattcattcggtacagtgcagtcattgcttgattgggcggctcccttgaaacgtgccgggatagatatcatagccggtaaccccattttgcagaaagctgcaatggctgtatttccttggatggacgatgcagccaatatggtggtgttcggtgattcacgtgggggaagtgctaattttcagacgtttgaaaatctgctgacttattataccggaacagataataaggagggggtggaaaaagtggcaagtgccttgaacaaagggatttctcaaaagaaatactccagaaataatgccggttggacagggctttgtacctatacagctaccatcccgtctgtacgtgcagagagtaatgagcgtgcgtcttattctccccatcatcgttttattacaatgaagaactgggagggagattataaaatgatgttcactctgtatggtggtaaaaaaggataccatctcactccgaacgggttggctttacaattctatgcgtatggttatgcgttggctccggatgcagcggcttatgagtcctattggagtaaagatcatggataccatcagtctcctacaggttctaatacggttttacccggatatacggaaggagatatcactattcatgctatggaacctatggtgaaggagggagaattcgtaaatgatagggaattaactccttacctcaactttgccgatgtgtctgccggtgagaaaagaagaatggtcgctatggtccgtacttcggggaatagtggttattatgtggatattttccggtcggacagggcggataatgattatttgttccatcatgtaggtacttcgatggaaatcactgattcggaagggaacaagcttcccggtgaggctttggagaagtttgacaagacgtggcatgaaggatatcattggttttccaatctgcataaatccgattataaccagaatttcatcgcttcatggagtatgcccgaagatataacggcgcgtttatggatggcaggaggtgagggacgtgaaatttatcaggtggatgctcccccgactacaatgaataaagggttgactcccggcgatatttgtatgcctcctatgccgactcctgctttgattgttcgtcaggaaggtaataatgctcatactcatccttttgtttctgtttatgaagcgtataaaaagagtggtccgaatgtgctcggtgtagaagccttgcagggagatgatggctctaccggggtgaaggtgaatacggcggacggatatgcggattatctgttcactgcgacggacatgcaggctcatcatccttccaaacgtgtttcattctgtggcaggttaggattgataagagaaaaagaaggtcagattcaactgatgtatcttggctgtggccgttcactaaagaaaggtaactttgttttagaatcggatcatgacgtatatgctgcaatctatatgcagcatggtgtttggtactattcagcaaccggtcctgtacgggtgaaaataggaaaagaaaccaaaaaactgaatgaaggttacaatcaaaaattataatttttttgtgcatccttattcaccgcagggactaatgctgaaggtctctgcggttaattgttttatcctatagattttatttttcttttcgttgagtgagttttccgattcatccgtactactaattaaaaagtaatcattatgaaaaaaataatactcatagcatgtgcgttgacctgtacggcttcgctttatgcaggtcattctaaagaattgaaattgacgtccccggagggagttcatgaagtcatgttcaggcaggagaaaatttcttcttcggtaaatgaaatagtatatcaggtaaagtatagaggcagagaggttatcggaaactcccgtgccggtcttcagctggataaccgtacttgggaactggcgcttgcccgtaaaataaatcaggtaaaatgttggatggataatttggaggtggatagtgtgatctatcagcctgctgtcaacaagtcttggcatcctctgtatggagaacgtagtacggttcgcgaggcgtataatgaggcaatcatgtatctttccaaaaaagacggttccaattatcgtttgaatattgaagtacgtgcgtatgatgaaggcatcgctttccgttatttttttcctgaacatccacaggccatttttcataaagtggtgggggatctgactgaatatacgttttcccccggtgcggtggcgtggacggagcaatgggcgcaagctccttttgagcgccttgccattaatgacatcaaattgccggtagaacgtgctttgaccgtagaacttcccaatgggctgtgggtagctttgactgatgccgatgtagatgactggtgtttgactaagtttgtagcttctccaactaaacagaatacattgacttcggtcatgtatagccctgtggatattgttacttattatgctactccatggaaaattatcatggcggctgataagccgggggaattgctggaacacaacgacatcatccagaacctgaatcctccttgtgagataaccgatacggactggatcaggcccggcaagattatgcgtgaaacgactattaccaccgaaggggccatagctacaattgatttctgtgctgcccatcatattccttatatgttgttcgactggcaatggtatatgccttgtacttctcatgacggagatgccacaaaggtggtttccaaactggacatgccacgtgtcattgcatacgggaaagaaaaaggagtaggtgtatgggtgtatgtcaatcagcatgccctgatgaaacagatgcatgagctttttccattgctgcataagtggggagtcgtaggtgtgaaatccggtttcgtacagtatgccagtcatcgttgggctacttggctgcatgatatggttcgtctggctgccgaaaacaaattgttgattaatattcatgatgagttccgtccatccggtttcagccgtacttatcctaacttgctcactcaggaagggatacggggaaatgaggaatttcccgacgctacgcataatacgattctgccttttacccgtatgattaatggagcggcggattataccatctgttatttcgacaaacgcctgaagaacacccatgctcatcagttggcggcttcattgattttttacagtcctttacaaactatcttctggtatgaccgcccttcattctatcaaggggagcccgaaatagaatggttcgagaatctgcaaaccgtatttgatgatacaaaagtattagaaggtgctccgggtaagtgtataactatggcgcgtcgcaaaggtaatgactggtttgtaggagctttgactaataatgaaggttctgctcaatcggtaaatctttcatttttagataagggaaagacctatctggcccgtatttatacagatgggggagataaaatgaagactcgtactcaggtgaaatgtacccgtttgttggtggattcttctcaaatcatgcagttcgcattaaagcctggaggtggtgtggccatgcaactcgtgccagcgacggatcaggaaatagaagaatataaaaagtatagaggacaagtattataaaaataaccactttcgttgagtgtattggttttcttgtccgtattatagatagattaggttaacaaaaatgaaggttaggtgattttttagtttaatagagtacgttttttaaggtaagaatgattgtttcagggcatttttataataggtaagaatgaaaaagatagtgattatagcggctttagtatgtggtgcatggcaacaggcagatgctcagtatgtatccaaggtatgggtgcccgatcagaaagacggtacgtatattaatccgattattcatgcggattactctgatccggatgtttgtgccgcaggtgatgatttttacatgaccgcttccagttttggctgcgctccgggattgcccattcttcattcaaaggatttggtcaactggcgtttggcaaactatgccttgaaggagatagagccgaccggcttctttaacgctcctcaacatggaaaaggggtatgggctccttctatccgttaccacaacggtgagttttttatctattggggagatcccgattggggtattttcatggtaaagactaaagatccgttgggtgaatgggaaaagccggtcttggtaaaggccgggaaaggaatgatagatcctactccgttgtgggatgaggatggaaaagtgtatttggtacatgcgtgggcgggcagtcgtgccgcattcaatagtgtgattacggtttgtgagatgaatgcgggaggtacaaaagtcattagtgaacctgtattggtttttgatggtaatgatggggtgaatcacaccatcgaggggcctaagttttacaaacgtaatggatattactacattttggctcctgcaggaggggtggtgacaggttggcagttggcacttcgttctcgtaatgtgtatggcccatacgaatcgaaaattgttatggctcagggagatacagatataaatggtcctcatcagggaggatgggtggaaacttgtacaggcgagtcttggtttatcaattttcaagataaagctatgtatggtagagttttgcacttgaatcctatgaagtgggaaaatgattggcccgtgattggggaggacaaggatggagatgggtgtggtgaacctgtaaaacgatataaaaagccggatgtaggcaggacttatcctatagagacaccgattgagagtgatgaattcaacacaaggcaattgggcttgcaatgggaatggcatgccaattaccaggatacgtttggctttacctctgatttgggttacattcgtatatatggacatattttgtccaaggattttgtgaatttttgggaggtgccgaatctcttgttacaaaaattccctgccgaagaatttacagtgactgccaaactgaaagtttcggcgaaagcagacggacagcagtccggactgatagtgatggggtgggattatggctatctgggtgtagtaaaagaaggtgataaatttatattgaatcaagtggtctgcaaggatgcggagcaatggtctcctgaaacagtgacccgtcttgcggaattacctgtaagccgccggttcggagccgggctctatcccaattatgagcgtgatatttatttgcaggtgaaagtaactgggggaggtatctgttatttcagctacagtctggacggcaggaaatatacatcggccggagtgccttttaccgctcgtcagggtaagtggataggagcgaaagtaggattattcagtacagctccttatggtaaggaaagaggttgggtagatgccgattggttccgtatcaataagtaaaaaagaaaggataattatgaatacaaaaaatctattagtaggtatagggttatgtctgctttcagcctgtactgaagtagacaacaaactggaggtggacagagctttggaatattgtgatcgccaggtacatcgtactttggaggttatgcatggaaaagggcgggaggtagattacactatgatgcctcgtaacataatggatggccagtctgactggaactatcgtaaagtgagtaaggaagaatggtgcggaggtttctggccgggcatcttgtggtatgattatgaatatacacaagatccgaaaataaaggaagaggccgaaaagtttactgcttctttgaaatttctctcggagattcctgcatacgatcatgatttgggttttttggttttttgtagctatggtaacggttatcgtctgaccggtaatccggaatataagcaagttataatcaatacggctgattcgttatcagcattgttcaatccccgtgtaggtactatgctttcatggcctcgcaatgtgaaaatgtttggcggtcataataccatcatggacaatatgatcaatctggaaatgcttttctgggcagccaagaatggaggtaatccttatttgtttgacattgccgtggctcatgcggataagacgatgaaatatcattttcgtccggattatacctcttatcatgtagcagtgtatgatactctgacaggtgaatttatcaagggagtgacccatcaaggttattcggatgacagtatgtgggctcgtggtcaggcatgggctatctatggttatacagtcgtttatcgggaaacaaaagatgtccgttacctcgattttgtacaaaaagtaacggatgtatatctgaaaaatctgcccgaagactatgttccttattgggattttaatgatccgtccattcccgatgctccccgggatgcttctgccgcttgtgtggtagcttctgctttattagaattgtccggttatctgccggctgaaaaagcattggaatataaacaggcggctgtaaaaatgctaaccagtctgagttctgacaaataccagtgtggtgaaagtaaacctgctttcctgcttcattccacaggacacttgcctgccgaatcagagattgatgcatccatcatttatgctgattattattatatggaggcacttctccgcctgaaaaggctgacggagaataaaccggtcattgacgaataatagattgttcagggaagtataaagtatatagagatctgtagttttcttataggtggattatttatgataagtatatcccgttttcacctactgatgaaaacgggatatactgttttacagcaggtaactaaagcttttagtttactttaactatgaaaattagttttgtaactaaaagttttagttctttgtgataatcaaaagaaagattatgaaaatgttgacagcaaaggaagaagagattatgggttatttttgggaaaaaggcccgttgtttgtaaaacagttacttgatttttatgatgaaccgcgtccacatttcaatactctgtctaccattgtgagaggattggaggaaaaggggtttctcagtcatgaggtatttggaaatacctatcagtattatgcggtggtaagctgtgatgattttaagaagaagacgttgaaaggggttatcagtaaatatttcaataactcttatttaggagcggtttcttcactggtgaaggaggaggagatttctctggatgaattgaagcagcttatccgggatgtggaaaaggcgcatgaataatccggataaagagaataattaaagatacatactatgggagcattttttgtatatattgtaaagtcggcagtctgtctggcggtattctatttattttaccgcctgttgctgagccgtgaaacattccatcgttttaaccgtattgctttgttgggaatactgatattgtcctgtgccattccctttgtggaagtgaccatgaaagaaccgatggaagtcagccaacaattgctgacttgggaagaactgctgcttatggctaatcttaatcggactgctactatagaaactgctcccgaatctgctattatgtggcgtgaagcgctgctgatggtttatttgttgggtattgtattcttctttttacgtaatgtatggtcgctgacccgtatgctgaggctgataaagggtagcacccttgtccgtcaggaaaatggtattacgctgataacccaccaaaaagaaatcgctccgttcagttggatgaagtttgtagtgatctctgagaaagacctgaaggaaaacggtgaggaaatactgacgcatgaatacgctcatatacggaagagacattccatagatttacttatagcggatatctgcatctttttccaatggttcaatcctgcttcctggttattgaaacaggaactacagaacatacacgagttcgaagcggacgaaagcgtgattgcacaaggtattgatgcaaagaaatatcagttgttattaataaaaaaagctgttggcacaaggctctactctatggccaacagcttcaatcacagttcacttaaaaaacgtattactatgatgttaaaaaagaaatccaatccgtgggcacgactcaagtacctgtatgtgcttccattggcagtcattgccgtggcagcctttgcccgccccgaaatctctagtgagttagatgagatttcagccgtcaaagttaatgatttaacggcaattatgaaaaccgaagaggttaaaagtcccgaaaaacatcctgcaaaggaaataaaagtgcaagggcaggtattagaaaaaagtacaaacgctccggttgtaggtgctaatgtgattatcaaaggtaccacttcaggtacgatcactgatttagatggaaattttgttatttcaatgcctgttggggctactttgagtgtttcatatataaatatgaaaacaaaggaattgactattacagagaaacttattggaaaaattaaatctttaaaagtgtatttggagggagaaatcacaactaagacacaggaagtggttgtagtaggttatggaggtggtgaagaagcttctgatgaagttccggtttttcaggttgttgaagagatgcctgagtttccgggtggtatgggagaatgtttgaaattcttggggaagaatatcaaatatccagtggaggctcagaaagctggagtacagggaaaggttattgtacaatttgtagttgagaaagatggtaatatagccaatcccaaagttgtcaggagcattgatccggatttggacggtgaggccatccgagtcatttccattatgccgaaatggaaaccgggtatgcagaaaggccagcctgtgcgtgtgaaatatacggttcccgtcactttcagactagacggtaaagatacaaaatcaaatgaaacacgtcatttggagttgaggacagactctgtttttcaagaaaatccattgcggataggtaaggaaactttttcgttgaaagattggaaggaaaaaccattgcttatagttgatgggatagaaaagccttatagtcaaatggaaaaaatgaatgcttcggatattgaatctatttcggtgttgaaggatgcggcaggtactgccatttatggagccaaggccaagaatggcgtgatattgattactacaaagaaacaataagaataaagatatgaagaaatttgtaacactgctactatgtatgctccccatttcgttgtttgcccaggtgaatgatgggattcgtcaggcaatggataattatgattatgagacagtagttatgctgattgaatccgattgtcaggattctttattgcttattaccaaagctcaggcgctgaaagcgatgaaccgttatccggaagccataggggtattgaactctcttatcttgaaagacagcacaaacacaaaagttttgatcgaccttgccgagtgttacaaattgacgggtaactcccgtcgggcggccaactgttatcagaaggcaatgaatttgcaaccggaaaataaatttttccggttgcagttcatacgctctttattagcctccgaagattatgaagaagcacgtacggcttgtcatggctggttggagcgcgattccttgtcggccaccggatacaaatatctgggacaggcatacgagggattgcaggatgccgccagtgcctttcttagttataacatagcctatcggcgtgattcgttggatgcccagacagtggcacgcattgccggtatttttaataacaatcagcagtttaaagatgctgttgatgtgacggaagtttatcgtttgtccgataccaccaatatagatgtgaaccgccagaatgcgaaagcttattgtatgctgaaagagtacggaacagcggtaaaacgctatgagtcattaaaagaactgggtgatcgtagttttctcactctttactatttaggtgtatcccattatggggataactggttttatggtgcatacgataatctgaaagaagcctatcaaaaaaatccgatggatgtgaatgtgctctattatctggcaaaagcttcggcacgcacttcctggaaaaaggagggtgtggaatatatggaagaagccttccgcatagcggttccttctgatagtatgatggtacgtctttatgacgggttggtagaatgttacgattatgcgggggatacaaagaaagaggtggaagccttggagaagttatatatttatacaaagaaaaactccattctttataaaatagcctgtctctatgattggaaagaagatgagaagaatgccattcgctattataagaaatacatggctactgttcccgaagatcagcgttatgccttggacgaagacgggaatccggtggaagaccgcataacactttaccagcaggcatggaaacgtatcaaaaaaataaaggaggaaggtttctttagaggtgatattccgacaaagtcatttcctgtagagaaaaaagatacgttggcacttcgtcatgcaaaataacggaagtcatttatataaaagtaagaatatatgaagaaaattttggctttggcactctttgcagtggctctagtatcatgccggcaaactatgcagaccgatggctttaaactatccggtcatttggaagggcttcaggtcggagatactctttttcttaaaacttttttattgcccgattggaaagaagacgggacagataccatattggtggaaaaggagggaactttctcggcttttattcctatggaacatactactttttatttattgatgcatcagcctaaaatgggtgaaccgttacggagttgtattcgcggagctgagattatagctcgtgtaggtgatgatataaaactgaaagggtctttggattacttgggtgcggttcgtcattcgggtggtttttatgacaattcgttggtggctaggtacgatagcctgactgcgtcttccaatactgaaatgattgatatcttcagtcagatactgaaatatcaggatacaaagcaaaatgatagtgtggcaaaatacgggcaaatgtataatgaatatcatcgtccgctaatactgaagactgttcgtgatagtctggcattgaaagtgaacgatatggaatatgccgcttttatgtatgcatccgcttttgtttttgatgctacttataaggatgtgaaagagcgtttggcacaatttactccagaggttcaaaattcatattttggacaaatacttgacaagcaattgcttgtattgaagaatattgaagtaggctttgcgccagcg

SEQ ID NO: 14458 - DNA, 73580 bp, Unknown
  gut microbiota DNA sequence
ctaaaataatggatctctatcaaaaatatcatgaaaaaggtttggaggtattgggatttacccgtgatgatttattgaaatcgttgcagggaagttctgaagagtttaagaaagatgaacgggtacagggattgctaagccatccgtggactacagtttacacagaggaggagggtaacggctttatagtgaaagacctttatttttcaggagttcccattcttatgttaatctctccggatggtattactttggtccgtggatatacaaaggcatacgaagaagtaaagaatattttggataggaacttgggaaataagtaagtatgttaaaaaaaaatacaatgaaaaactttggtattctattgcttgctatggtgagttgctgccttttgcaggcaaaaaaccgggtggttaaacagccgcctttcatcgctcgtagttcttctactattgagatagacagagtggtggtttcggatacggcaaccgtattggatataaaagcctttttccgtcctcataattggattcagataagtaatgaaagttatttgttggctgataatggagagaagtatccgattcgttccggtaatggaatcactttgggtgaaaaattttggatgcccgatagcggcgaagcttcttttagtcttatttttccgttattgccccccacagtgaaagtgattgatttcattgaaagcgattgtgaagattgtttcaaggtatggggaatccatttggatggaaaattaccggaattagatttatcggatgatgtgaagaaacagaaattgaattacgatgaaccgttgcctaaggctgaattgaaagatggcaaatcagtgataaccggtcgtttgttaggctatgagaagcactatgcacttccgttttcttgtaggacttgtgatttgttgacggctaaatttgaggatactgaaattaaggtgaatgaagacggaacatttcggacagagattgaactttgtactccgactacggtcagtttttctgtgggacgtgatatttattttgatgtatttttagttcccggtggtgaattggatatggctgtcaacttgcgtgagttgagtcgttctgaaagcaaattgttgaaagggaagcgtgctggtggaaagaaagtctatttttcaggtaccatggcggctttgaatgatgaaatgataaccgatgatgaacatttgatggatgtatggggaatggttcattggaatatgaatgatttatataatatgactgccggtcagtataaagcttattggttgaaaaaatatgaagaaaccaaatctgctatctgttccgataagaaaagaagtcaggcataccggaatcttttattggctcagaatgatttgctttgtactttgacattgacccgtgtaagctctaatttagcctatgcttatgtgcagtgcagtggattaccggctcgtgaagcttatcaaaagtttaaacaaccggaattgagtgatgatttctatgactatatccggcagctgaatatactgaactcgcctgtcatgctttataccaatggttatgctgatttggtgagaggaatgggctatatgagggtgaagatggatgataagttgagtgatatatttgcgtttattctctcttccgataaagtttctgttgaagatgctgagataatacgtgagttcaaggctaatacagatgccggaaaaacatctgtctatcgggaaaaaatgggagaattgcgaataaaatacgatgatttgtttaaagaattcagttctatgcagcaagactatatcttgaaaaagattatagccggatatttgggtacagagcaaggactttttttcgatctgcagaaaatgatgaaatatgctcagaaaatcagtgacttcactccattgactatacatgattttgaggagatacggaagatgagtgatccttattatctcagcagactgacaaggatgaacaaccgtcttttggaaacgattgaagctaataagaaaaagaaaggttatactgttaatgaatccggagaagtaaaagatgaagatttattttattctatcacttctaaatttaagggtaaggtgattttggtcgatttttgggcgacttggtgcggtccttgcaaaatggctatgaaacagatgaaaccgatgaagaaagatcttgaaggtaaagatattgtatatgtttttattgccggagagaactcgcccaaagaaacgtgggataacatgattccggatattcatggagagcattaccgagtaacggcggctcagtggaattacctgagcaagcagttcagcatacagggggttccgacttatattattgtcgataaagaagggggtattattcaaaaatacaccggtttcccaggagtggataccgtaaaaaaagaattaataaaagcattagagaaataaagaacgtgttcgtcttgcaagaataaagtggaaaaggatctgtaagctgctgtaagcatttacagattctttttttggatttatattactatctttggcaagacaaaactaatattgaataatgaaaaactgggtcgttaagttattggtattacttttcattccttctttagcaggaatcttgttcactgttgctcttggttttaatccggggggctggttacaaattacgacgtatgctttccctccgttactcactctcgccggaggggcttttatcattgcttcaagatggaaaattccttttcttatattgatggcggctgccagtatggcctttaatattcctttacagaactggctttttcattcggcagatgaagtggtgcgttatcatgctgttaccgatttatataatggggggaataatgctctgtattttactttcgatactctggaggtggattatgcccgaaggaacagtgtgactgtcactcgtgaggtgacacgaagtatgggcagacaccgctatcgtaaggaacagaagcaatatcatttctctgtagctcctgcatttaccgattcattgccccgtcataagtatgaggagcgggaagttaaggcatgggttattccggtgaggcatgagaaaggacaagccgttgtatgttatgagcgttgtatttttgatttagatgattatcaaagggccattgatcggtcccgctgtaaactccaccatcctcaagctccgattatacgacctttgtattcacagttcattacccggcaggaatggaaaggaatctttctgaatgttgcatggattgtactttctgtactgatggtactgggggtaattttgaattatcaagcagacagaaagaaagcataatatcggaacagactgtatgaagggtactttatgaatattatgatcttcatgcatgtgacctgtcaatgttattagtaaattctagaatgatgttttctttatataaaactttccccggacatttcatgacagaaacatccggggagaggcatttcgctttttatttattgcagagttttattttgcctttacattcagattggataattctgtgtccttatggatggatggcagattattctgttttactacaacagtatgaactttcccttttgccacttgcggcaaagtgaatttctgtttgtagataacctgttccgctgatgggcgcagcagatagcctgtttctttttcaaagcggttgtatattcttaccacaatttggttactgcctttttgaagtggtagcagcaccttttcctcacggaacttgcagcggtaagggttgaggtgtttcattacagacttgccgttcagatagatttcgataccgtttccagcacctacatctactagaatatcttgtgctttgggcgattctacctgctgcattaggaagtaactttccagaatattgctggggaacatggctttttcctcattcacttctttccattgtccttttcttaccggtgctttttccggatcagtatggatggtggcaggagcatcgaacaatccgctgcccggcccgcagaagtaacgctgaccccatacggccttggaagataggtttagtgcctgtgccttgcctgcgtcaagggttactgtgtaaggtgttccatctacttcaaccagtaattccttaccgttctcctgcggagtataggtaaattccaatgcgttgaggttggatttgttgatgctccattgatagctcaccgtactgcggtagttgctgtaataatcgaaacaggaataactataattaggagtgcgctgtgcagctataggttgtggtttcaccggttggtcgaacgtggcgcaaatcacttggatatcttttccatatgcgtcggcgggcagtgtgaagatcatctcctgtcctttctgaatcgctttaatgtctgctttttgcagtttgcatcccggtatgttcaaagtgattttaccatcggcaggacggttgcccgataagatgaggtagaggttattgcctttgcgggtaatggttccccattcgaattgctcgcggaaaggagaggcttctgtaccataaatggcttcaccgtttttcttcaaccagataccgatttctttcagcacttctctttcaaagggtactacggaaccgtcgcctttgggaccgatgttcagcaggaagtttccaccatgggaaactacattgatcaggctgcgcagtttttccatcgctttggtgtgaacgtccccccttttttgccaggaacggtagctccaggtttcatcgaacatggaagctgctgtttgccatgcggtctgcaaagagccttcgggatatgtgttgtctgccatgacactgaagtcatactgatcgttgcccaaccggccgcttaccatacagtctggttgcaatctgtgcactagttgatacagttctttgctttgttcaggagtgttggaacccatgtcaaaccaaagttcagaaatgggaccgtagttggtcaacagttcggtaacttgtgctttggtgaattcatggtgttgtggggtgatgaaatcacagttatggctggagatgggataggcttgtggaaaatgccagtctatcagtgagaaatagatgccgaagttgattccgccacgtttgcaagcttccgccatctcttttataaagtcgcgtttgccaggggtggcatcgtatgaattatagtcggtggtggctgtacggaacatacagaaaccgtcgtgatgcttggtggtaatgatgatggagcgcataccggcttctttggccagtgacacaatagcgtctgcatcgaacagggtgggattgaaacgcagagcggtatctccataccaatcactgaagattcccgcaaacgactggatttgttcactgtatcctcgggtgacggggctgccttcccatacgcctcccagttcggaataaagaccgaagtggatgaacatggaatacttgttttgatgccatttctcaaatgcttctttcgagatttgggcggttacacccaggctgatgacgcaagccatgatgaaggttagtaattttttcatgattgtaattagtggttaactgaatgaatatattgcataatttctgtttgctggtcgggatggaaccaaacgatgtctttgtctcgtttgaaccaggtcatctgtttacgagagtagatacgggaattttgtttgattttcccgatagcgaattccaatgtccattctccatccagatacttgaatatttctttgtatcctacggtattgagcgagttcagatgccggaaaggatatacctgccgggcttcttccaacaagccgtcctgcatcatgatgtccacgcggcggttgatgcggtcatacaattcttcgcggtcgcgagttagtcctatcttgatgatgcggaaagggcgttccttgtgagtgcgggtacgaaaggaagtataagtttttccagtcatgtagcatatttccaatgcatgtattactcgtttgggatttttcaaatccactattttgtaatactcggggtccagcagctttagttcggcgcaaagagtgtccagtcctttttgttcgtaacggtgtagcatcagctggcgtgtttcgttgtctacagtggggatatcatctatgcctttgcagatggcatctatatacatcatggaacctccggtcagtattacagtgtcatggttttggtacaggatttccagttgtgctaacacatctgcttcgtattgtgcggcgctgtaataatctgttagttgtaatgttccgacaaagtaatgaggaacacgcgccagttgcttgggagtaggggcggcagttcctatcttcaggtctgcatataattggcgtgaatctgccgagacaatggaagtccggaagtgttcggcaatggaaaggcttagttcggtctttcctacaccggtagggccgataaggacgataagggtgtcaggcatggtgtttataaaaagataggggcagacgtttaacgtccgcccccgttaagattaatagttttcttgctcataagggtccggtgaggaggcaccgcccatatcaaatccttcgggatcaaagtcttccatatcgaagtcttgatcaccataaaaattctcgtctatatccagatttccgctattgctttttgccatcatttcgtcaaagtcgacggtttgtttaggggcttctccggctttgcgcgaacatactgctttgtcaaggtctttgccggtgatgatttctgacagttcaatgaaaaacactcgttctgccagcgggtcgaatacatacagcaatttttgcttttcgtcttccaccaaatcactcaagcgggtttctctcatgatgtagctgtcttcttccgaactacttcccatatcttccagtgtgatttcttgatctttctcccagtcgtcatcacaaatgaagaaagaggtcatctggtcatctttatatcctgccgctttcaatatcgcttcgtgcaaatcaaagaaagttgcttccgagtctatctttatttctcttataaaatcatcgacttcgtcagagattattgtaaatctgtaaatcatatattttactgtatatactatataacttttttttcgtgcagtaaagttataaaaaactttgttatctgatgatacctctttgagaattttctatgaaagaaataatatattctatttctttgctcataggtatttctttgcgtacttgttccaaggcatcggtaacgttcataccattttgataaataatgcgataggtgttgtgtatattctctattagttcattagagaatccgcggcggcggagtcctacgatattgattcctgcgtaggcgatgggttcgcgccccgctataatataaggaggaatgtccttgctgaaacgtgaaccgccctgtaccattacataaccgcctacccggcagaattggtgcatcaatacggcaccgctgataatggcgttatcatcaatgataatttcacctgccatcttggtggcattgcctatgatgcaaccgctgcctatgatggcatcatgtgctacgtgtaccccttccatcaacaggttgttactgcccactatggttttgcctttagccgctgtaccacgattgatggttacattctcgcgaatggtgttgttatcacctatttcggcagtcgtttcttcaccgcggaatttcaaatcctggggaatagcgcctataacagctcccggaaaaatggtgttgccgttccctatgcgtgagccatacagtatattggcgttaggcatgattgtgttgttatcgccgataactacattcttgtcgataaacacaaaaggaccgatttctacattctcaccaattcttgcctcgggatgtatatatgctaatggactaatcatgttgtttttttagtggttatttattttttactatttgtgccataaactcggcttcgcagactactttctcgcctacaaacacatatcctttcattgtggagatgccccggcggataggagccaacaattcaacacggaacaataaagtgtctcccggcactactttctgacggaacttcactccgtctatcttcatgaagtaggtggagtacctttcgggttcatccactgagttcaaaacaagcagaccgccgcattgtgccatggcctctacttgaagtacaccaggcatgacaggttcctgcggaaaatgtccctggaagaaaggttcgttggctgttacatttttcacaccgacaatgtggttcgcgccgatggcaacgactttgtccaccaactggaacggataacggtgcgggagcagctcgcgaatgcggtttacgtccatgatgggggattcattgcagttataggatggggcctgtatttcgtgaagtttgatttctttgcgtatttggcgggcaaacttgttattaatggtgtgcccaggacgggtggcgatgatacggcctttgatgggcttgcctatcagtgccaagtcaccgatgatatccagtagcttgtgacgtgccggttcgttgtcccataccagagggatatgattgatatagcccagtttggtggcgtccatgtggggaacacccatgacatcggccagcttgtcataattttcttggctcatctctttttcgtaaattacgatggcgttgtccagatcgcctcccttgatcagtccggcacccagcaatggttctatttcgcggacgaatacaaaggtacgcgcggaagctacctcggtggggaatttagccatgtcttccagtgtggcgaactgattggacagtattttagactgataagagatcagtgcgttcacactgaaattttcgtccggaagaacaatgatggaagatccggtttcctcgtccctaaattcgatttttgattttataatatagtaatccttgacagcattctgttcttcgattcctacacgctgtatattttctacatacgctttagcactgccgtccagaatagggaattcgggaccgcttacctgaatcaggcagttgtctataccagctgcataaagagctgccaaagcatgttctactgtacttacttttattccgtttttcatcagcacagtgccgcgggtggtatcacctacattttctgctacggcatcaattattggttgtccttcaagatcaattcgttggattttatacccgtggttgtccggtgcaggattgaatgtcaccgtcaagtttactccggtgtgaaggccttttccatttaaagaaaaactgcctcttaatgtcttctgtttcaacatggggtttatttatttagttgtttttttaattcttctatctctttctgcatggcgttcagtgtggcgtacatttcgggtagttttttgtatacggccgatgatttcatgaaattcttggcgtcgatggccggagtgcctagaatttgctcgttggatttcacgttgccgggaacgcctgcttgtgcgccgatacctaccttgtcacctatcttaatatgtccggctagtcctacttgtccgccaaacatacaccattcacctactttggtagaacctgcaatacccacctgtgatgccatgacagtgtggcttcctacttccacattgtgtgctatctggatcaggttgtccagtttcacccctttatgtacaatggtggcacccatggtggcacgatctacgcaagtattagcaccaatctccacattatcttctatgatggcaatgcctatttgtggaattttttcgtacccttcgggagaaggtgcgaatccgaatccatcagcaccgattacgcagcctgcatgcagggtacagttgtttcctaccaagcagtcgtgatagatagtggcatgtggataaagtgtacaattattacctactttggcatgacttcctacagtagcgtgcggatggagggaagtgttgtccccaatctcagcaccatcgcctacgcaggcaaacggagcgatatatacatccttccccaacttcgcagtgggggcaacgtatgccagcggatctataccggtctttttaggtttgctcatttcatagagcgtcagtaatttagccaggctttcgtaggcgttgtctaccttgattaaggtagcttttacttcttgctcgggaacgaaatctttgtttaccaacacaatggtagactgagtatcgtaaatgtaatgagtatacttaggatttgaaagaaaagaaatcgctcccggcacgccttcctctattttagcaaaagtatgcacagttgcgttttcatcgccaacaataattccctggatgtattccgcaatttgtttagctgagaactccataatactgtctaattctttatgttctaaatgtttcagttttgttacttgcgtgttacatgttagtgtaaacacatcattaattatgcaaattacgcattttttttttatatatccgtacaattcgctaattatttaatgtccgtcgttttcggaacgcaggtaacatatataatatttcttgacttttcgggagaggagagagatgttgagcatatctgaagccttggctatatcacaggtgctgccatctttatagatgatttcaatactgtcatcctcctttttatacatattgttttctatactggatatagataggaagtattttgcttcttttttgttgatattcagttgtttacttatcctcgaaagaatttcttcttttcgcgtttttgtgatagaagaggaggtcacctctactttgaatagtctcctgttaatcattccacggctcagagtggacaataccacatcgctgtgattgctccaaactttcagtgcggtccatatatcattatcatctaattgaataaaattttcaagacaatccgggctgttataaaattcttttttatcaatagagtggtataaaaagaatcttaaagcgggtgaggcgaacagctccacgccacgtaaagctaattcctttgctcgtgtcagagtgttgatcagcattttttcactggcaacggatgtcttgtgcagatatacctgccagtacatcaggcggcgggacatcaggaaattttcgatggagtaaatacctttagactctactaccaggtgatcgtcttttacatcaagcattttgatgatgcgggcggacccgatattgccttcggatacaccggtatagaaactgtcacgccgcaaatagtccaaacgatccatatccaattggccgctgaccagttggtgcaggaatttcttgggatattcatctttgaatatctgtatggcaagattgagttgacctttcatgtccttgtttattcgttccatcagcatcaaggagatttcttcatgtgaaacacctcctaccaatgtgttttccagcacatgggagaagggaccgtgtccgatgtcgtgtaacaggatggcagcttgtacggcttccgcttcgctgtcaaagatgaagttacctttggcggtaaggtgtttgatagtttcactcattaagtggaaagcacctaatgagtgttggaaacgggtatgttgtgctcccggatatacagcagaggacaggcccagttgcttgatgcgggtaagacgttgcagcaatgggtgacatacaatgtcatatagtaaccccttcgggatgttgataaacccgaagacggggtcatttataatttttcggtcactcatggggaatgattattcagtgtgctgatatgctaataaaccaatgtactacgctatgtatctacctggtaatttgcatattagcacattgttttattggcacattattttctccatctgtgcctggactttctgagcttcttgtcctgctacagtcgcaaaattctcagttttatccgcatagataatggcacggcttgaattaacaataagtccgcaggtactattcatgccatatttgcagacttcctctagagaacctccttgtgcaccgattccaggtacaagcaggaagtggttggggacaattttacggatgtcttcgaaagcacgtccttgtgtggcgcctactacatacatcatgttttcatcgttggcccattcttgtgatttgcgcaatactttttcgaaaaggcgttcgccgttggtgtcttcggtcagctggaagtcgtgggaacccttgttgctggtaagtgctagcaggattacccatttgccttcgtaactcaggaagggagtcacgctgtcttcacccatgtaaggagctacggtgactgagtcaatgtccagctcttcaaagaatgtgcgggcatacatagccgaagtgtttccaatatcgccacgttttgcatcggcaatgatgaattggtcgggatagttttccttgatgtaggatacagtcttttcgaaagcgatccatccttttacgcccatgctttcataaaaggccagattgggtttataggcgatgcaataaggggcagtagcgtcaatgatagctttattgaaggcgaaaatcgggtcttcttcttttaacagatgttcgggaattttctttatgtcggtatctagccctacacagaggaatgattttttcttttggatattttcaaataattgttgcttgttcattattatatttacagtttatggtttacgatattttaattataattcgctctctttcaaacgttctgcattctcggctacagtcaaatggtcgatacagtcttgaatgtctccatccataaaggcggccaaattgtaaatggtatagttgatgcggtggtcggtgatacgtccttgtggataattgtaggtacgtatttttgccgatctgtctccggtagataccatcgttttgcgtttgctggcaatgtcgtcaatgtacttttggtgttctttatcatatataaaggtacgcaggcgagaaagggctcgttctttattcttcggctggtcacgggtttcggtacattctatcaggatttcctctactatcccggtgttgggattcttccagttgtagcgcaggcgtactccggattccaccttatttacgttctgtccgccggcaccaccgcttcggaaagtgtcccacttgatttccccttcgttgatttccacatcaaaaggctctgcttcgggtaaaacggcgactgatgcggctgaagtatgtacacgtccttgggtttcggtggctggtacacgttgtacacgatgtacgcccgattcatatttcaaagtgccatatactttatctccggttacggagcagataatttccttaaaacctcctgctgctccttcattggcgctggatacttccagtttccaaccttttgtctcgcagtatttggagtacatacggaacaggtcacctgcaaaaatggcggcttcatcacctcccgtaccaccgcgtatttccagaatagcatttcggtcatcttgcggatccgcaggaacgagtagtagtttgatttcctcttccagttctggaatgcggacttcgcagagatttgcctcttcgcgtgccatttctttcatctccgggtcggattcgttagtcatgatttgtttggcctcttccagtccattcaggcattgtatatattctctacgggctttcatgatgtcattcaagtccttgtattccttggtgagcttgacataacgtttttggtcagctatgacattagggtctgtaatgagggtggaaacttcctcaaagcgagccactaacccgtctaatttctcaagtaatgtattattgttttctgccattcttttctaaacatttatttgcgacataccaagtgagtaatatccacccaagtatggcaagtacttttcttactatatatagtatgtcatgccaagttgtttcatgaccccatgcggtagagatgaaatacaactcgcgtattgtatcaattgtaactaatgagcatattattgctcccatgccataaaaaaatcttttttttaatgtagcatgcttggaagcgttattataatattgcttgtcagtatttgaattctccaaactcacttttgataattagttccttcttgtcactttcttctatacgtcccacaatcttcgcgtcaatattgaatgacttgctgatggcgatcacctcttcggcatgttcgggtgagaggtaaacttccaggcggtggcccatattaaatactttgtacatttcttcccaatcggtgccgctttgttccttgatggttttgaacagaggggggacagggaacaggttgtcctttactacacggcaattgtttcctataaagtgcaggactttggtttgagcaccgcctgagcagtgaaccattccgtgaatttcaggtcggagcgcatccagtaatttcttcactaccggagcataggtacgggtaggtgagagtaccagctttcctgcatccagcggacttccttctacagtatcggtcagcttcaaattgccactgtatactagttcttcaggtactgccttgtcatagctttcgggatatttctcagccaagtattttgcgaacacgtcgtggcgggcgctggtgagtccattgctgcccatgcctccgttgtattctttttcataagtagcctgtccgtaagatgccagacctatgatgacgtcacccgggcgaatattggcattgttaatgacatcggtacgtttcatgcggcatgttacggtagaatctacgatgatggtacgaaccaagtcacctacatcagcagtctcgcctccagtagcgtatacgcctacacccatttcgcgaagttcggccaacagttcatccgttccgttgatgatagcggaaattacttcacccggaacgagtagcttattacggccgatagttgatgaaaccagaatattatctactgcacctacacacaacaagtcatcgatgttcataatcagtgcatcttgtgcaatgcctttccatacgcttaaatcgccggtttctttccaatacaaataagccagtgatgatttggtgcctgcaccatcagcgtgcataatgttgcaatattcaggatctccgcctagaatatcggggatgattttacaaaaagcttgtggaaaaatacctttgtcaatgttcttaatggcgttgtgcacatcttccttggatgctgacacaccgcgctgcatgtatcgttgattgctcatgagttatatattttattcaattgaatgtgcaaaaatagttattattttgcttatagccttgagttttatgaaaataaaagaggagaagagatttattctgtttccatattattgccgttcctgttttagatttattgctatactcttattttttagacgagtaaatttaatatttatatcgaactgacattgatatcatacattatttatatgttacaatgccttatcaatataacgccataaagaaagacgcatagtacaaccacctctattaatatcaaatatcttaaagactataaaagaaaacacagcctaatttaacgtgaaatataaaatttccccgtcacttcatcgtcttcattaccagtatgttccggtgtgaaaatatctataaaggccccgaaacggtaggtaatcgcggtcaatgtacaacattgcgatcatcgcacccatagcggcaaaattccaacagatgtaccttgccggcagtatgttaccatgaaaacagctttatggctttattgcttcacctgtgtgaagcggcggtttcacacaggtgacaacggctcttcacccgaatgacagggcctgttcacctgagtgatggtacagatggtgcactcttcttgcacggatactgccgtaaatatatcaagattatgtatccaatatgacaattggcatctgacgagctggcttccgcaaggaaaaacgaaaaaaacactttgtggggatacagaaaattacgtcaccatatatcgctgtatatcagcataatgcggtgacgggacaaaaaacattgcagtgcggaaacgaaaaataacagtatgtaaagttttatcagattataacttaacaacaaagatggatattcccggcagacaaactttttgagagccgggcatctgctacgacataatgtgtcataccaaagaaacagtttgcattttttattttacgattgttccgacaaaggtttgtgctcctgcattattcaagatatatactgtatagaatccgccaggtaatgaggctatggacatttggggtgcataaacaaaatattttatttcttcaccggtagcagtaaatattttcactgtttttgcttcttttatttcaggcagggtgagaatatctccgtcatttagtaaaggcatgtctgtttctgaaattgcattcagttccaagggagcgctttcgtttccgaaacggtcggcagcagttacggcaaaataacgtttttgtcgccaaggtgaaataggggtatattcgtattccgtatgggtgagataggtttccagtaagtttccggcatctgtgatatctactggataggtatctgaggcataaagatgataggtgacaagacctccgttgttatctgtggaaatctgccagctcatgtgcatttttccgtccggcaacagttgcagggaaggcatggccggagtggatggggggatgctgtccatccaggtcattgggggaatcaatgccggagtggtatagaaattctcttggagttcgtcccaaatgcctttggtgttgtttaatagaaaacgattgcggaaataggcttgtccgtttagttttatctgacgggtgaaataaagttggcggactatttcgtccaacggccaattttgttcgttgggagagaggaaataaatacccaaaccaggtattatccagcggttaccacaattctctttccaatccaatgcaaaaggatagaaattatttccctgaaaatacatcatcgggaacaatgcatcatgaataccttcttttagccatttctgagcatcttggtaaactacatgataagcgttccatccacgggaggggtatcggttggtatctcggtatttgccaataggggaactgctgactttcacccagggtttgatagtcttgatgtcggtatagagcctatgcacaatatctgtgatattatcacgccgccattgtttcaactccttacctttaccgtatttccggtaggtgtccttgtcaggaaagttatcggcttgctcggggtagcggatgtaatcgaaatgaatgccgtctatatcataacgggaagttatttcttttactatgcatgacagatattctttggttcccggatttcccgggtccaagtaccagttacctttataaagtttgcaaattgtccggtttttccgtactacggagctacgtccttgcaattgtacttgacgggtatttccggcaggaatcgtaacaatccatgcatgtagttccatgcctcgtttgtggcattctccgatggcgaaagccaaagggtcatatccgggattccctcctgtgctacctgtcagtgattcggcgaaagtttctatggcggaaggataaatcatatctccgcgcagacgggtttgcaacaataccgtattgaaattggcggctttcagacgatccagtatatcacataattctttttgctgacgccggatgcctgatgcgtttattgccttgttacgaggccagtccattcctccaagcgtagtgagccaggtggcacggatttcatatttaggttgtgagaaaactgataagaaactcactatgactagtaataaagttataaagaatgttcgcatttactttaattttagggcaaagatacgaagtaatcaattaattcgttacttttgccccaacaaaacaaaaaatagaatatgataacctttattattgcattattggttcttgtaggcggatactttttgtatggaagttatgtggaacgtgtgttcggtcctgacaagattaggaagacacctgccctgaccatggcggatggtgttgactttattccacttcctacttggaagatttttatgattcaatttttgaatatagccggcttaggacctattttcggtgctataatgggagcgaagtttggtacggcgtcttatttgtggattgttttaggtaccatttttgccggggcggtacacgattatttgtccggaatgctttccattcggcatgagggcgagagtttgccggaaattatcggtcgttatttagggcttcccacaaagcagttaatgcgtggttttacggttgtgctgatgatattagtcggagcggtttttgtggcaggaccagccggattgcttgccaaacttactccggagtatatggatgttactttttggattattgttgtgtttttctattatatgttggctacattgttgccggtagataagattataggaaaaatatatccattgtttgccattgctttattgtttatggcagtggggattttggtgatgttgttatggaatcatccggcattgcccgaaattacggatggtctacataatacccatcctgccggattaccaatttttcctataatgtttgtttctattgcttgtggggccatcagtggctttcatgccacacaatctccactgatggcacgttgtatgaagaatgagaagtatggtcgtcctattttttatggagcgatggtgaccgaagggatagtggcattgatttgggctgctgccgctacttatttttttcatcaaaatggtatggaggagagtaatgcttcgattattgtggacagcataaccaaggaatggttgggtacgataggaggtttattggctgtactgggggtaattgccgctcctattaccagtggagataccgctttgcgttcagctcgtttgattgttgccgattttatgcatttggaacaaaaaagtatagcgaaacgtttattgatttgtattcctatttttgcggtaactatcggtatattattgtacagtcagcgtgatgcggcgggatttgatatgatatggcgttattttgcctggtgtaatcaggctttgtctgtgtttactttgtgggcggtcactgtttttctagtacgtgcgaaaaagaattattatatcaccttgtttcctgccctgtttatgacggctgtatgttctacttatatttgcatagcccccgaaggattagcgttttcggattatgtatcttatataattggtagtctttgtacgttggtagccgctatagggtttgcaagttggtataggaaacaaaacagcatagtttatgaaaaaatatagaaaatcgatttggttgcctgtagctttattggtctatactacagcgatggccgtttattttattccgcgcaatacggaaataagtgatacggaaaagtatctcacagtaggtttatcctatatgattatagcgttgttatggattgtccttcgtaagaaagaaaaggcggaggaaagacgtgaacgtgatttggaaaacaaaaaataactattaaacgacaacattatgaagaaaattttagtcagcttgatgctgttggtaatgactgcactgagtgcacatgctcaatttgagaaggatgtatggtatgtgaatgcttcattgacagggcttgacctatctcatagcaagaatgaaggaacaaattttggttttgctttaaccggcggcgcatttgtagccgataatgtggctgtgttgctgaattttaaaggcaattatgtagaacatggaatggatgaaaccagtattggtgcacagggacgttattatttttccagttgcggtatttatggaggactaggaatggcgtataaacacctttcttgtgtaggatttaaaaagaatctggtttgtttgacaccggaagtcggatatgcttttttcttgggtagaaatgtgactattgaaccgtctgtatattatgacttgagttttagtgatacttcagaatttagtaaattaggcttcaagataggattcggggtttatttctgattgatttaattccaccacagattacgcagattattgaatgggagaattcattgaaattcaatctatgtaaatctgtataatctgtggtgaaaaactttttatgtgagattaatgcgcatagagatgcgtgaacggaatttctttaccatcactacctgttacttttaatttcagttgtcctccgttttggtcgaaataacgtaattccattggatgatatccttttgccaatgctttttgccccactatttctttaggcccgtgaggtccgtcattgtctactatctgttcactgtctatagttaatgtactaccatcatcggataggagtgcaaaagtgtagatatcgtcttgaggagcattgaaatatcctttgataatcagtccgatatttccttttacttttttaggaatcataacatcttccactggataagtaccattgaccggagctttttctatttcactgcatttatttcctttaaattcgtgccatgtagctttcaaacccggattggaaggagcggcagttacagagggagtatattcacttttgatgaaacgggtcttgactatgtcacctttctttccattagggcggaaggtgcagaaagtaaagtctgtggtttcagtcactttgatgggaccttcatatatgggagattgtaaagtaggagtactgccatcagtggtatagtgaatttccgcagtggggtcaaggcaagttacattgatggctccttcaccgataaaggcgttgacggcattaaagccttccaaatcgggtatacggtaattgatacccatgatattgagacgttcaaactgatcagacaggcgttgttggaaggcactccaatctttttgctccggtttgctccaacctagttcggcaatagccagcaaacgtggaatggccatatattgcatacgtgcgttggaaggaatccattcgcaccaaatatttccctgcactcctaaaatcagcgactgctgctcggagatcaggttgtctgtcgtatccagattataaatacttgccatagagttcttatcttctgcataatccaaataaaattgtccgttaggagtgaaaatgacagggttgccttgtgctgttgtcttggttgctgcatcttttacccagctgcgccaccacattacggtagctgttttagacaatccgccttcaatgatttcatcccagcctatcatttctttgcctttctcgttaaagaatctctccatgtcatgaatgaaccatgattgcagttcttcttcagttttcagattattgtcatgcatacgtttctgacagtccggacattttttccaattagttttttctacttcgtcacctcctatatgtacatacttataggggaaaagggctatcagttctgtataaacattcttgcagaattccaatgcggagtctttccccggacaaacaggtgaggagaagacgcttccccaaccggtttcgttaaaacaggaaacaccttcatagttacttacagctgccagcatgtgtcccggcatatcaatttcgggaataatatctatgcctcgtattttggcgtatgctatgacatccttgatatcttcctgagtgtagtagcctccatataaggtgtcaccttctacgatgcgtatcttgtcttcaggaattgccatatccgggttgttattagtctttgactgacgtatgcattcgcgatcatgagaattgaatttgcgccatgctcctttttccgtcagtaaaggatatttcttgatttcaatacgccatccttggtcgtcggtaagatgccagtggaatttattcatcttgtaaagggccatgacatccagtaattctttcacctcacctattgtgtagaaatggcgggatacgtccagcataatgcctctccattcaaagcggggggcatcttgaatgttaacggccggtatggcccagtctgtacctttaacaatttccttagattctatttgcgggggaaacagctgtctgagtgattcaatacctgcaatgacacctccgtaagagttacctgtaatgttgaccttatcgctctcggctgtcagggtataagctccttcttttccttgaacatcacccaaggcaagggtgatggttccttcgccttctttgactttaaggtcgtagcctgtggctctggaaagcatatcggccaaatactcggctgcgggaattagttcggcgtcaataacaccgatggaggtattacttttcaatacaaaagcaccgtttgtttcctccagatggttggttatgggtacaatggatacctcttttgttacagggggagtaccggtacatgctcccaacatcaatgtgcctgctaacatacaggcggtcattaactgtttatgtgtacatttggtcataggataataaattaggttattggacaaagataacagaaatattgggaaaaacgatattatttggcgggatattggaaagtaaccagtactcctttatggtctgtaggccatacgcccaatggttctataaacttgtctttagatgtttcctgaacacgctgtgcacggactatagaatttttcggaccgaaaatggcggcgtctttcactttcaaccccttttcgggataataccaaatgtaatctatacggtcgcgttcatctgctttgggagcccaggttattttgtcggcgggctttgccggattatccgaaggataagtgaagccgggatagtttaatacatctggatagaattctcgataggcgtctttcaatccggcttcgtctaacaggacaggaactgtccaggggattacaaagccatgatggtcatacaggtctttggtctcttcagtccaatcttgatgtgaaggttcattaaaatctcctcctaaaatgatggtgtagccggctgcacgatctttttttgcctgttcaatgaatagtctgatggcgtcatcgcgttgtgaggctacatttctctttaatacttcttctacggtagtggggatagggatttcttcccaagtagaaccatcatatccgcgtacattataataggcgtcatccaaataatcaagatgagcggtgtagactgctattttctgtccgttcatatcggctgtaaggcgatagatactgccgtggtcattcttttcggggaaaacggttaatgaatcagtgatggggtatcggcttaacagacctgtatcataggtatagaaggaataataggtttctcctttttcctttaatgattgcactaggcgggcagtgaaattggtgttttcgtaattacgtacttcgctcaatgtgacgaagtccggacgaagacgggctatttcattcacaatagcgtcgtaaccaccgggaattacagttccttcttgccaaatgttccattgaagaacggtgaattctttctctttttgtgaacatcccaataggaaagggaacagcaagagtagtaaaaaaagttttttcatattctgttgatttataaggttattaattcaattctaaatttactcatattttcgtttagatttagattgacaatgcggaaaacattaaaacagatttttagtaaaatgattctgcaatcataccacaaaattctaaatttacagaacggaataaatcacttttaaattcccatttatcatctagtggtatattgcgtataatcatatttaataatttgtgtcagtttggacaatcagcggtgaataaaaaatcaatcaggagaatccatcgccagtttttccttcaaaaactgtcccgtataagatgccacacatgctgcaacctcttccggagtgcccgcaactaccagatttcctcccatatttcctccttcgggccctaggtcaatcacatggtcggcacattttatcacatccatattatgctcgataatgataatggtatgtccgcggctgattaaggcttcaaatgcttccagcagtttcttgatatcatgaaaatgcagacctgtggttggttcatcgaatacaaaaatagtgggttgtgctttctctatgctcagaaaataggctagttttacgcgttgattctcgccaccggaaagagtggaggaggcttgtcccaactttatatatcccaatcccacttcttgtaatggggttagttttttcactatctttttttgattgtattcggtgaagaattcgatagcttgattcactgtcatttccagaatatcatagatgttcttatcttgaaattttacttccagtgtgtcgctcttgaaacgttttccatgacaagattcacattctaataccaaatctgccataaattgcatttcaacggttaccgtaccgtcacctttacattcctcacaacgaccgccttcggtattgaatgagaaatatccggcagtatatcccatttgtttggcaagaggctgttcggcaaagagtttgcgtatttcgtcgtatgcttttacataggtcaccggattgctgcgtgatgattttccgataggattctggtctacaaattcaatatctttcactagctgtacatccccttccaaagagatgaactcacccggccgttcgctagcttcactatattcgcgtttcaatgccttgtaaaagacatcacgtaccaacgtactctttcccgaaccgctgacccccgtaactaccgtcattacattcagtggaaattttacgtcaatgcctttaaggttgttttcacgtgcaccttttatttctatataattgttccacggacgatggcatcgggggatctctatgttttcttctcccaacaaatagcgtaccgtataactattactgtttctttgaagatcgttcatgctgccttgatatactatctgtcctcctaaacgtcctgcttgaggaccgatatcaatgatataatcggcagcacggattatttcttcatcatgttctaccactactacggtgtttcccagttcctgtaactgacgaagtacttttatcagccggtcagtgtcacggctgtgtaatccgatactgggttcgtctagaatatagagtgagcctaccaagctgctgcctaatgaggtggccagattgatgcgctgactttcgccgccggagagtgagttgctgagacggttcagtgtaagatatcccaaacctacatccatgaggaagttgatgcggttggtaatttccgttaagatccgtttggcgatggctgtatcatgtgcatctagttctagagtgcggaagaattcttttaagtcatgaataggtaagtcaaccagttgagaaatggattttccacctacttttacataaccgacttcttttttcaagcgtgttccatggcagacaggacaaatagtttttccccggtatcgtgccagcatcacacgatattgtattttatattgattttcttccagcattctgaagaaagaatctatacaggccttatttctagggccatgccataaataatctttttgttcctgtgtcagttcataataaggggcaaagatgggaaaatcgtgggcgggagcttcatgaatgaattcttgtaaccattcccccatcttttctccgcgccagcagaggacagctccgtcatatacactcagagcacggtttggaatcaccagatgttcatctatacctatcactttaccgaagccttcgcattcgggacaagctccgagaggggaattgaatgaaaacatttggtcattcggttcttcgaatttaattccgtcggcttcgaatttagtgctgaaagagaatagctgcgtacttccgtcagcagagtagaagcggaggaggcaatttccgtctccctcgtacatggctgtttcggcagaatcggtgaggcggctgatactgtctttgctatcatcggctgtcatgcgatctaccagcagatagatgttttgtcttttatcttcggtagctgtttgttgcagaaaatcttctatacgaactatttcacggttaacctctacacgggtgaatccttgtttaaagtccatttctagctgttgacgcagtgtacggccttcacggggcatcataggagtgagaaccgtgtatttcgttcctttaggaaaggagagcatacagcttacaatatcttcaatactatgctttttcaccagttgcccgctaatgggagaataagtcttccccacgcgtgcatagagtagtcgcagatactcatatatttcggtggaagtccccacggtggaacgtggattgcggctgttcactttttgctctatggcgatagcgggtggtatacctttaatgaaatcacactcaggtttgctcatacggcccagaaattggcgggcgtatgatgacaggctttctacatagcgtcgctgaccttcagcgtataatgtatcaaaagccaatgatgattttccggaaccggataggcccgtgataacgaccagcttattgcgtggtatgttgacatcgatgtttttgaggttgtttacctttgctccttttatggatatatagttactttctgacattctttattgaatttggtttaatatgcaaagataattataagttttcttatctttgcaagcgtattaaacaagaataacaaaatgagagcaaaaactattcttcttttattgatagcactactttttacttctgttgtcagtgctcagacacgttatcctaaacgtgagttccgcggtgcatggattcagtgtgtgaatggacagttccaagggatgccggcagagaagatgcagcagctattaataaatcaactaaacagtctgcaaggcgcaggcattaatgcgataatttttcaggtacgtgcagaagccgatgccttgtataaatcttcttatgagccgtggagccgctttcttacgggagtgcagggtagagtgccttcaccttattgggacccgatgcagttcatgattgatgaatgccataagcgtggaatggagttccatgcctggattaacccttaccgtgccaagacaaagggaactactgccttatcacccattcatccgtataataagaatccggaacgtttcgtgaattatgctggtcagctttattttgatccggctttgcccgaaaaccgaaaatatatttgtaagattgtgcgcgatattgttactcgttatgatgtggatgccattcatatggatgattatttttatccttatcccaacccgggcgaggattttcctgatcatgtcagttttgcgcaatatggtcgcggatacagtaataaagccgattggcgccgtgacaacgtgaatgtgctgataaaggaaatccatgagacagtgcgcgagtgtaagccgtgggtgaagttcggtgtttctccttttggtatctatcgtaacaagaaaaatgatccgaatggaagtgatacacgtggtcttcagaattatgatgatttatatgcagatgtgctgatgtggattaataatggttgggtagattataatatccctcagatttattgggaaataggtcatcctgctgccgattatgacaacttgatacattggtgggcaaaacatgccgcttcgcgtccgttatttatcggtcaggatgtgatgcgtacggtgaacaaggcggatgcccgtaatccattacaaaaccagatgcctgccaaaatgaagttgcaacggtcgcttcctaccgtgcagggaagttgtcaatggtatgctgcagcagtggtggataacgccggtaattaccgcactatgttggagaaggagtatcatcgttatccggctttgattcctgaatctccttttatggacgataaggctccaggtaaagtaaagaaggtaaagatggtatggacgtatgaaggtccagtactcttctggacagctccgaaggcaaaggacgagatggacaaagctgtacagtatgtggtttatcgctttgataaaaaagaaaaagtcaatttggatgatgcttcccatattgtagccattacccgtgatcatttttatccattaccttataacgatggaaaaacgaagtaccagtatgtggtgacagcgttggatcgtttgcacaatgagtcgaaaggtactaaaaagaaagtgaaactgtaagaagcgggagtgtttcttttagattttatttctactgccactgcctgggtatttattcatgtaatatcgatgaataaagaattctagggtagtggcagttgatttgtatgctgccatatcttccgagtacgatattgtttatgttgagatcaatgaaaaaaggttataacatctgcatccatcttatggctttctctaatcagtgataaaaagtatctgcaataaatatatcaagtagtgatataaattctattgatctcttgaatttatttccgtcatatataaagtcccgttggcaaaattgattttttttcagattgtgttatgaaacttaagaagctttaccaacggggaatgtatttataatttcacattgacttgtttccctttataggaaatagattggtcaaaggtggggctatccttatctccacatcctttccccggttcaacaagtatgatgttgaatttgcggtttttcagcatacctttgtagttgccttttcgctcgttaatagtcagtgtgcgctctttgtcatcccatttcatcaggatggttgtgtaagcacctttttcataattataattatcaaattcatcttcataaagggtaaattccgcatcagcacccggatagatgcgaatcgtcagattatcccacttcttttctgtagagtattgcactgctggtccccaaggaaggatagatcccgcacgtacataaataggcataatatcaatgggtacttcccgttggatcgtttgcccgccttccaaagtttgcccggtccaaaagtctgtccagtttgctcctttaggtaaatatacctctgtatttccaatcttttttaaatcttttaagtaaccgttctgatttttgtcttgccatgtataaagcgagtctgtaacgggacgtactaggaaattatgtccgaacatatattcggtatccatatcaagtactttgggatctttcgggaaatccatcattaatgggcggataaagctgcctgctttgctggttacctcccaggaagtgctataaagataaggtagtagacgataacgcaggtgagtatatttttctaacgcatcataggcccagtcgcctttttggccgaattggtatatttcgactgctaccggactagaattgtgtgagcgcataatgggttgaaacactccccattgataccagcggacatgtaactcgtgataagctatgttgtttacattattattgtatttccaggcaaagaatcctcccaaatctgtattccaatagggaatgccgcataatgagtaattcaatccggctgctaattgtttgcgcatgacttcccaggtagaaactacatctccgctccacgaatgagaagcatagcgttgctgtcctaggaaagaagaacgagtgagtaggaatactcgtttgtccgaagtagtagctcgttgatgttcatatactcctttattggacattaacgggaaagcattatgtactctgcggaaagttcccaaataggtgagagtattaaaatcctggtccttcagattcatgtgatcgggttcagtagagtccagccaccaaccgtccatgcccagatcgaatatgttctttttcatctctgaccaatagagatcacgtgcaacaggattataagggtcgtatggcctgactccggcattgttgggccaagtatcaaattgaagaagtgctttcagactgtccattttttgatacatttcagtccaagggccgaaagaagcccatacggagatcatgatatgtgcattttgtttgtgcacatagtcaatcatttctttgggagttttgattcttggagtaccgtaacgtgcgcttttatcttctccgtttggaagatatttcatatattctttatcgcccattttgttgatgtaacggggattttggaacttcatggcattccagttagagtcgcatccccaatattgccaatcctgtataatgccatccagagggactttcagtttacggtacttatctacaacttcgcataattcatccgggcttttataacgttcgcgacattgccagaatcctagtgcccaaagcggatagagaggagcctgtccagtcagtttgcgtacattggctattactttatctgcattgccgccgtaaatgaaataataatctgcacaatcacctacttccgagtcaaaagacatttcttgtggattgtctacaaaagtggtgggggagtaattgtcccaataaagggcatatccttttattgaatgaataaacggaatgcaaatgctcatgttttggttacggagaaatagtttctgattccgttggttcacttttcctgtttgttgctgtcctagtccgtaaatcacttcatctttgtccagtaagaaagcttgacgaacattatatgatggaacgccggcgtcatcgaagggggtgaattgggtaccataatctttatcagtcagtaataattttccttctttgtcggaaaaacggatacctccggtttcaggatttacttctacttgtataacattgctgctgagtgttacatttttccctttctcaccgaaagttacagaggtggtttccggtgttttgataatgaccagactttcttttttataaggtttcttaatgggggttttataaatacggacaatggtgggagagtaaaattctactttgacatctatttcttgtgtagtatacgttattccttgtgtggtgtgttgtacactctgtgcgatgccatttgttgcaatgatagttgctccaattagggttagagtcatttttttaataaaattcatattcatagtattttagtgttttgtactgttacaaaggtaaggcgaaaagctttaaataggcaacaatgaggttgaatccaataataatcaggttgatttctttgtttttctggcgtattcggaggggcggcatccatacatttcttggaagcacttacttagatagctggaactgctgaagcctgtgcgttctgctatttctgcaatactgagttcgttttcagtaagtagttgcgcagctcgttgtaaacggatgttacggatgaaaaggctgggagactgatctaataaatttactagtttgcgataaagtcctgttctttccatgcaaaggtctcgacttagctgttctactgaataaccgatgacatgcatattcttttctacttgttctatagcccgtgctaaaaaagcggattcggtattggttgttttaggatgatccggttgcttgtcgttttcaaagcaagtggaggttgctgtgccgttcttttccagacgtgctttttgttcggcttcgtaattgttgcattgctctatcaggttgcggatgcggagtagtagaatttcctctttatgccgacgctctattttttttcgggtccaacatatgtaaagacggatacttcctactgtaataaatagtaaaatgagcaggtaaatagtataagcggtggttgttttccaccaaggggcatggatggtgagttttataacggttctttttccattccactggagaggggtatcggatgccataactttgaatgtgtattctccgggaggtaaattagtataggacgcttgaagcataccattacctgctgtggtattgcctggtttgctggtgaaaacattcatccagtttttatcaataccttctaattgataacgataataggtgcgttcactattgatatagttcaaagcagagaattcgaaagtgaggaaattctgattgtagcccagttctatttcttttgtataagggctggcttggggaagttttatctttttgccgtatagccgcaaacaagtgaacactggggaataggggagttccggagtgattgattcattatcaggattgaagatattgaatccgtctatgccaccgaagtaaagtgtaccgtccgatgctttgaaaacagcctttgttagatattccccttctaatgcgccatcctgttgattgaaattggtgaagtatggttctttatttttctgattgatgtggatacgtgagattccattgcttgtagttacccagatatcattgtgatcatcttcaataatgccttgtacaaagttattacttaatccattttcacgataaaaaatgcgtggggtttgctcgtccggtataaaaagttccagaccatctgctgtccctgcccaagtccagcctcgtgtgtcagtacatagggccgtatatgtttttcccttgaaaaaggcagtttctgttcctctgttgaatttcttttttacttcggcagggatagatgaattatgttcggagataagggtgcgtgttccatctttttcagtggacaagcggtaaatatgagtatgttctttcagatagatcattcctttattgtcttcggcaaaactttctactgcaatatctttttcaggagcaactggaaaattgttacggtttatttgggtaagtttatgcatggacggatggtaatatagtaatcctcggttgagagttccaatccataatcctccttgtcggtcttggaatatagtgctgatttctgttgagagtcgttgtccgtttttagtttccaaaataggaatatattgcagtttttccttagtaagatccagtatccaaaaaccatgtacacaggttatatacgctttttgattgtcgggggtgatgattaaagtattaagtgcatagttttcttcaagtatctttttccatgtccgttggcatgtgttgaaacagaacaaaccacctttatatccgttgcgtaattggtaaaagctgtttggagctttgacaaccaaggaggttcgggcaaaatattgttgctcggtttccgcataggcagcagcactgtatagtcgttttctgcttgtcatgtcataacaatctacttctcccgtattatagaacaggtaaagtgaatcattctccgtatttagatcttgtagttggcgggtatcattgggggataaagttatatggattccggtttgtaattcttgtaatttatggtctgtcagtatccaaatgtgtcctgcacagtcggcaaaaagattttctatcggttccggtatatttttattttggaaataagattctaaatctcggatatattcctctttgtagagattgattcccattagtttgtgatagtctttcacccaaagtagggagtctccactttgataaatgcggtagaacccgtcatattgttttaaaggatatacatttttatccgtccgatgcagataactgaaatgtataccatcatataaattgatgttgccattagtagtaaacaccattcttccgtcaggtagttgtaggatatatcttatctggttgtcgcttaatccgtgtgaagtattgatggaagtaaacaggaaatcattggcatatagtggcaatattatactgatatataaacagatcagtaggcttatttgttttttttgatgatttcccataatcttcctatttttagtaaagcaggaatcctgccactccgcaaagtataatcattaatataggattaattttgtatttccgtgtacctataaaggttactagaaaaataattatactgatgataaattgatacaaatctatttgatagctactgaagttttcagcattcatcaagacgagtgcagccgctgccagcagacctaccactgccggacgcaaccctttgaatacggcttctacaaccggatgcttttggtatttcaagaagaaccggctgatgattaccattaatatgaatgatggaaaaactacagcaaaagtagctatacaagaaccgaatatggcccagttttcattgtagcctgcattcaatactgcagtatatcccacataagtagcagagttgataccaatggggcctggtgtcatctggctgatagcgatgatatctgtaaattcgctggcactgacccaattatatcttgttactacttctccttgtatcatggacaacatggcatagcctcctccgaaaccgaagagacctattttacagaatgtatagaataaatatagaaaaatcatttggatgaatatttatgtttgtacttgccatatataaaaccccccacgcccgctattatgataatgtagacaggggatacgtccaatacccagataagtaatgcggatactattggtatccagatagtgtaacggtttatcttggccgattttgccatggagaaagttggagctgcaataagggctactactgccggacggattcccttgaatatattctctacaatttggtattgtttgaactgttgaaagaataaggcaattgccaacataataaagaaagaggggagtattgtgcctaaagccattgccaatgctccacggaaattacgcaatttatatccgataaatatggcaatatttacagcaaatattccaggtacagactgagcgagggctaataaatcaataaaatcctctttgtcaatccattttcgtttgtccactatttcatcttgaattaggggaaccatggcatatcctccgccaatggtaaatagtcctatctttaagaagataagaaatgattgtaaatagaaattcatttttttaattttgtttcatataagtgcttggtggaactctgtagtatttcttaaatgtatccgtaaaatatttgggatcactgaatcccatcatatccgaaacttcggatacagtataacgtttgctttttaataaaatgctagcctcgttcatacgtactttacgtataaaatcactgggcgaatcattggttaaagcctttattttattgtataaactactccggctcatattcattgcatcacataggttttctacgttcatttctttgtttatactactttttatgatgttggtggcttttaaaagaaattcttgttccaaactgatcgtcggatcatctgaaacctcgtctgcattgaatttgaattgtgagaaacgctttttcatgatttccctgttcgccagaacattggctatatttgctttcagtacttccatgtcaaatggtttgactatatatttatcggctttggtctgtaaacccttgatgatactttctttatcgttcaatgcggtcagcaatatgataggtatatgactggtttcaatattatttttcaatatattgcacattttgtctccattcatgataggcatcattacatccgacaatatcagatccggttgtcgttccttgataaaatccagtgcttcttgcccatttcctacatcagaaacattatagtcttccgatagcgtatgcaacaggaaagtacgcaattccatattatcttccactatcagaatggaagcggcatgtgttttggctggcttgtttttgatctctttcaccagttcttccggattgccttcgataacaggcagaggatcaattacatcagcttttttgaatatacggtagttgtatttccggcttttgatagggaatgccagtttgaaggtagttcctacattttctatactgctcattgatattttgccggcatggcttttgatcagtttgtaggtaagcagcataccgatgccgcttcctgtgatttgcagattgatggcattatttcctctgaagaggcttttgaacattttcttttgttcattggcagggattccgattcctgtatctgtaatagtgatgaaccaatgacttttatttttctgagtttgtacagtgacattgcccccttgacaggtatatttcaaggcatttgtcatcaggttacggatgatggaatccatcttatttctgtccagccatacttcctggctttcaaaattagtttcaaatattatatttatctgtcttttgcgagcatataaattgaactgttccaaatagtttttgatataattgttcaattcgtatcgggatacatatacagtggaggtatatagttcctctttttcaaaattaatcagattactggctaactcagacaggttgtccgtattttgtatagctaggttgatattgattcttccctgttcggataggttttcgtttttaaggatctctcccaaaggagcttttatcaaagtcagcggtgtacgtatatcatgtgccgtgttgataaagaaccggattttttcttttgaattgtttctgtctttcctaagccacaaataacgcaaaacaattactccgaccagtataaaaatgatcagataaagaattcctgcccaaaaagtagcccaccaaggtggggttatggtaatgaaaagtgaacgttcttctaacaaatggtggtcatccatcaggatggctctcactcttaatttatatttaccgggactgatgttagtgtaacgtatgcggttatcattcgtgagtgaagtccattcatcataaaatccttccagtttccaagaatagactatgttggagggattatcataattaatggaagacacatccagtgaaaaaatattctggtcgtaattcagtatgatgtgccgggtatcatcaatttcttcttttaagggggaacctttttcaccaggcattactttctggtagagcagtcggaaattgtcaaataccattttggatttaaattgatgaggcagcgtgacagtatctgccagttcaatggctccgtctccacatccgaagataaattttttatcgcgtgtatgtactccggcagcttggttaaagctggtagacatcaagccttgttcttttgtccaattagagaatattttttcttttgttttgaaacgggtcaaccctttttctgtactaatgattaaatcgtcttccagagcaggcagtatgcaatgaatattattagatatcagagctgaattattgatatggtaattagttactttttctgtataattattgtaaatccacataccggaaccatgtgtaccaataaaagtgatgttctttttactttgataaatagtatttatacagcctagctcggagtctagattcaccgctttgagctcttgattgaccttattgaactgatacaatccattgatagttcctatccataaattatgggcgtccttattggtgatataggtgatagggaagtccatattgtaacaatgcatttcctttgtatccagatcgtaacttttcaagttgtaatatcctccggcccaaatcagattatcccaatccttataaatacaacgaatatatttatccggttttacggtgtcatcattcaatgtttggggaataaaatattgtgtggtcatgtttttcttatctattttgtacattcccgacatatatccacctactaaaataactcccggtcgggattcacatatagagataaatacatgattctgattaggcgtgtcatgctgataagttgataataaattcgtccattgtttggtagaaggactgtagcaacatacgccattattggttgcataccaaatgtctccttcagaatcttccaatatataattcacttgattatctatcagtgagttagggttgtcataagagtgctgtatccattgatatccgggatatttctcggaatatacagtgatgcctataggatagactgccatccataatttttgatcatcatcaatatagatatcattaatgatattaccgttcattttgttggaatggttgtggtcggcatttagaaaatttgtcaattcgtaagtgcccaagtttaatttatatacgcctgcgccgttagttgctattaacacctcgttttcattttctttacttgctatgatagagttgacattaatgtcttgtagtccgttgtgtacatcaatcagttggcggctatggatattgtatagataaataccatccaataaggtacctattactaacatttgggtttccggatgaaaatagatgtagtttactatatggaaattatccagttccggatgcttgattacttctaatcgcccatgattcagtcttgcacagtaaatcttgtggctggaggctagaaaatattgattgttcgtagatttcgcaatatatgtgatttcttccttgataggactttccagttgaataagttcatgggtatctatgtcgaaaagatattgtttgtttttggtgcaaagcaatatattattgtctttggagtcaagaaatgaagcggtgagtggcagcccgctgttgcttttgtccttactggcaaaatcgcaaactagttcaaatttgtcttgtagagaattgtatttgaatagatgaccggtttttcctatctcccaaaccactcctgccgtatctatctgcaaagtgttcaagttgggaaaaaagttcagtagttttccattggctgttaagctatagtgtgtgtattgttttccgttatacctgtctattccttcgtgagtgagaaaccacatatagccttttttatcttttcgtatagatagaactctacggctgctcaaaccattctgagtatccagatactggtatagttgagcaacggcaggtgttaccaaaataacaaaaaggcatataagtaaaagaattcttctcatattattaggaggcaaaatccttacaaagttcgtaatttcccttaacatatcaaaatctgttatatacaaaaaaagcggtaatcagtccgactcaccgcttttttagtaaatataacaaatcgtttttattttttgttcatttcaacccattttctagcattgacaaatgcttccatccatggagtaatctgatcgttctttattctatcagccggataataagcattttgccatgggaaacaagagcgttccaaatgaggcatcatggccaaatggcggccgtcaggactggccagaccggctacgctgtaatccgaaccgtttggattgccaggatactcatcgtatgagtatttcaatacaacattgtattgatcttcatcatatggcaatgagaatttaccttctccatgggctacccagataccaagcttacttccgcttaacgaaccgaacatgacgcttctattcataggaacggtaacacctacaaacttggattcgaatttatgtgaatcattgtgcagcattttcgctttttgggtgaagtcggggttaatcaggtttaattctatcatcagctggcagccgttacatacgcccaatgacaatgtatctttgcgtgcatagaagttatccaatgcagctttggctttgggattgaacaagaaagctccggcccatcctttagcagagcctaaaacgtccgaattagagaacccaccgcaaaatacgatgaaattgatgtcctccaatgtttcacgtccgctaaccaaatcagtcattgttacatctttcacatcaaatcctgccaaatagagcatataggccatttcgcgttcgccattggttcctttttcacggataatagccgctttgatacctgtcggagtacgacggtcggggttaaggccgaattgtgaaagtttgccggtgaatgatttgtcgaatacaaattccaaaggttgtttcttgtagttctcgaaacgttttttggcacagccgttcatgctctgcttgcagtctagcaagtaagaggtagaataccatacatcgcgcagatagtctatgccgaactggtaagttgcatctcccttttctaccaggatatgccgttcttcagtcggtttacctaattttacgtagcctatgcctgcgtcttccaagatcttttttacttcttctttgtgcttattttttacctggataacaatacccggattttcggcgaacaatatcttgatgatgtcatcctccttaatcttgttcaggctgatttccataccaccttccatattcgagaagcacatttcaagcagtgtggtaataagaccaccggcagaaatatcgtgaccggccataatcagacctttatttactaattcttgtactgccaggaatgcgtcacgaaaatattcaggattttgtacagtcggtacatcgtcacctattttattcaatgattgtgcaaaagcagaacctcccagacgtaacttgtcaaaactgaaatcaatatggtagatagtgctcttttcatcatttaccaatacaggagaaaccactttcttcacatccgagacttcgccaccggctgaaacgatgacagttcccggactaatgatcttctcaccgttaggatatttctgggtcatagataaagaatcttttccggtcggtacattgatttgcaatgagcagcagaaatcggaaagggcttttacggcagtgtacaggcgggcgtcttcaccttcctgtgcgcgacatggccacatccagttggcagataaggaaacgctgtccaatccttctgccatcggggcccatacgatattagtcagtgcttcggctaccgacaaaacagagcctgcggccggattggctaaggcggcttggggagcatggcctagagaagttgctatacctttttcgccacgatagtcgagggttactacaccacaatcgctcagaggcagctggatttcaccttgacattgctggcgggcgattttaccggttacggaacggtctactttattggttaaccaatctttgcaagcaacagcttccagctgaagtacgcggcggatatattcatttaatttggaagtttcgtatgaaacattttcataatggcgttctacagtcttgtcaaccatgtaggtcttcggagaagaaccgaacatttgatctactgccagatcgaacggacgtaccccatcggcctgttcgaaagcaaagcgggcgtctccggttgtttcacctacagtatacatcggcgcacgttcgcgatcagcaattttttgtacatgttcaatagccgattcgtcaatcagcaatcccatacgttcctgagattcgttggcgataatttctttggcagacaaagtctggtcaccgataggtaatttgtccatatgaattaatccaccgttttcttctaccaattcggataaacaattcacgtggccggccgaaccgtggtcgtgaatggaaacaatcgggttgttatcttcttcacacaatgcgcggactacattataggcacgtttttgcatttccgcattggcacgctggacagcgtttagttcgattcccgatgagtaccggcctgtttcaacagaagaaactgaacctccacccaagccgatgcgatagttatcaccacccattacaacgactttgtttcctttttcgggatgtcctttcagacagtcgcgctgagtaccgtaacctacccctcctgccagcataatcactttgtcgtatgcatacttctcgccgttttcctggtgctcgaatgttagtacagaaccacaaatcagcggttgaccgaatttgttaccgaaatcggaagcaccgttggaagccttgattaagatctgttccggagtctggtataaccattggcggacaggaaggatatcttcccactcgcgtccctcatcagtacgggggtaagaagtcatataaacggcagtaccagcaatgggccatgagcctttaccaccgcccatgcggtcacggatctcaccaccagtaccggtggatgcaccgttgaatggttctacggttgtcgggaagttatgtgtctcggctttcagtgagataacagtcttgatatctttgataatgaaataatcggaagtggaatgatcggccggagagaattgctctactatcggtccttcggcaaatgctacattatctttataagcagaaataatcttgttgggattttcagcagtagttttcttgatcatctggaacaaggaagactccatttcctgaccatcaataatgaatgttccgccgaatatcttatggcggcaatgctcggaattgatttgcgcgaagccgaatacttcggaatcggttaatttacgtcccaaatctttttcaaccttcagcaaatagtccatctcctcacgagaaagtgccagaccttctttttcattgtattcttcgaggttctcgatgtgaacaatcggctggggtttgatgttgactgtgaaaatctcctggttcaatcccttatacatacgttgcagcataggatcgtactcggcgttttcgtcttttacagggaaatattcctcaatgcgtaaaacacctgtaagacccatgttctgagtgatttctacagcatttgtactccagggagtgatcatttcccgacgcggtccgatgaagcaacctttcaggttctcttcgttctctacagtggcttcaccataaagccagcttaatttctgaatatcctcagaaggcagttcctggctgacttctgttgctattacacttttagtgggtgttctgaaaaatagaatcatagcacttttatagttgttttgttaattgaaaactagttctaatatcaagggtctattaataaggtgcaaagttatataaaagagacggggtatgaaagaattttgagtgtaaatataggtactttcgtaaaaaagtagcatctttgcagcatgaattggatagaacaagtaaccatactcgatttattggtgaaagggcttatcgtcggcgtagtggtttctgcgccgctaggtcctgttggggtactttgtatacagcgcacactgaacaagggacgatggtatggatttgttactggtctgggagctgcccttagtgatataggctatgccttgattacaggttatggcatgagttttatggatgatttcttggcaaagaaccaagtattgttacaaattatcggcagtatcatgctgttctttttcggtatttatacttttcgtagtaatcctgtccagtctatccgtcctgtatcctctaccccgggcagttatcttcataattttgttactgctttttttgtgactctctccaatcccctcattatattcctgtttataggtttgtttgcccgtttttcttttgtgatgccgggcagtcccataggctttcaactggtggggtatttggctattgtattgggggcgcttctctggtggttcggaattacgtattttgtcaataaagtacgcacccgttttaatttacgcggcatttggattttgaaccgtgtgattggtattgtagtgatgctgatttcagtcgcaggtttcatttatactattttaggaaaaacgatgtactgacaaagaaacatatcttgatgtatcatacgttggttttttgatttttaattattaattttaatttaaaaagtatgttcgtttccaagcagttgaaagaaaagaatatagccgagtatcttatatatatgtggcagatagaggatttaatccgtgccaacggctgtgatatagaaaagataaaaagcaccatcatagctccttatccgttaacggaagagcagaaagcggaactcactcaatggtatatggatttgattgagatgatgcgtcatgaagggattatggaaaaaggccatttgcagattaataaaaacattataacttggcttaccgaccttcatttgcagttattgcgttcccctaagtttccttattataattctgcttattataaagtattgccctatattgtggagttacgcgctaaaggtgcggataaagaggagcctgagctggaaacttgttttgaggcgctttatggtatcttattgttgaaattgcaaaagaaagaaatcagtgaggaaacaagaaaggcacaagaagcaatctcgacattgctggctatgttgtcaaactactatatagaggataaaaaaggagaattggaattctaataaatgaaatagaaatgaagaatatattggtgactggtgccaacggtcaattaggaaatgaaatgcgtgtgctatcggctgaatacaaggaatatacttgtttttttacggatgtagccgaattggacatttgtgatgagcaggcggtgatgactttcgtgaaagagaataatattcatgtcatagtgaactgtgcggcctatacggcagtagataaggcagaggatgatatagagttatgtaccaagctgaacaagaacgctgtgagctatctggcgaaggcggctgaagccaactggggtgagtttattcagatatcaacggattatgtgttcgatggcacgaaatatcttccttataatgagggagatgttccttgtcccaattccgtttacggcaagaccaaactggccggtgaaacgaatgcattggagtattgcaaaaaaacaatgattatccgtaccgcatggctttattctacttttgggaataattttgtaaaaacgatgatccgtctgggaaaggaaaaggaaactttgggtgtagtctttgatcagattggtacaccgacatatgctcgtgatttggcacgtgtcatctttacagccatttataagggagtggttccgggagtttatcatttcagtgatgaaggggtatgctcctggtatgattttgccaaggctatccatcgtattgccggtatcacgacctgtaaggttagtcccttgcatacaaatgaatatccggcaaaggctccccgtccccattattccgtattggacaagaccaaggttaaaactacttataacattgagattcctcattgggaagagagtctggaagcatgtatcaaagaattaaatgcataataaaatatgaatagtgaaatagaaagaagacggacgtttgcgattatagcacatccggatgccggtaagacctctctaactgaaaaattgttactttttggcggacagatacaggtggccggagccgtaaagagcaataagataaagaagaccgccacatccgactggatggacattgaaaagcagcgtggtatttctgtgaccacttctgtgatggagtttgattacaatgattataaaatcaatattttggatactccgggccatcaggactttgccgaggatacttatcgtactttgacagccgtagatagtgtcattattgtggtggatggtgcgaaaggtgtggaaacgcagacacgtaagttgatggaggtatgccgtatgcgtaatactccggtaatcatatttgtcaacaagatggaccgtgaggcgaaagatccgtttgatttgttggacgaactggaggaggaacttattatcaatgtacgtcctctgacgtggcctattgaaagcggtccccgtttcaaaggtgtgtataacctttatgaacataaactgaatcttttccaaccttccaaacaggtggtaacagaaaaagtggaggttgatatcaatacggaagaactagacaaccagatcggtgctcctttggctgaaaaattgcgcggagaactggaactggttgacggtgtttatcctgaattcaatgtggaggagtacctgaaaggcgagatggctcctgtatttttcgggtcggcattgaataacttcggtgtacaggaactgctggatacatttgtggaaattgctccgagcccccgtcctaccaagacagaagaacgtgaggtggaacccgatgaaccgaaatttaccggatttgtctttaagatcacagctaatattgatcctaatcatcgttcatgtattgcattttgtaaaatttgttcgggaaaattttcccgtaatactccctattatcatgtacgtcatgacaagacgatgcgtttctcttctcccactcagtttatggcacagcgtaaaacaacagtagacgaggcttgggcgggagatatcattggtttgccggataacggaacgttcaagatcggtgatacattgactgaaggtgagaaacttcatttccgtggaattcccagtttttcgcccgagatgtttaaatacattgagaatgctgaccctatgaaacagaaacaattggctaaaggtattgaccagttgatggatgagggtgtggcacagttatttatcaatcagtttaatggacgtaagattatcggtacggtagggcagttgcagtttgaagtgatccagtatcgtctggaaaatgaatataatgcaaaatgccgatgggagcctgtcagcctatacaaggcatgttgggtggaaagtgatgatccggaagagctggaagctttcaaaaaacgtaaatatcagtatatggccaaggatcgtgaaggaagggatgtattcttggctgatagcaattatgtacttcaaatggcacaaatggacttcaagcatattaagttccattttaccagtgagttttaattttttgttggaggtgtgtcaaaaatccctaaggggatggacacacctccttcttattttcacgaaatattcttttttactttattcctctggctttataaattcgttctttagcgttattaatttgttgaaacttctcttctgccgcttttttcacatcttcacccaatgtagcaacacggtcagggtgatgttttaatgccaggcggcgataggctgtacgtacttcctcattggtggcagacgggtcaatttcaagtactttgtaagcttcttccaatgagtttccgctaaggtttagcatggattccacttctttgggtgacagttccatgcattgtgccacttcttttaatgctgctatttcctcagagcatacgcttccgtcacttttggctatgtttaccagaaagtccaacaattgcaaccgttgttcgtaaggcaggttcgcggcaatctgtgcaccacattcatggatggtatttttaaatgccatcggattttgacgctccatctgtttgcgctgttcaaaaagattcagcaaaatctgttctccttggatgactgcctcttcgccgaaattcattcttaagaattggcgtacatattccatttcgctgtgcatgatgcgtccgtctgcacggatgatgtaagacgccataaccaacatggagaataaaaaactattccgctggccttcatcatagtttccagcttccacctgtcctttttcgtatgtattgccaaaaagtccgttgtttccatccagcaatgagcctaaggcaaatccggccaaagctcccagtggtcccatagtcatgaatcctagaataccaccaatccattttcctgctcccattattcttttaattttttcgttttggatgcaaaaataaacaatcttggatgaaaaaagtctctttgccgcattttttactatctttaccaatcaaattaaaaatactatgtttcagaaacttgtagcaatagaacctgtcagtttggttctgtcagcagaaaaaacgttatattcttttgcagatgaggttgttatgtactctgatattccagcgggagataatgagattattgctcggatcggagatgcggatgctgtattgttaagttatacatcacaaataaaccggtatattttagagagatgtccgaatgtccggtatatcggtatgtgttgttcactatattctcccgaaagtgcgaatgtggatatccgttatgctaatgaacgcggtattacggtgacgggtattcgtgactatggtgacgaaggggtaatagaatatgtagtcagcgaactggtgcgttgtcttcatggatttggtcagaagccgtgggaagggattccccgggagattaccggcttgaaagtgggtattgtaggcttaggaaaatctggtggtatgatagcggatgcaatgaagttttttggtgcggatatagcttattatgcccgtagtgaaaaaaaagaagccggtgcgaagggttatcgttttatgcctttgaatgaacttttgacatggagtgaagtggtatgctgttgcttgaataagaatacggttttgttgcatgaggaggagttcaaggcacttggaaatagaaagatactatttaacacaggattgtcacctgcgtgggacgaatcttcgtttacccgatggttggaggaagataatctttgtttttgtgatacattaggagcattggggagtacggcattgcttacccatccgcatgtgcgttgtatgcaagtatcaaccggccgtactcgtcaggcgtttgaccgcctgagcgagaaggtgctggccaatttgtcagaatacaatgggtgaagtgatattgagcagggtgtttactacagaccatcctgcaatctctgatgtagcactgtacacttctactactgcgtgtacttgttcatttttgatttccactttttgagtatcacttgtaaatccaggggtggactgtatggatacctgcatattgtccggtcctacggaagccaatgaggctgcgacagatacatttactttggttggaaaaacatttatagcctctgttgcattgccggaaaagacaatgcatctttcctgttgcagctcttccttgtaaaccgatgtgcctttcaaagcatcaggtcctttttcattgaaaaaacgagctgtagcgtttcccatcaaagaggtggttcttaatacatcaaatcctccgatggctccggataccaagtaaacccgtgtatcgtttgccttggctgtttctttgactttctcataaaaagaggtgtctgccaaagctcctatggatagggtgataatggaagttccgttttccaaggtaggtaaggccagttctttcattgcggcaggcgaggctgattccactagataatcaggttttaactccaacagttcttttaaagtgtgacaggctgcacacatttttccgtgttgcctcattttattcgcaatgcgttcggcctttgatgctgtacgcgaatatacgcctactaactcatagtcgggcaacattcctttgacaactgcgtttgttataatttcagcaagtcgtccacatcctactataactaatttattcatagaacaaagataggtattttcatcatataaacctattttgtgaaaaatggaatttattgtgatatgtttcttactctataggtatgtctgtccgagctgtttttagtgtgcttcttaatcccctgtctgatacattaaaaaattatacttgtaatttaaaaatagtatgaggaagattcgtcctgatcaagaatattttttaaggaataatatttacgttttatataacagacagcattattacctgacagaataaatgaaaagtgatggttcagagtcgaatggaaaaatttcttgtaaaaccaatatgattgcatacttattccttaatacatgttttttagcatatttttgatgaatattgcccattaaatttgataaatttcgccttatgcgagaatgcggaaaagtttatacttgtattgagaaaaaatgaatgatatactattaataaaatgttgtattgtctatgaggaaattatttattttaattcaatattagtatgaaaaaaacttacttagatgctttaatgagtatttttacacctattcctttgaataatggtttttattttgtggataacaacgggacgattgattggattctgtcgaatatattccttttagggtacgtgctacctgtagagggggtgatgataggtatctttttctatcttttattatctcatgccatagaacataaaactcaactgatgttccgtgaaaagttcaaacttgttattaatttgttccattatacacatacgcctttggtggtgttacggaatcaattggaagaaattgtggttggtaatcttcctgaatctgctgttacaaagttacagcaggctctgaaaaatgccaatcaggttattgattgcagccagagtgctatttcacttggtaaagcggattggaaaacgattcctcgtgcttctgtggtagagtttgagctttatgcctatatcatgtctgttgtcggtctatgccatctttatgccgattcgcgtcatattcagttaaaagttactgcctgttctgattatatcagttgcaggatcaatgaaaccgtgatgacggtagctcttcagcaccttttgaacaaaatgatagataacacacctcctgacggttgtataaatattatcctttcacattcggcaagttcttgggagttgcgtatcagcaattgtgaaaagataagaaatggaattttaaagatgattccggccatgcctgccttctcttccatatataattatggtgacttatggacggtaaagaaaataatccgtttgcatggcggtaaaataatcggttatggatacggaaaagtggttacttaccaggttattatgccgaaatattttcaatcccaatccgaggcagataccggtatggcgctatctgtaaagaagcaaaaggtttacttggaagaaaccgtatctacagcagaaggaaagagccggactgataaaaaagagagtaaatcttgtattttgttggttatggcagacaaaaagtatagtgattatttaaggatgactctttcggagtatttcaggtgtattgttctggacgctcccgatagaataataagtgcctctgttcaaaataaccctgatgtgattgttgttgacgaaactgtgaatggagtctatggagaggaactttgttctaaagttaaagcagacaaggccatagcgaatattccggttattcttttaattaagtcggcagataatgaaagctatttgtcgcatgtggggagtaaagccgaccggctggaattgcggagtgcgaatatttggaaattccggacggacattactatgcttatagataataatttggtcagacaggaacggatgaggcgatttatagccgatacggttgctcctacacttcccgagaagataagaaaggacgatgcttgtctgaagtttataaataaagtccggcagttgttggaacagaatttggcggaagagtcatataccgttgatgcgcttagtgaagatatgggaatgtcccgcactgctttctataataagatgaagaaaatgacaggacaggcgccggccgattatatgttgacattcaaaatggaaagagcaaagagattattggcctctcaagattactctatcggagaaattgcaacgatgttgggcttttgtgacagtcggtattttgcaaaaaggtttaaggaagcgtgtggtatatgtccgtcaaagtatatcgaaaccataataggctgatgtgatatgatgcggattctccataccttattttatgataggctgttttgacatgttttcattgtagaggtggcaaagtccctgaatttcgatgaaatgggaagaaatgaaaatctactcgtgaaaaagagatgtctatgacgaatctaaaatgaagatttaaggtaaatctaaggttgtttcttcttgtttttatgaatagtttgtttactttgtgccagataagtaaatatagaaatcaaatgaaaaacaaacaactattatgcgttttattccctttgttggtggcgtgtaccgggcaacgccaccaacagcaggtatccagtgagtcaatcatagaagaagcggtgcggaagggagaagttctgaaaggggagattgttcccattgatacggctctgttccggtatgcctatcgtatgcgtgtacagggtgacaaggcggtgatattggatttgcacaatgccgattactattatcatgtatttacttatcccgattttcaatatcagtcttcttttggaaagcgtggggaaggtccgggtgagtccatttatgcggcgaatatccgttttgcagggcaggacacggtgtgggtgcttgatgacggcaagggcaggatgtatcaatatagcggtatagccggggggaaaactcccaaacaggaaaaggatattttgttggataagcgcttgttccgttcccttgattttgatttgaaggatgcctctactgttgttatccccgattattccggtgagaaccgttttggttgggctgatatccattccggtgaattactccgtaaatcagaacatatccccgtatccgatcagaaattattgaaagagagtgcacctgccgttgcgcaaggctggaatagttttatagcattcagtccggataaaaagatattggtttctgtcactcagtttggggataggcttgatatttatgatatgcagtcacaaaagcatataggaaaattgggtgaggatggagagccccaatttaaagtgagttctgaaggctacggacttccggcggggagaatctgttattatgatgtgcaggtgactgaccaatacatttataccatttatgacggtcgtaaatttaaggatattatgaagttggccgatgcctatcagcagggtggtaaaatattacgtatatccacccacgagggcgatgtggtgaaaacctatgtattggatcgtcctattgccggtatttatgtagatgaggctgccggtatgttattcggtttggatgtcaatgctgacgagcagatagtgaaatttccccttgaattggaatagaggaagttttgaaaagaaatcaccgtgttatcctataatggcggataatttattgtagtgtatggttggaaaaacataagttcgttttccgaaaagaaccggatcttttttgaaaagaacagggccttttttaaaaaggttctagtgttttatgagctggactgtctgcttataccaatttagaattcatgcgttttttctttcaaatccttcatccttatgtaagatgttagttcttagctgattataatgacggatttgtacccggaaagcttcagccaaaaaaatccttcagggtgaaggaatatggatgattttcaagtttgctttcatagagtttaaaagtgagaattatctgtcacactgtcacagtactaattattttgctgaaaaacaggttgttaagatgtgacagatagcgtgacggagagtgtgacagataaaagtctgtcacagtgttattgtcctgcactgcattgtcctgtggcctataatgaatgaatcagaatatagtaacgagaatctctttgtttcccgtgtattacagtgtgttccactgtttggtacaattaattttatatggtggaacaaatagttttatatggtggaatatttagttttaccttgatgaaataaattattccaccttaatgaaacaactcgttccgctgtgagaaatgctttgttcctgctgcggtgggttggtgattttaagtaagattgtataccttatgtatgcttattattggaaataggagctattcattcgtttgaggagataaccagtcggtatcctcctttttctgtcactatctgatattcgggaaagtccttgagtgaggatttaagggtggagatatgactatatattttattttcgggattgttatctttcggccagaaagcatttttaatatcttctttagtcaaaagatgcttgggcgttttgataaacagttccagcagattgaaatctgccggtgctatgtggcaaagccggttgccaatatatagtttcttgctttccaactttaaagtcattttccccaattgtatgtagtccggattgtcaggaatttcttcacatggtatgcagtccggattggcgggagtttcttttttctgtggttttttcagaaatgacagagacacccatatcaagacaatgaaataagcaatgatactccataacacttttggagtggtatgttttactatttctgtccaatgaatcatagcccatgcctgtacgccggcggttcttttagcgtctattgcttgtacaggggtgacaagagctttctggaaagagattgaatcattgtcactgaatacctttttcttgttgtagcggtaaatgattcccgtcttagcggcggaaactccattcttttcccattcttcttggaagatcttattgaaattgtctggattgacggggataatccttgtcatcacatactggttggccagttgggtagccagtgactcatgggtgctgtcttcaaaataaatgatttctagactatcaccgtattctatttggacaccttttacctttctgcctaaagggcgataatgaataagaatcttgtttaagcgttcttgataatcaatattgattgcttcacgtaggctgtccttcattgttatcagaacatttgttttttcatctttaaaagcaacataacatagcaggatgaatacaatccatcccaatgcaataaagctaaacttgaataagtttgtcggtattttcatgtttcttgttcatgttagagattgcaaagatacgcatatttataaaaaaggaacttataagttaaaaaaagaatatgatttaattggatgaaccttatgatttggagatcagggcattaaaataatccttccgatgaaatggggattttttgaatcttaagaaaactttaaggtcaccttaagatcaatttaagggaaaaaatttgcgtgcccgatagatgttctctaccttcacacaaaaaatgataaaccaatgaaaaaagtatttgtgttatttaccgttgttatgctaatggcggtaatggcttgggaaaagcaatccggaaagccggtagagagtgagtttcttttagataatgtggaagcattggctgcaggagaatccgggtatgatacatgtctgggtagtgggaatgtgacttgcagtaccggagaaaaagtagagtgcgtaattagaccttttggcttggattaatcaatgagatacctttgtctattactatgtgtttttgctctttttccctcctgcaaggaatcagaaaaagataaaatcgctcgtttggttgaggaatgggaagggaaagaaattctctttcctacccattccatctttactattcaagggaaggatacagtggacttttctttagcggatgcggattataaggtagtgacttatatcgattctgtaggctgtaccagttgtaagttacaattgcctcgctggaagctgtttatgcaggaagttgattcaacgttgaaccgtccggttccctttgtcttctatttccacccgaaagatatgaaagaactacgttatatcacccgtcgtgatgcatttatctatcctgtttgtttcgatgaaaaggacgattttaaccgattgaatcactttccggatgaaatgactttccagacatttctattggataaagacaacaaggtggcggctataggcaatcctgttcacaatccaaaggtgaaggaactttatttgaaagtattgacaggtggtgaagttgtaaaagcggaaacaccgataacgaaagtcagtctggacgtaacaagcatagacttcggttcatttcctcagtcggagaagcaggaacgcaagtttacactgaccaatacgggacagcatgtactggtgatatatgatgtcatcacttcctgtggatgtaccaaggtaaactataataaggagggtgttcgtccgggagaaaaagcggaactgaccgtgatttatgaagccgaaaaggctgagcatttcagtaagacggttaccatttattgcaatgcagataattctccacttcgtttgaaggtaacggggaatgctgaataaaggatgaagtatgaatcaatgggagtaaaaagcggatggaaagaaattcattttctttgccgaaagtcgattctttccaccctgtggctctctcctaaaagaaaaggaggttaagtccgatgtaaaagtagtgtaaataatcagaataagcaagcggtatttttgttttttctgcggtggagttctttccgagaataagatgaaaatatgaataataataattttttttactagaaataagatgaagaagaatattttgaaggcaactttggttgttgcgtttgctttgatagcaggaatgaatgtgtataatgctcagcaatcggatataatgtctgatttggtactggctaatgtagaagcgttggctagaaatgaaatttccaattgtgataatggctgttgggataatggaagtgggtgtttgtgtggagtttggtatcctggatggaaagaagcacaatgattgattgagagcatgttcaatatttagtatgaaatcgtcttaaactgatttcaataggtttttctgtctttatattatggatgttattattcattatattcggattttagtttaagacgattttattaatgaattattatatagacttattgttgaattatgagaaatatattgtgtgtgacattaatcgctttattgggaggttgcacttctacttccgtaacggaaaaatatcaagataagcgtaatgatattattaatgtaaaagataaggtaatagagttcgagactggaaatgttttaataggttctgtttcgcgtttgtatatgtcgaataagtgtttgttaatagctgatcataagtctgttgataaacagatacatatattcaataaaaatgattttagttatcttaccagcattggaaatttcggggaggggcctgaagaaataacagtgatgggatgcttagccatagatgaggctcatcatcaattatatgtttcagatcatgccaaacaaaagatatttagttatgatatggatagtgtaatggtggattctttgtataagcctcaagtaaagactgcgatgaacgaaactttatttccttctgaatatcagtatataaatgatactttatcaattgctgtattaataaagccaaccagtacttctacttttaatcagtttttaggtagatggaatatgaacacaggcgaaatgattcctatgaaatacactcatccggatattcagaagaaacgaataacttttgctgcttcggagaaagcgggaatatatgtagaatgttatacccgacatgatttgatgaccatttgttctttagatggagaattgctatataatatatatggtcctgactgggatggtggaaatggcaataaacttcaatcctttggtacggtgatgataggaaatgacaaaatatttgtttcttattgtggagaagattatgccagagattcttttccgacaaagattctggtctttgatttggaagggaattatcttaaaaccttagagactggatataaaatatcagactgttgctatgactcattcaataatagaattattttgtctttgaacgatgttgttcaatttgcctatttagatattgacggaataatatgatgtatttaatgtaaaatttggtaataatgaaaagtaaaaaaatgtttttgagtcttgtggctattatttttagtatatttattggttataatatatatagcgtggaaaatagtcaacagacatttgatgtttcttttttgaatattgaagcattggcgagtggcgaaagttccggtaattgcccagagtatggatctggttgtttagatggtgtatggtggccttcaaagcgggaaaaatggtaacttactatttttcttgaaaaagtatattaaaaagtttttatactgctttggatatattttgaagctagtatatttacttatagatgctatagttttggattttgttgaagaaggaatgatattttgtttttctggttataacgaaattttatatggtagcttttgtaaggactatgattacaaagagtgttaataaattaatcttattcctttttgtaatttgtgttattggaatagtatggataactaatccaagtgattactttagcttcatttaaaatatcttctgactctataaatcgatcctattactagtggacaatattttagtaaataaatgagtaaagggaggacgactctttaatattggggaaacttcggcaaaaaatgatgtgacttaaaaattaccggacgatttttggtagccataaagcattgatagaagatgaaataaatgtttcccctttatttaaaaataaaaaggtgatagacgttccctatgaatatttgccgacagccgtaattaatttgtttgaatctggaagtgtgggaaaatcgactgtggagtaaatattatagttttgaagatttttgtgagtatatcttcgcttatatgatagaaaatgagccattggaatcctaaagaagaacgtgctttttatatgaaacaaggtaaacaggtatttctataaaatgaaaaacaggacagaacattgggttagtataaaaaaaggacttgataaattattatcagtagcttttttcttttgcataattgtaatcgtatggttattatttcaggtgattggttttgtttcgtttaaaattccttctgactccatggagcctgccctgtttgccggagataatatattggtgaacaagtgggtgatgggaggacgcctatttgacatttgggatgcttccgagaaaaagaatgtagaaatatcccgtttgcccggcttcgggaaggtaaagcacaatgatgtattggtttttaatttcccttatcccggccgatgggacagcctgggactgaatttaaagacttattatgtaaagcgctgtgtggctgtgccgggtgatacctttgaaattagaaatgcacactataaggtgcgtggatatacggaaactctaggatgcgtagcttcacaggacaggttgcaacagcttcagttggccggagaggaacgaaattggggcatagtgatgagggcttatcccaatgatagtttggtgaattggacgataaaggagttcggccctttttatattccggctaaaggtacgagtgtgaaaatgaatactgttaaccggatattgtataagaatgcgatagagtgggagcagaaaaagaaattggtgcaacagggagattcatttctgttgaacgatagtatcatacaggaatatcagtttaaggaagattactattttgtaacaggcgacaaagtaatgaattccaaagattcccgttattggggattgttacccaaaaagtttattgtgggaaaagcgacattgatatggaagtccgttgatttggatacggatgagattcgttggaacagggtatttaaaagaatagaataatagtaagaagccagatgaaatattgtatagtcagcatcatgataatttgctcttccttcctttcggtaagttgtacggataaggcattggaagactctttgaagttgagtggtgaaaatcgcgcagaattagagcgtgtacttttacactacaaagacaatcctaaaaagaagaaagctgctgaattcttgatacggaacatgaaatggtgtcatgccgaggattctccgtttatggatatatattacaagcaagtagatcgtttacaggcgaatgacagcatatatgcagaagagatgattgctttctatgattcgatttataaaccggagtggtttcaaaatatgactgtaactttcgatttatgtaccatgaaggcggattatttaatagatcacatagacagggcttttcaggcatggcagtcgccttgggcaaaagcattgtcattggatgaattttgcgaatatattcttccgcatcgtttagggaatgaaccattggagccgtggatggccatgtatcagaaaacgtttaagtctgtagcggatacaatgtataataggaaggtggacgagttgtatgaagtaatcagctggatggttgtggggcacagatattatacaccttcgtatgtgcccgatctaaggccttcatctttgttagggataaaagtgggggcatgtccggcctatacggcattgggaaggtacatttatagaagtatcggtgttcccgttgtttctgactttactccgaactgggcaaatcatgccatggggcatgaatggatttctattatggcagatggtaaatgttatcctataatgccggggagtccctgccgttttggaaatcatataaaaggcggaagctatcgcatgtctaaggcttaccgcaatacttacggtgatcagggaggacttataaaggatgaagaggacataccgcccttctttaaaaatcgcaggataatagatgtgacgaatcagtatatagagacaacggacgtagagcttgctgattgttttgatacagaaaccaatacgcattatgcttatctgtctgtttttgacttacgtgactggaaagtggtggcgtatggtgcgaaaaagggggcgggatatgtgttcaaagatatggctcgtaatgcagtatatttaccggttttttattccaaagggaattatactcctgcttattatcctgtaaaggtggatgaaaaaggaagagtttcatatctgaatccggatgtaaagcataagcggagagttgttttgacaaggaagtttatggatatgaatcctaagaaatggataaaggcgataataggagggtattttgtattaagcagggaagcagcttttgcgaatgctgatactatccatattgatttattgaaagagtgcaattatcagacggtgacattgaacaaagcatataggtacatgaagtacgtgccaccggtaaagacagaaggaaacatggcagaaatagaactatatgatgaaaaagggcagaagctggccggtaaggttattggtaattatagaccggaaagaatggatgctatggaaacgatgaaaagggcttttgatggcaatgtgttaagttctcccaaaacggtgaaaacacaaactgatgcttgggtggggcttgatttaggacgtgtcgtttctgtttcgaaattggtttatctaccccgcaatgatgataacttcattaaggaaggtgagctatatgaacttttttactgggatagagagtggaaaagtttaggaaggcaggtcggtagcaggcaattacagtacctggaatatgataatgttcctgataatgctttattgcttttgcgcaatctgacaaaagggaaagaagagcggatttttacatacgaggacgggaaacaagtttggtggtagagatggaaaataaatggtcgaaatatggaatggcattggtagcaggcataccggttgccctgtgcctcagcgtggtgtgttgtggtacgtcttcactgcctgccgatatattggaagatgactggcggtggatgtatggctgtggtgtactctccttggcaggccttgcactgcttgtactcctgttcccgaaaagggtaaaggaatgtctgtcggctgtcgtttcatgggtgtttattctatacggaggtatagaagccgtttggggcatccgccaggtatacggatttacctattccaaccattccctctatgccttgaccggctcgttctataatcccggtccttactcaggctatcttgccatgatattccctgtttgtctgcacgaatggttagagcggaaagagcataagaaaaccgtaccttattatattgcaatagccggaatgctattgattctttgtgtgttgcctgccggaatgagccgctcggcatggatagccgcggcggtctctttcatttatgtttgtggtatgcactataagatggaaattcagcattatatcaggcatcatcgtaagcaggcagtgtcttttgccatagtaacctttattttgggaggtatagcattgggtggcatttatcaaatgaaaaaggattcggcagacggccgtctgtttatgtggaaaattgctgcccaagctgtcagtgagcacccatggacaggatgcggatggaacagtgttccggctgcttacggacaagcgcaggagaattattttgcagccggaaattatacggcaacggaggaacttgtggcaggtgctcccgaatatgttttcaatgaatatctgcaagtagccattgcctggggaatacctgtgctttgcatcgggttgttgatactaggtgggagcatgtacataggtcataaacaaggcatctatggactatgcggcgcattgctatctttagcggtatttgcgttttcttcttatccactacaatttccggcgtttgtttcggctttgattatatcggtgctggcttgcagtattcgtgttcttcctttagagaaagtctggtttcgccttttgtttactatcttattgttaatcggaagctatggctgtttctgtaaatatcagcagaaatccaagactgtagaagcttgtaagcaatggaccaaaagccgtatgttttaccattcgggagcttatcagcaagcagtagaaagttatgctgaaattcagaaagaaatgaaagggaatgctcgctttatgtttgagtatggccatgctttgcataaacttcataagcctgaaatatcaaataaagtactgaaagaggccttgaaagtgagtggtgaccccatgatactgaacattatcgggaaaaacgaacaggaaatgaagcactatgatagtgcggaatattggtttatgcgtgctgtccatcggttacccggacgaatttatccttattatctattggctcatttatatgcggaaccggctttttatcagtgtgacaaattggagcagatggtacagactgtattggagaaagaaccgaaagttcagtctaccgctatcaagcagatgagacggaaagcacgggaattattaaaaaaagtacccgaaaattagttttttcaaaataaaaagtttttatttgttatagatatcacaaaatatgaccatgaaattacacatatttgcatcaggcttattattagccgtttctttcactgcctgctcgggagaaaaaaaggaaacaacggaaaaagaaggggtggaaacagttcttccttctttacccaatgaggtgacggtgatgccgctgaaaaagcaggttttcaatcatgaattgatcagtaacgggaaagtgacggcacaggattatgccgacctgtattttcgtacctcggaagtggtggcgaatatctgggtaaagaacggggatatagtgcggaaaggtcaaaaaatagcccaattggatttgtttaagttgaacaatacgttggtacagaataaaaatagtttggcacaggctaccctggagatgcaggatgtgttgataggacaaggatatgctcccgataatctgaaggtgatacctgctgatgtgctggaactggcaaaagtaaaaagcgggtatgagcagagcaaagctcaatatgaatctgctcaatatgatatggaacaagctacgttgactgctcctttcgatggagtgattgccaacctttttgaaaagagatataatatgcccaaaacttccgagcctttctgccgggtaatcaataccggaaatatggaggtggatttcaccgtacttgaaaatgaactgccgttactgaaagtgggggataaggtggagattactccgtatgcctcggcagcaggtgtacgacagggaagcatcagcgagattaatccgctggtggacgagaatgggatggtacgtgtaaaggcgcgggtgaacggtagtaataagttgtttgacggcatgaatgtaagggtaagcgtgaagcgttctgtgggcgaacaactggttatccccaaaacggcagttgtactacgttccggcaaacaagtggtatttacactgaaggagggtaaagctatgtggaactatgtgcatacgggattggagaatatggaggaatatactgtcacagacggactggaagaaggtatggaggtgataactaccggaaatgtgaatctggctcatgaagcaccggtgagggtgattaaaaattaaaagtatggttaagtttttattacaacgtcctattgcggtgctgatggcctttaccgcctgctttattgttgggttggtgacttacttctcgctgcctgtatctttgctgcccgatattgccataccgcagattaccatacaggtgacgggtgagaattcatcggcacgggaattggagaatacggtggttacccctgtgcgcaggcagttgctgcaagtggccggactgagagaaataaaaagtgaaactcgtgacggggcgggcgttatccgtctggaatttgattttggtgtgaataccgatctggcatttatagaggtgaatgagaagatagatgccgctatgaacagtcttcccaaggaagtgacgcgtcccaaggctatcaaagcgagtgcaacggatattcctgtactttatgtcaatatgactttgaaaaacgacggtgcttatcaggaaaccgacgagcaacaatttctggagttgtgcgaattggcggagaatgtggtgaaacgccgcatcgaacagttacccgaagtggctatggcggatataaccggagtgcccggaaggcttttgcaaattgttcctgataaagataaactggccatgacgggtatcagtgtggaggatatagagaatacactttccgccaataatgtagagccgggaagcatgttggtgagggatggttattatgaatataatattcgcatagctaccctgcttcgtaccccggaggatgtgaagaatatctatatccgcaagggggaacgtattatgcagttgaaagagctctgcaaagtagatattgtttcgcaaaaagagatgggacgttccgtagccggaggaaaaagggcggtaacgctggccattatcaagcagagcgatgaaaatatggatgtcatgaaagagaagctgaaagaaacaaccgattattttgcatccctgtatccggatattgagttcagcgtgagccgtaaccagacggaattgctggactacaccatttcaaatttacagcagaatctttctttgggctttctatttatctttattgtagctgtgctgtttctgggggatgtccgttcaccgttgattatcggcatcagcatggttacttctattgtaatcacattctttttcttttatttctgtcatgtgtcgctgaatgtgatatcactttcgggcttgattctggcagtaggtatgatgatagacagcgccattattgtaacggaaaatatttcgcagtatcgtgaacgggggtattctctgaaacgttcgtgtgccgtgggcacgacggaaatgattacaccgatgctcagttcgtcccttacaaccattgcggtatttgtgcctttgatatttatgagtggcatagccggagctatttttatggatcaggctttttctatcacggtgggattgatgatatcttatattacgggtattatgttgctgcccgtattgtatctgttgttttataaggtcggtatccgcagtaagggatttctttccagacgttttgacaatctgctgaaaaatgagtggctggaaagcttttatgataaagggattgactgggtgttctcacataaaaagctttgtgtggccggcacgctggcaacccttccactgtgtgtgtttcttttttatgtaatggaaaaagagcgtatgccgcagattgaccagaatgaactggtggcaaggatagagtggaatgagaatatccatgtggacgagaacaaccgccgggtggatgatttaatgaaacaggtggacgaccgggtaacggagcatgctgcttatgtgggtatgcaggattatatattgaacgggggcagtgaactttcgtctaccgaagcggaactttatttcaagacggaaaagccatccggaatctattcattgcaggaattattagagaaggagataagagagaaatatccgttggctgtggttactttctcacctcccgaaacaatctttgaaaaattgtttgtgacaggagaagcggatgtggtagcggaactccatacggcgaataagtcgcaggcaccggatgcggagcatttgcagcggttggaaaaggaaattacgcgggtggcgggtaatgttccgacgggcatcgctttccggaatcagatgaatctgataatcaataaagaaaaactgttgttgtataacgtatcatatgatgaattgacgcgggtgctccgcacggctttcaaagaaaacaaggtttccgttttacgctcttatcagcaatatctgcctatcagtattgccggagaggaaaagagtgtaaatagtgtattaagtgaaactttggtgcggacgatggcggatggtaacggagaggtgaatcatattcctttgaataatctggtgacggtagtgcccgccgaagatttgaagagtattacggcgggaaagaacggagaatatattcctttaagtttttatgatgtgaaggatgcaccggaactgatgcggaatgtaaaagaggtggttagtgaggaaaaggaatgggaagtggatttctcgggtagtttcttttcgaatgaaaaaatgatgggggaattgactgtgattctttttgtttctttgttgctgatgtattttatcctttgcgcgcaattcgagagtttcctgcaaccgctgattgtcttgatggaaattcctattgatacggcttttgctttgctggcattatgggttttcggtcacacgttgaatttgatgtctgccataggcattatcgtgacttgtggtattgtggtgaatgactctattttaaaaatggatgccatcaatgaattacggaaagcggggatgcctttggtggaagccattcatacagcgggcaggcgcaggttgagagcgattatcatgacttcgctgacaactgtctttgcaatggttccgttgctgtttacctcggatatggggtcggagatgcagaagcctttgtctattgccatgattggctctatggtggtgggaactttggtcagcttgtttatcattcctttaatatattggtttatttatagaaaacatgacaaaaatgaagtacattagcatatggatggtggggtgtatgctgttgtctctcggagcaaaggcgcagcaggtggtgaagctggatttgcaacgcacgatagagattgcgaatgatagttccttgtccgctttcagatatcagaatctttatttgtcgggatattgggaatatcgtacttacaaggcgaaccgtttgccgagtcttacgctggatctgactccggctaaatattatcgctatatcacccagcgttatgattcgaatgaggatatggatgtatatcgtgaacaacagatgttcagcgcatcgggtggattgagtatcaaacagaatctggactggacgggcggtactttctatattgattcggaactggactttatgcgtaatttcggtgactcaaagtctacacagtattccagtatccctgtgcgtgtgggatatcaacagagcctgttgggatataatgcttttcgttgggaccggaaaatagagccgttgaagtatgaaaaggtgaagaagcaattcatttataacacggaaatggtttcagaagaagcggtgacttatttctttgcgttggctatggcacaggcggattaccgcttggcggaggagaatgtggcgtccagtgataccctttatagcatcggactccagcgtcataagatagcagccatatcacgtgccgatttgctgacattgcagctggacaaagtgaatgcgcataatacgttgcagaatgcgcagattgctttgaaacgcgctatgttttcattggcttcctttctgaacctggataagaatactgtgattgaattggatataccgggacgtcccacaggaaagatgattcccgtagatgatgcgttgatgcgggccaaagagaataatcctactttcctggaacaacggcagaatgtgctggaagcggaacagaatgtggacaagacaaagaaagaatcccgtttcaatgccagctttaatgccagtgtgggctttaaccaggtggcggataaactgggagatgcttacaggcatcctttgcaacaggacttggtttctgtcagtgtttctattcctttgattgactggggggtgagaaagggtaaatataatatggcgagaaataatctgaatgtggtgaggattgccgcccgtcaggaagaactgagtgtggaggaagaggtgattatgacggtgaatgattttaacattcagcagagtttgattgcgagtgcggaggaggctttggatcttgccgtaatggcatacgagcagacacgccaacgttttatcatcggaaaggcggatgtgaatagtcttactctttcgttgaaccgccagcaggaggcgcagaaaaattatatttcggctttgcagaattattggttgaattattataagatacgtaaactgacgctgcacgattttgagtccggtttttcccttgcggacaagtttgattttaatacaggaatttatcgatgagtaatccgcgtaacctctcctcgtttaccttgatagtgacatttgtctgcctgtcactgataggggtggtattagtaccgctgttgccggttaagctggcgccgtcgcgtaccttgcccggtctgactgtttctttcagtatgcccggcaattcgtcacgggttattgaggcggaggttaccagtaaactggaggcgatgatggccagagtaaagggaatcaggaaggtgaactctacttcggataacggcagcggctcaatttctttggaactggacaagcatgcggatattgacgttacccgctttgaagtgtctaccatcatcagacagacctggcctcagctgcccgagggggtgagttatcctcaaatcagtacgcgacgttcggatgataaggcatccagaccttttattacttatacactgaatgcgcctgccaatcctattttgattcagcagtatgcggaagagaatatcaagccggtattgggacagttgaaggggatttataaagtggaactgaatggagctacacctatggagtggcagttggagtatgacagtgaccagctttcgcgtttgggaatcacactgcaggctgtgcaacgggccattaaccgccattatgaaaaagagtttctggggatctgttctattgaaaaaggtgcggagggcagagagtggatcagactggtacgtacatctactgaaaaagaaatggaatttgaaccgggagccattcaactgcaagccgaagatggaacgatggttacgctggataaactgataaaggtaaggcatgtggaagaacgaccgcaaagttattaccggataaacgggctgaattctgtctacctgtatatcacggccgaggaaactgccaatcaattaaatttaagtggggaagtgaagcaccttatgggtgagttgcaacagaagatgcctccgggctatgaggtacatatcagttatgacgctacggaatatattcagaaagaattggataagatttatttccgtaccggactgaccgtattgattttattgctgtttgtagcgttgataacacgaaatctgcgttatctgttcctgattgtgaccagtctggcggttaatatatctgttgccgtcattctttattatgcatttggtctggaaatgcagctttattcattggcgggtattaccatctcattgaatttggtgatagataatacgatagtgatgacagaccatattctgcatcgccgcaatctgaaggcgtttgtttctgtactggcggccacgctgactactatcggggcattggttattattttctttctggatgagaagatacgtctgaacttgcaggattttgcagcggtggtcattatcaatctggcagtatctttgtttgttgcattattctttgttccgtccatgattgataaaataggtttggagaagaaaaagagaagaaaaagaagacgttttctgctcagacccacttttatgaaacggttgactgtctattttacccgtttctatcaaggggtgatttattatttatgccgtttcagggtgatagcttgcctattattgctgctggggttcggtctgcctgtatttatgctgcccgagaagatggaaggagaaggtaaatgggtggaatattataataaggtatttgataatcctaccttcaaggataaggtaaagccggtaatcaacaaggctttaggtggcagcctccgtctttttgcggaaaaagtatacgagggaagttatttcaatcgtgatgaaggtgaagtggtgctttccgtttatgctacgttgcctaatggcagtacattggagcagatgaatgtgctgattaagaggatggaaacttatctgagcgatttcaaggaaatcaggcagtttcagacgtatatctataatgcgcgtcaggctaatattcagatttattttacaaaagaaaatcagcggagcggattcccgtatactttgaaagctaatataatcagtaaggcactgactttgggaggtggtagctggagcgtatatggtttgcaagatcagggattcagtaacgatgtgcgtgagagtgccggcagtttccgtgtgaaactgtatgggtataattacgacgaactttcttattggacggaacggctgaaggagaagttgttattacaccgccgtatcaaggaagtgacggtaaattcggagttttcttggtggaaagatgattatagtgagttttatctggatttggacaagctgaggatggcgaaagagaatgttacagccacgcagctgtttaccgctttgcgccctgtattcggacgggatatttattgtggtaacgtgttgtttgataatcagacggaacaactgaagctttcatcgctccaagggcagcaatatgatgtatggggcttggttaatataccgtttttcatcaatggccgttcttataaactggccgatttcgctactgttcagaaaggacagtcaccccagaaagttgcaaaagaaaaccaacaatatcgtctttgcctgcaatatgaatatatcggttcatccgaacaaggaaaaaaactgttgaagaaggacttggaggaatttaataaggtattacctatgggatatacagccgaaaatgatcaggattattggtcatggaataaaaaagataacaagcaatatgcattgttgttgattgtaatcgccattattttctttacgacggctattttgtttaattctttgaaacagcctttggctatcatttttgtcattccgatatcctacattggcgtattccttacgttttatcttttcggactgaattttgatcagggtggatttgcttcttttgtattactttgcggtattacagtgaatgccagtatttatattctaaatgaatataatgcgataagaaaaagatatcctctgttattaccggcacgtgcttttaccaaagcgtggaattcgaaaattatgcctatttttctgacggttgtttctactattctggggtttattccttttatggtgggggatggaaaagaggctttctggtttcctttggcggcgggtactataggcgggttagttatgtctatacttggaatatttttgtttttgcctatattctcattgaagaaacaaaaaagataatgaagaatttacttttctttctcgatagaagtgtttacttttgttgttacaaaaagcattaaataaatattatctaatactcgctaatcatgttaactcaaattattaacggcaagatttttactccgcaaggttggttggacgaaggctctgtactgatacgggataataaaatactggaagtgactaactgtgacctggcactgatcggtgcgaaactgattgatgctaaagggatgtatattgtacccggatatgtgtgtatgcatgctcatggcggtggtggccacgattttaatgaatgtacggaagaggcgttccgtgcagcgataagagctcatcagaagcatggggcgaccagtattttcccaacgttgtcttcttctcctttttcagaaatccgtaaggcggtagctgtatgcgaaactttgatgaacgagaaggatagtcctgtcttggggttgcatgtagaaggcccttacctgaatccgaaaagagcaggtgagcagtttgccgggaaattgaagaatcctgataaagaggaatatacttctttattggaaagtactgactgcatcaagcgttgggatgcttcacctgaacttccgggtgcgttggaatttgcccgctatttgaagtcaaaaggagtattagtggctgtgtcacatacagaatcagaatacggggggataaaagctgcgtttgaagccggctttactcatactgcccatttctataacggcatgccgggattccataaatgtcgtgaatataaatacgaagggacagtggaaagtgtttatctgacagacggaatgactatcgaattgattgctgacggtatccatttacctgctactattcttcggttggcttataaattgaagggagtggaaaaaacttgtttggttacggatgctttggcatatgccgctgctgatggaatggaaataacagatcctaatgtaattattgaggatggtgtgtgcaaaatggctgatcattcttcattggcaggtagtatagcaaccatggatgtattagtacgaacaatggtaaaagctggtattccgctggctgacgccgtacggatggcttctgaaactccggcacgaattatgggagtggatgaccggaagggggcattgcagaaagatatggatgccgatgtgttgattttggatagagaactgaatatccgggcggcttgggctatgggcaggttggtggaggatacgaatacgttgttttaatttcttatattgattggcaagatgccttgattgttatagaaaacggtcaaggcatcttttttattagctctttttatacgatatcataagaaaaaacataaatttgctacactttaatcttagattatttacaatgatgaacatacgtgtaccttgcaaatttacacacctcatttttatgtaatttaatatatcccacttttagcaagatattactttacagttgttaactcttttaaagtgtccgtatcttcattccgattgctaaaaattgttttcctattttccatccgatagctgtttcccgacagctgtataatctcacaacagtagagcagcctgtcaagcaatgccgctgcgacagcttcctctcccggtattgccagccactctgtaagggagtagttggctgtaacgataagcgatgtcttttcctgaaactcattcaccagtttgaacagcaacatgacatcttctcttttcaagggaaagagtgtggcattgtcaatggccagcagctgtgccttcgtgatccgtttgtaagttttcatcgcatgccgggaaacatcccttgtcttcaggcaggtcagaagatc

SEQ ID NO: 14459 - DNA, 28517 bp, Unknown
  gut microbiota DNA sequence
aaaaaagaaacggaaatatgcaaaaacagttccgtatccttcagaatctcccattccacagggtcaacaaataacaaggcaaaagtacgcgctcccaacatcaagactccaaacataaaagcactataaatagtcatcatcaatacactcgccttgattccctgccagatacgcttcggctttcctgcaccgtaattctgtccactataagtagccatagctatacccagactctcaagtggacacatacaaaacatcttaatacgcatagcagccgtaaaagcagccacacaagcagtacccaacgcattattcgcactttgcaacataatactgccgatagcagtaatagagaactgcaatcccatcggcacacctatatacaataaagtctttgccaacgctcctcgaaatttatgttctgccgaagtccccttcagaatctcaaagtgacgcatcatatacaaataacacaacactgccgaaacaccttgtgagaataccgtagctaaagccgctcccgcaactccccaatcaagtaccaaaatacaaaaaagatcaagcaaaatattcaatatcgtagaaaaaagcaaaaaccaaaacggagtcttgctatcacccaatgcacgaataatacttgaaagcaaattatagaaaaaggtacagggcaccccgatgaaagtaatcagcaaataaaaataagcatcttcaaggatgttctccggggtctgcatcatctgaagaatatccgaacaaaacatactagtcacaatagcaattaccacagacatcaccgctgccaattgtaaactaactgccacaaaacgccgcatcataccataatcccttgctccaaacttctgtgcaacaggaataccgaaaccaccacaacagccattgcaaaagcctaatatcaaaaacaccaccgaagtgctagctcctacagaagccaaagcattaattccaagaaacttacccacaatagcagcatccatcaaggaataagtctgctgaagtaaattacccagcaataaaggaaaagcaaaattcaatatcaaagggaacggacgtcccgaagtcatctctctcgaagttgccataacatgaatgtattgtaaattcgagcacaaatatataccatcctttgtaaaaatacatattctagaacttcatttcaacgaatacccattaattaaatgatacatatcaatttttctcggagaactatcatctttcccaaaatcctgaatagaaaagcaacaacacagcaaacaattccaaacgccctatcaacataaggaacgacaatacccatttagcagcatcgggcaacgccgcccacgaaaaagcaggaccgaatgcccctaaccccggtcccacattgcctaagctagaaataaccgtactcatcgcctcagtcagccccaccccgaaaaacatcagtagtgtccatccgaccaaagcacaaaacaaataaaatacaaagaatgtattcaccgaagcaataatggaaggcgatataacctgacggttcacacgaacaggcaatacagccctaggatgcagcatccgtttgaattcattcttgatattacgcgccagaatcataaggcgcatgtttttgattcccccactagtagaccccgtacatccacccgacaacatagcaaaaataagaagcatccatgtaaaagatggccacaagttataatcatccgttgcaaaaccgcatgacgtatgcgccgtagccacttggaacagagccctgcggaatgccttttcccaatcataatgattctgaaaaactaaggcaagcgtgataacaagcgtcagaatacttactgatttcataaaccaacggaattcatcatcctgaaatagacgcttgcccttccctttcaggcacataaaatagagagagaaattaatacccgaaagaatcataaatatcgctattacatattctataaacggagaattccaataagccacactggcttgtttagtagaataaccacctgtagccgttgtagagaatgaatgacataccgcgtcaaaaaaactcattcctcctatcatcagcagcatagtttctacaactgtaaggatagcatatatcatccacagccacttagccatcacatcaatccgaggatgtgttttgtcgtgcgtcactccgatagcctcagctgaaaaaagttgtatagttcctcccccgaaaataggaagcacagcaatagtaaaaaaaacaatacccaagccacctatccattgtgtcaggctacgccaaaataacaggccatgtgaaagagattctatatcatctaatatagtagctcctgtagtagtaaaacccgacatggtttcaaaaaaagcatctgtcactgaagggattcctccactaaaataaaaaggtagcattccaaacaacgtaaacaaaaaccaagtaaaagttacaatacagtacccatctcgtcgtgttagtcgattctcagcacctctactacaaattagcaaaactccaccgaccaatgtattcaaaagaatggtatatagaaaatattgataatcttgctcgccgtaacataaggaaatagccgcacaaagcagaaacatagcagattcaataaaaagtaatactcccaatacacggaatatcatttttttatttatcaagctattatttcggcttccacctttatataatttatctggattataaaattctcccatctttttataccttttatatttgacaagtatatagcgaatactatgccaaaatgaaaaagaagactataatctcctgataaacaaacagataccatattcagtcataaaaaagaaaaacacaacccttttcaaaatgaaagggggcgtgttttcaaaacaataaggttgcagatacgacgatctcaagcaaaatttaaattgcatacatatctgctaacactataacatcttcctcattataatgaatagtgaataaatattttaagattacccactattttactatttttgcatccaaatcgataatcctctactaaatttaattacgcctactgtggaattattctacagctgttgcctattttccacactttccctatcaacaaaagacagaaataaagcactgattatgaataggaaagactatttacaatagtttggcacgctgcttgtatttctactgatggcatcttaaacaataacaaaactaaagtatgaaactattttttacacacaaagaaattgcgctaaaaaagaaaagaacagcgcttgtagtaataggtattggactagttatcgggatttacctgattgtttcccatcaaccggcaaagatgccggaacttccagtagttgccatagcaccagcaacgcaagacgatgtggaaatatatggtgaatatgtaggacgcgtacgtgcacagcaattcgttgaagtacgtgcccgagtagagggatatttagaacaaatgcttttcgcagaaggtacatatgtcactaaaaatcaagtgctgtttgttatcaatcaagatcaatatcgggccaaagctgacaaagcgcgcgcccaattgaaaaaggatgaggcacaagcacaaaaagcaaaacgcgacttagaacgtatccgtccgctatatgaacaaaacgctgccagccagttggacttggacaatgctactgctgcatatgaaacagcagaagcgtcggtagctatgagtagtgccgatcttgatcaagcagaactggaactaggttatactatagttcgttctccattagcagggcatatcagtgaacgtcacgtagatttaggaacattagtcggtccgggtggcaaatcattgcttgctaccatagtaaaaagtgatactgtattagtggatttcagcatgactgctctagactatctgaaaagtaaagaacgtaatgtgaacttaggtcaaaaagactccacccgctcctggcaacccaatgtatccattactttggcagataatactatttatccatacaaaggactagtagactttgccgaaccgcaagttgatccacgcacaggtacattctccgtacgtgccgaaatgccgaatccagaacgggtattacttcctgggcagttcaccaaagtaaaactattattggatgtcagagagagtgctacggtagtcccgttaaagtccgttatcatagaaaaaggcggcgcctatatttatgtaatgcgcaaagattctacagtagagagacgtttcattgaattaggtcctgaattccaaaatcaagtagtggtggaaagaggcttggcccccggagaagacattgtcatagaaggataccacaagctgaatccaggcatgaaagtgaaagtaagtcctgccgtagaggacaaaaaaacggaggaagaagatacgatcggataatttcactcccgaatacgaattcccctatggaggaaaatttacgcattcaaaaaaacaatagacattatgaaagttagtttctttatagacagaccggtattttcagctgtcatctccatattaatagtcattgtcggtatcatcggtctcacgatgctacccattgaccaatatccgcagattactccgccggtagtgaaaatcagcgcatcctatccgggtgccagtgccctgacagtatcacaggctgtagccactcctatagagcaggaattgaacggtaccccaggaatgctttacatggaatcaaatagttccaattcgggaggtttttcagccaccgtcacttttgatatctcggcagatcccgatctagcggcagtggaaatacagaaccgtatcaagttagcagaatcacgcctcccagcagaagttatacaaaatggtatttcggtagagaaacaggctgccagtcaattgctgaccctatgccttacctctaccgacccgaagttcgatgaaatataccttagcaactttgccactctgaatgtgctggacctaatccgccgtatccctggcgtaggacgtgtttcaaacatcggaagccgatattatgccatgcaaatctgggtacaacccgacaaactggccaatttcggtctgactgtagccgacttgcagaatgcactaaaagaccaaaatcgagaatcagcagccggtgtactgggacaacaacccgtacaaggattagacgtaaccattcccatcactactcagggacgtctatctaccgtaagccagtttgaggaaatcgtagtccgtgctaatgccgatggttccatcatccgtttacgtgatgtggcccgcatctcactcgaagcacaatcatacaataccgagagtgccatcaacaaagaaaatgcagcggtattggccatctatatgttaccaggagccaacgctatggaagtagcaaaaagcgtgaaagaagctatggaggaaatcagcaagaattttcccgaaggaatgagttacgagatacctttcgatatgactacgtatatttcggaatccattcatgaagtgtacaaaacactgtttgaagccctgatactggttatcatcgtagtatacctttcactccaaagctggcgtgcaacagttatcccactagttgccgtacctatctcactgattggaacttttggatttatgttgattttcggattctcgcttaatatcctgaccctgttgggattggtacttgccatcggtattgtggtggacgatgctatcgtggtagtagagaatgtggagcgtatcatggaagaggagaaactatctccctaccaagctaccaagaaagctatggaaggacttacaggagccattatcgccacttctttggtactggcagcagtatttgttcccgtaagttttctaggtggaattaccggacaactttatcgccagtttacggtaaccatcgtagtatctgtattactgtctacggtagtagctttgacactgagtccagtcatgtgttcacttattctgaaaccggaagatccgaacaagaaaaagaatatcatattccgccgtatcaataagtggctggctatcggcaatcataaatatgtaggactcatcaagcacattgtgaaacacccgcgtcgggtactgagcacattcggcatggtattgatcgccatcctgttaatccatcgcattattcccaccagcttcctccccatcgaagaccaaggatattttaaaatagagttggaactgcccgaaggtgcaacgttggaacgtacacgtatcgtgacggaacgtgctgtggaatacctgatggaaaatccggcagtggaatatgtacaaagcgtggcaggaagcagtccgcgtgtagggaccagtcaggcacgaagtgaactgactatcatcttaaaaccttgggaggaacgtgactcgcaaactattgacgatattatggcacaggtaaaaaaagacatgtcgcaataccccgaatgcaaggtatatctttccacccctcccgttattccgggattgggcagttcgggtggtttcgagatgcaactggaagcacgtggagatgccacttttgaaaatttggtacaagctacggatacattgatgtattatgcatcaaaacgtaaggaattatcaggtttatcctcggctttacaagcggacatcccccaactttatttcgatgtagaccgtgacaaagtaaaattcgcaggagtacctttagcagatgtattctcgaccatgaaagcttatacaggttcggtatatgtaaacgatttcaatatgtttaatcgtatctaccgtgtatatattcaagcagaagcaccctaccgggaacataaggagaatatcaacctattttttgtacggggtacagacaatgccatgataccgctcacctcgttgggtaccacttcgtataccacaggtccgggcagcatcaaacgttttaatatgttcaacagttctgtgattcgcggtgaggccgcagatggttacagttcaggacaggccatggaaattatcgaacaaatagctcgcgaacacctaccagaaaatatcggtgtagaatggagcggactatctttccaggaaaaacaagcaggtggacagaccggtatggtgctggcattagtgttcatgttcgtgtttttgttccttgctgccttatacgaaagctggatggtaccggttgcagtattactctctttacctgtagccgcattaggtgcctatctaggtgtatggggctgtggattggagaatgatgtctatttccagatcggattggtgatgttggtaggactggccgccaaaaatgcaattcttattgtagagtttgccaaagaacaagtggacagaggaatagatgtggtacaagctgcactccatgcttcacaactccgctttcgacctattttgatgacttcattggcattcatcttaggtatgttacctatggttatcgccagcgggccaggttcagccagccgtcaagctattggtacaggtgtattcttcggaatgatctttgctgtaactgtgggaattttgttagtacctttcttctttgtactgatatacaagatgaaagcgaaaatgaaacaaaaataaggatataaaaagacgaaagaaatgatgaaacatacattattatatatagccgtatcaggaatgactttgctgacttcttgccaattaggtaagcactacacacgtcccgacttgcatctgccccaacaattagatacgttacgacaacaggatacattatctattgccgatatgcagtggtgggaaatctatacggacacaaccttgcaaagcttgatagaaaaaacgttggataacaacaaagacatgaaaattgctgcggcacgtgtaaaagaacttgccgcaatgaagcgcatagactttgccaaccttttcccccaactgaacggaggcgcttatgctcaaaaagaaggaagtaattatggtggtaacaactataaaaatgaccccgaactgggtggtaaacttaccgtaacttgggaattagacctatggggtaacctgcgttgggcaaaagacaaaagcatagcacaattcctgggaagcatcgaggcgcaacgtgccttgaaaatgagtattgtgtccgaagtggcacaagcctattttgaattggtcgcattagacaatgagctgaacattgttcgtcaaacactctatgcccgtaaagaaggagtacgcttggcaaaacttcgttttgaaggaggactaacttcagaaacttcttatcaacaggcacaagtggagtatgcacgtaccgcaactttagttcctgaactagaaaggaaaatttcattgaaagaaaatgatattgcatttttagcaggcgaatacccgcaccgcatacagcgttccattctacccgaagaagtaaaactacctgaaacattaccagtaggtctaccctccactctgctggaacgtcgtcccgatgtacgtgaagcagaacagaaattaatagcagccaatgccagtgtaggtattgcctataccaatatgttcccacgacttagcctcacagcacaatatggcgtagaaagtgaagaattctctgatttcttcaaatcgcccattcattatatcagtggcaatcttctaactcctctcttcgccatgggaaaatacagagcaaccctaaaggccaaaaaagccgcatacgaacaggaatgctacagctatgaaaaatcagtactgactgcattcaaagaggcccgcaatgccattgtggacttcaataagataaaagatatctacgaatcgcgcctgcaactggaacgttcctctaaagcaacaatggaactggcccaattgcaatacatcaatggagtaataggctatctagatgtattggatgcacaacgtagctatttcgacgcacaaataggattaagcaatgcaataagagacaaacagattacattagtaaaattgtataaagcattagggggtggatggtaaccatcccctcttttctgtatcttcctttatccggaaaatcaaattaagatatatgcctgataggacgtattgttctctaccggtgtaagtgacaaataacccgacttcacttttccattctccagatataaaggatacttttcttgaagcgcaagatgagaatgccatgcctcaccaggctttgcataatattctataacataccgtccctgcacgccatcacacacatagttatcatatatcaagcgtgctaccactcccatattcatacgaagatttatttccacacacggatgaatggcatacccgctattttgggtacggcataccatcatatccacccccagatagccttcgtaactcccttttatcacctctgccaactctacctgtaacgccctcccaacctgatgtaagatttccgcagaaacataagtggatatcctcgcttcaataacccgatccgccgccaacaagttttctttataaacacctctcttatccgtttcaaataaggaataccctataaaatgtacctgtccccactcgtctgcaaaaaactccatggcaaaatccaaaagcttatcataaaaaggttctcctatcacctcatgctgagtggtaagtatgtgtcgaatccacccttccagagggatgggaaaactacctgaaacatattgtatccctcttccactaccagaccatggcgcttttaacaaagcacgagaatgagacaacacaaaagccttcacttcctctattgacgacaatacaaaagcctcccccaatatgggaatattcccacctatatgtctacaaaggcggcgtaacacttttacagccgtctgacgtccggatatttgacggatacgcttcatacgctctactgaaggatatgctgtatcaggaaatccagcttcctgcaaacgacgcaccaaagacggattccatccccaaggaatcaccttattataaatgggtacgaattctaaaacccaattgaccgaaagcggcaaaaaagattgtctttccattgttttcatacgctgagcagaatccagccacacagttcctccctcttctgcataccatgcaggcaacatggatagctcggccgccattcgtcgtgcactggcaggtgccatataataaggatcaccacaagctaatgccatatcattttccggattgaataaataaagcgcttccatttccggacacaaagataaatgttttagagtacaaaccatttctcttgtccgtcttttagtagaaaaaaaaataatattttgctatctccagtttgcaatttgaattagtattgctatatttgcagccgataaaaaagcaaccatggaaaccttttacagaacacacagttatctggtggaacatacaaatgctcctgttcgccgggacttgatggacgagatagactggaatgacagactgatcggtatcaagggtactcgtggcgtagggaaaacgactttcctcctgcaatatgcaaaagaaaagttcggaacggatcactcatgtctgttcatcaacatgaataacttttacttctctaaatatacattagtggagtttgccgcagaattcgtaaaacgaggaggaaaagttttgttgatagaccaagtgtttaagtatcccgaatggagccacgacctgcgtgcttgctatgaaatgtttcctactctgaagattatattcaccggatcatccgtgatgcgactgaaagaagaaaatccagaactgagcggcattgtcaaggtatactacctgagaggtttctcattccgcgaatatctgaatttgcaaagcggcaattgtttccgtgcctataccttacaagaaattttggagaatcacgaacagatagcgaaaaccatcctgcgcaacgtgaagcccttggattattttcaagactatctgcatcacggtttctacccattcttcctggaaaaacgtaacttttcggagaatctgctaaaaaccatgaatatgatgatagaagtagatatacttcttatcaaacaaattgagctgaaatatctttcaaagataaaaaaattactatatttgctagctgtggacggacccgttgctccgaacgtcagccagctggccacggagattcaaacttcacgtgccacggtgatgaattacattaagtatctggcagatgcgcgtcttatcaatatggtttatcccaagggagaggaatttcccaagaaaccttccaaactgatgatgcacaacaccaacctgatgtactccatttatccggtaaaggtcgaagaacaggatgtactggatacatttttcatgaataccctgtataaggaccataaactatataaaggcgataaaggcacttcatttatggtagacaacggactgcatttccgtatttgcgcagaagggtgcaagttcaaaaataatccaaacgtgtattatgccctacacaaattggaattaggacacggaaatatgatcccattatggcttttcggctttttatattaagagatagagaatagattttattacctaataattagtaattgtatgactaaacaaaaaaaattcatcacttgtgatggtaaccaggcagcagcacatatctcgtatatgttctctgaagtagctgctatctatcccatcactccgtcgtctactatggctgaatacgtagacgaatgggctgccgcaggtcgtaaaaacatcttcggcgaaacagttttggtacaagaaatgcagtcagaaggcggtgcagcaggtgctgttcatggttctcttcaggcaggtgcgttgactaccacttacactgcatctcagggtctgttgctgatgatccctaacatgtacaaaattgccggtgaattcctgccttgcgtattccacgtatcggctcgtacattggcttcacacgcattgtgtatctttggtgaccatcaggacgtcatgtcttgccgccaaacaggtttcgccatgttgtgcgaaggttctgtacaagaagttatggatatggctgctgtagctcatcttgctactatcaaatctcgcgtgccattcgtcaacttcttcgatggtttccgtacttctcacgaaatccaaaaaattgaaatgctggagaatgaagatctggcaggtctgattgatcaacaggctttggcagaattccgtcaacgcgcgttgaatcctaacaaccctgttgcacgcggtatggctgaaaaccccgaccacttcttccagcacagagaatcttgcaataacttctatgaagcagttccggctatcgtagaagaatacatgaacgaaatcagcaaaatcacaggccgtcctcatggtttgttcgattactatggtgctgaagacgctgaacgcgtaattatcgcaatgggttctgttacagaagctgcccgcgaagctatcgactacttgatgagcaaaggtgaaaaagtaggtttggtttctgtacatttataccgtccgttctctgctaaacatttcttggctgctgtacctaagactgccaagactatcgcagttcttgaccgtactaaagaaccgggagcaaacggcgaacctttgtatctggatgttaaagactgcttctatggaacagaaaacgctccggttatcgtaggtggacgttacggtttaggttctaaagacactactcctgctcaaatcatcgctgtattcaagaatttggctctgccaatgccgaaaaaccacttcactgtgggtatcgtagacgatgtaactttcacttctcttcctcaagaagaagaaatcgcattaggcggcgaaggtatgtttgaagctaaattctacggattaggtgctgacggtactgtaggtgctaacaagaactcagtgaaaattatcggtgacaacaccgacaagcactgtcaggcttatttctcatacgactctaagaaatctggtggtttcacttgctctcacctccgtttcggcgatactcctatccgttctacttatttagtaaatactccgaacttcgtagcttgccacgtacaagcttatttgcacatgtacgatgtaactcgtggtttacgtaagaacggttctttcttgttgaacactatttgggaaggtgaagaactggccaagaacttaccgaacaaggttaagaaatatttcgcacaaaacaacattactgtttactatatcaatgcaactcagattgctcaggaaatcggtttgggcaaccgtaccaataccatcctgcaatcagcattcttccgtatcacaggcgttattcctgttgacttggctgtagaacagatgaagaaattcatcgttaagtcttatggcaagaagggcgaagacgtggtgaacaagaactatgctgccgtagaccgtggtggcgaatacaaacaattggctgttgatccggcttgggctaatctggaagttgaagctcctgctgctaacaatgaccctgcattcatcaacgaagtagttcgtcctatcaacgctcaggatggtgacttattgccggtatctgcattcaaaggcatcgaagacggtacttgggaacaaggtactgctcaatacgaaaaacgtggtgtagctgcattcgtacctgaatggaatgctgaaaactgtatccagtgtaacaagtgtgcatatgtttgtcctcatgcttctatccgtccgttcgtacttgacgctgaagaacaaaagggtgcaaacttcgagacattgaaagctgtaggtaaacaatttgacggaatgacattccgtatccaggttgacgtgcttgactgtctgggttgtggtaactgtgctgatgtttgtccgggcaatccgaagaagggaggcaaggctcttacaatgaaacatttggaaagccagttgtctcaagcagccaattgggaatactgcgctaagaacgtgaagagcaaacaacatttagtagatatcaaagccaatgtgaagaactctcagttcgctactccgttgttcgaattctctggagcttgttcaggttgtggtgaaactccatatgtgaaactgatttcccagttattcggtgaccgtgaaatggttgctaacgctaccggatgttcttctatctactctggttctgttccttcaactccttatactaagaacgaaaagggtcaaggtcctgcttgggctaactcattgttcgaagatttctgcgaattcggtttgggtatgactttggctgacaagaaacttcgtgcacgtatcgaagctgctatgaaggatgctatcgccagtgatacttgtccagcagaatacaaagaagcattccaggaatggattgatggtaaggacgatgcagacaagagcaaagccgctgccgaaaagatcattccaatggtggaagctgctaaagataaatgtaagaactgcgctaccattgcagaattcaagaactatttggttaagaagagccaatggattatcggtggtgacggtgcttcttacgatatcggttacggtggtttggaccatgtgattgcttccggcgaagatgtaaatattttggtattggatactgaagtttactctaatactggtggtcagtcatctaaggctactccgctgggtgctatcgctaagtttgccgcttcaggtaagcgtgtacgtaagaaagaccttggtatgatcgctactacttacggttatgtatatgttgcccagattgctatgggtgctgaccaagctcagactttgaaagctatccgtgaagcagaagcttatcccggtccgtcattggttatcgcttacgctccgtgtatcaaccacggtttgaaggcaggtatgggtaagagccaggctgaagaggctaaggctgtagaatgcggttactggcacttatggcgtttcaaccctgctttggaagaagaaggcaagaatccattcatgcttgactctaaagaaccgaaatgggaaggtttccaggatttcttgaagaacgaagttcgttttgcctctgtaatgaagcagtatcctgctgaagctgctgatctgtttgctgcttgcgaagaaatggccaagaaacgttatgcttcttacaaacgtatggaagcaatgaattggagtgaataatttctaatacatgcatataaaaaaggcttgttcatgaagaacaagccttttttataacctttttctaccattagtatatatgaggccacgcatacgtatgcacaaaataagacctcaatttcaaatatttctacttttaccatcactatttatggcttaaggttaccaaaaatttcctacctttgccacataacattatgaaaaacctataaacatgaatactctaaccaacctgaaatacacattggctgtcacagccggactgtgctcctcttttgcatacgcacaaaaccatcctcatatcatactgataatgacagaccaacagcgagccgatgccataggctgtatgggaaacgatgctgttatctcccctaacctagacgcactagctgccgagggaacattatttatgaatggctattcttcttgtccaagcagcactccggcacgtgctggtctgctgaccggactttctccttggcatcatggcttgttgggatatggaaaagtatctcccgaatataaatacgaaatgccacagatgctaaaagacgctggttattatacttttggaatcgggaaaatgcactggcatccccaacgggtaaaacatggtttcgaaggcactctgctagatgaaagcggacgcgtggaagacgagaacttcaccagtgattaccgccaatggttccaaacaaaagctcccggaaagaatcccgacgccaccggtataggctggaacgaccatacggcaagtatatataaattgcccgaaaacctccatcctacctattggacaggagaaatggcctgtgaacttatcagcaactacgatccgaccaacaaaccgttatttctgaaagtttcttttgcccgtccacacagtccgtatgatccaccacaaagatatctggacatgtatgaggatgccctaatacccgatcctgctatcggagactggtgtggcaaatacgcaaaaaaactaaatcctgaaaagacggcacaagatgctccatacggtaattttggcaatgaatatgcacgcaattccagacgtcattattatgccaacatcactttcattgacgaacagataggcagaattatccaaacattgaaagaaaaggatatgtataatgacgcattaatcgttttcatttccgatcatggcgatatgatgggcgaccattatcactggagaaagacttatccatacgagggctccactcatgtgccatacatcgtgaaatggccttccgtcgaccacgttacaccgggaaaaacagacgctcctgtagagttacgtgatattcttcccactttccttgatgcagccgatgtgaccatccccactgacatggacggccgttctttgttgccacttgccaaaggcatggaaacaacctggcgcaagtatctggatctagagcatgccacctgttacagtgatgacaactattggtgcgcactgactgacggcaaaataaaatatatatggcgtatccacaccggtaccgaagagttattcgacttaacccaagaccctcaggaattgcacaatgccgtcaatgacaaaaaatacaggaagcagctgacggaaatgcgtaatgaaatgatccgtcatttaagtgaacgcggcgaagagttcgtgaaggacggtcgattggtggtcaaggagaagaccatgctttatggacctaattatccggggaaagaaaataaaagataatgtacgttgtacagagggatcgtctccaattgtcccactttttcctacaacagagttttataattctgctgtcactgttgtcacctattccctgcaacccctataaacaggaagttagagaggtggtggcagcacattattttatgtacaaaaatgcctactgccaccactttatccaccttgttacatggtacaaacctactttgtttgtccaccagacaggacaagcctgtgcaatgaacacgataggcttgtacggtgaacacggtaaacttgtgcagcctcgaaacaacgactttccttgccaaagtattcagaatcttgatacaagttctgtcggatcctgcagcaagttccacgaaatcctgtaccaagttttgccgttacacccagcatccttccctttcggaggagaaggataaaccggtagccggaaagacttaaactaaaggtcggaagatatagatctttgaaacgaaacgtcttgttctttttatcagacgtcttcatcttttttgcaaacatccttgttttttccgaaaagaataaaggttttcggaacgatacgggactgtgaccggaaacagatttctacacatatgtatgtacgtgtaaaaaaatatcctgccacctgcttgctataatgactgaccccgaaaccaaattcccttttccataacttatcgggcaagctaatcagagctcattccaatagcataggaaaagcgatggaacatcaaattcacaccgctttatctctaaaaacaagaaaatgagtttccaagtgaacctccatttcacccgacagattcttcatttcagcaagaaaggatgcacgagtttcatcaaatttctgaagcccctctatctttctattttccaacagttcctgcagtctgttcacaaattaaaatataaagcctaaccctaacgacaaattggaaagagccaatttatctttcccttcattcttctcgtcagtaatattagccgatttcagacctttttgataagcaacattcaaaaacaagcgcttccaatagatgctgccctgtatggcaattccccagtcaaaacggttaatattacctttaggatcgtccccatcatcattcttgccaaaggagggacaatcatctttggttatggtatgtttattttctccatatttgtcgggggatactgtcaaatatgtatccgactcatatttaaacttaccaaacaacccataagagaagtaagggcccactcccaactgaaccctaaacgattctgacaaaggtaaagcataagcaaataaaataggaacgtccaaatagcccagattatgtttttgagtgacactagtgccgcgagattctgtcacatcatatttcttataagaatccaaatcgacccgatgcgattttttagtagtaaatttatcatattcataagtgatacctttcatagaaagtccaatagcaggctgaatactaaagttgccaatcacaggaacatctataaaataatggacactgtaacccatatagcttttattattataatcttgatctgccataagatcattatacttccctgtagcactggtcatatttaaccccacgcgaataccggaagtagtttgtgcttgtgccataaatgcacatacggacatagccatgataaaaaacagtttcttcataatgcagtatttttattaaaatttgtaatcttgtttcactcctttcatagtgaacaataaagaaagacggacagaccaattttcatcaatagcatactcagctcctattcctgcatagaaacctggatgcattttagattcctctacgctagacatgctgctcatattgagcagccttcacattccacattaaaccctgtgcatacgatgttaacgaaattagcattaaaatgctgcaataattgtcttttccatacttcgtaacaattgactctataagtttacatttgcaaatgtattgcaacttttatattcaaaaaactatcatttgtcaagatttacactaaacacactaaaatagataccaagcagctaaaattaacgactatatatacaataaataaattatgcaaataagacaagcttgaaaatatataaatttaggcttcacattccagctctatatgatatggaatcggaagaaccatcaaaagcccagttatacttttcaccacctctccagactggcagtatagaactatagaaccatttaaaacataaaacaaacaggcgtttattcctcggaaatgaacgcctgtttgttttgaatttcactattcagccatatcaacaaatctttttggcaagcaaccaattttcacttctgttgacgaagccggctaacttaaacacttattttatttcacgaatcaacattcccggataaaaatcgccacccgacacttttcggaaagtggtaaaaccaaagtccgaaccataagcctgttcctcggaagccatataacgattatcccaaatcagattctccttaggctgaatcactcctacacgcttataagtcattttgccttctttgctcagttcggcttccagtacttcaaatttagacttttcagtgactccctctttcaagccaatataagctttaaggggagaaacactaattaagggggtatttactttgaactggtcaaaattcttttgcagactcgctatattttcatcaatggcacgttggcatgcctttcgcaccatttgctggggctcgtccaagttaatacccaaaaaggaagtgttacttccatcactatgctggctgcccacatacttcaacttgaacatcttacggttattattgaaagcattcaccttctccttattatccttatcagtataatattgagtatagaattttgttgcagtctcttcatcccaaaccagttgatagagataagtatcaatatttactttaaaccccttataggatgcaactatatctcccgtagaattacctaaatccatataggatgtctcaccggtgtaaatggccgctgccgcacccagccctttgacaattcctccccacacacttgaaccttttgaacggtcaatatagcgaatatcattcacaataagaaaagtatttccaatcaagtcctcaccggcatcttccaacagagcgtttccgcgttgagtcttggatgccaaagccttgtccagttcggaagcattgtacagccctcgttctttcaccagttctacatcacagacccctgtcatgtaatcacggttaaaccagcgtcctaccatacgactggcaataccattatttctgataaattcatctatctcctcatggtttttatccaatttcttttcagaagtatagattacttttacacttaaatcatgattattgtatttatcaggaacaggaattttgagaaaaacatcctttatttcatcaccaaattctcttccttcgtgattgatcatcatgctataaagagaactgcgacgatattttatttcgccgtctccttgggcttgaatttgagcggcgaataccaccgtcaacaactgtattataatgaatcttttcatttttcaaacattcaataattaataatcccaatgtttatctggaatgacagaggttatcttaaacatatttgtatccgggtcaaaacgtgcaatcactcgaagagcctctacttcggtcaagctcttcttgtcttccgctaacatatattgtttggccaagaccatatcctcttctttttcgaacaagcaaggcaccagtatcttgccatccggatcaataatcccccactttccatcggacatcacataagccatctcattatcaaaattggatgcattggcaaatccctgcttcagacgaacagacttttgcaccccatcataaaggtaatacaggttatcctttttcacccatatcaattgcggattgactataggagctacaccttgccactctaaaggaacgacaacccggttctgcaaatcaatagccccccataatttgttcaggcatacggatgcatacccccgatgaaaattgcctatacggtcatacttatcggatacgatttgtcctttcatatctacataaaaccaagaagcatttttttgtactcccaagcgcccattgttcacactggtaagcgaattagtatattcaataggaataacaactgcccctgtagaatcaattgcaccaaaagccgatcccttttgtaccacccggtatccttcattgctcaggaaagcctttgacaggccaccaatcaccttgttcccctttttatctatgaaatacaattcatcatccaatgaaaccggagctaaattatggctgaaagccccaaactttcccttttctgaagaaggtattctgaccatcacttcagcatccaaatcataataagctttagctatttgcttcttttccactttagcaagcctaagcatattgtctgaaggaggaagaatagcctgattggctgttaaaggaataatagtatttccatggacatctaccaacccttgggatttcttattaatgaaataaaaataatctaccctcgatgaaggcaactgggactcagcagcatgagacttgggaagcagcaagctctgtatctcctgcttggtagcaggaaatgcggactggtctgccttagtataaaaggcagcctcatcaagcaaagctccagttttcttatctcgcaaaatagggaagttgcccacatcttcatatttggcaggaattatttcccgcccattttcattgattaacccgaatttacctttagacaccatgttgttctttttatcgtatttgccaccgatattaacccaacagattccttggtcgttgaaactgcctataaaattataagtaggcttcactatgatattgccagctgaatcaatgaacccgaacttcttgcctttcaagacatatatcagttttttatttaaatctcccattgcctcataatcagttttcaggatttccttacctgtcttatcaatcaacccccatttttcacctgtattactactagctttattgcctatgagtccacccgttgttagcattactccttttttagtatttccaccttcagcgacggggcaaaccccgttataaaattcaccgatatatgtatatttccgttttgtaatgatttcaccatcttcattaatcagactgtattttccatcttttcctattttagcgataccgtctttaaaaggggtagcttcatcatatttatactttatcactactgtcccgtcttccgtcataaagccataacgccccttttcattctgcacggccttcaacctctgagcttgcacagagccactgaccagcaccagcagacatagaattaggataacttttttatttctcatattctttttatttaaaatcatttgaacttgaattaatggagccaagtaatattagtagtaaccggttgctgcccattaccaaatgctacacctatagctctggcagcttctatcctctgctttttcagccccgcttcatccttatatttctcacgattctcaaaatcccaatcactggtcaccttttgctttatttcattatacaaagctttagcttcaccttcacaactacttcccggctcaatgaaaaccaaccagtcaaaagcccttgaagcaccttccgcatcgggtgactttgcccattcggatctggcgtattgcataatcaattgacaattataattcacatattgagtataataagtgtctatcagtttactagcttcctcatagccgacacaacattcaggaatggaggtaacataatacaatgcagcatcatactcatgcatagaagcacttttttgcgcttttatcaatatttgcctataattactattataccaagagataattttttctttcccttcgcgtataaattcttgcattttcacgtttttgccatttattgcacggaaagcattgatatatgcccggttaatattagtacctactccttttgcatccacagtgagagtagaaaatactttctgccctactgcatctcctatatacaaagtcaattgaacagtaagcgctgtactgacaggaggaccggacaatgtttccttatataaagtattggccttagctgtgataaagaatggtgtaaaattggaattggcaacacccccctgagcggccactgccgcagctaaacgatttcctaaaatctcttgtacctgagatggaagttcctctttctgggcagctttagctattgtaaggcttatctcacaatcctgtgctgccgcagacatggcacaacatgcgcaccaagcggtaaatatcatattccttattttcatatcttttctatttttctccgataaccaattcagctttacctaaccctttcgtcattactttgcaggtaagattggctttctgattgagatatttgcgcaaatcatttgcaaagcttcttgtatctctagccattccattttcacgataaagcggaatgcgtacctgctcaaaaagcatcatattctcagttgcatcagttaaactaaaacgatgagccaccgtattctgcgccacccaatcttctatgatttcctgtagttcagcccccccaaattcactttccaaattaacaccgctcccattatcaaacacgtggacttctaatgctacttcacggccattagccatcaaatcatcaaaatgtttctgtaactgacttacgaaagcatccatcttgtctactaccgcttcttccaacaatactgccacttcagcagccatagaaggttctcccgtaccttgcgtcgctgcgacctgcttattagtgtaagcatccaagcctcgcaaagtataagtaacagaacgtttgggacccattgtattaatattccaaactacttcaatcagaatatcagctttagctctattcattaaccgatccaaaggagactctgccagtgaagctcccgaagtagaactggtagtcatctcatgttccgccgaactctgctctatggaacgaatagaagatgccatatctttcaacggaaaatctttttcagccatcaactcacctattttcgttatgacattcaccaagttcagatcattatccaacgcctttttataatccggaagttcggtaataatgccttgattgttatatttttgtgtataaccattatgggtacaccacacattagcaggaacaaccataatggtgggttttttagcctgtccatacactccggtgtgtacaagtgctacaataaataaaatagcatataattttttcatgtttttctgtctttatggttttaaaattttatcttctatcagtttctgctgtaattgagaacgaagcacacgcaccgtagtggaataagaaatttgagtcttattagaagtcttcatgtcagaatttgttttcttatcttccatacttacatacttcaggtattcccctccgtctctaaaaaagtcgttaaaataatatgcataccgttcctgtgcattcacttctgttaccaaagggcgcacactacattcacgactaccggcagcaacacctttgaacaaaacatcccttactgcatttttctttgcctgctctatagcatcagtacgatttttccctctgccccaagctcgaagtgtctccgaaccatccagttctactcccaaacattcactctcaaaggaatgataggaagaaacactctttttgctgctgcatccggcaaagacaagtaaaagcagacatcccaatttccacgtataaaatagatatttcataattttttcttctttaaaattcatagcctaatttcaataatacaatattctcaaaatgacgctctcctccacaaacttccacaacgaccaaaggatactgataaatttcaccattggatgcctttattttcactatccgtacgcttcaagataactcccttcactacgtaccattattcagataaaacacttcatgagcctgctgggcaaaagcaggcaatagtgcgccagccagtatcagaaaagtaacaatcaatctcttatacataagctaaaatccattatttagtcctttaataactccggctgataccagctcttgatagagggcgtctttcgcaacggaaaccactgctgaaattcgatactgctttcccattttcaccactgaaagattctctcctatcatattggcaaaatttatataagaacctcctttttggaagaagacatcaaaataatcctgatgctgctgttctaccaccatacttcctgccaaaggtttctgccgggtacgtgaagtctgactggaaaatcctttgaaaagcaccccatgaaccgcacacttcttgatcacatcgatatccaatttacttttcttctggattactgtcacttttactaaataagtaccctgtacacctactccttctccctctatctcatactttaaaaggtcatcacctgcgtacgctccaatacagatgaatacaaaaagaatcgtcataatgattctaccgacaaatttcacattcattactttcataattctaatctttaattatatattattgttcacacccttctttactggcaaactgcaaatattcatccttcactttccgataatactctcccatcaatttgcctgtattctcctgaatcttttcttcaagatcttctaacacatatttcaaaaaatcgcaatgattactgcctcctgctatagcagtagctgtagatccaccaagggcatctatctcatccatagaaacccccagactaattccggatgaaggcttattttgatttctgctttcatccttaaaagaattagagttcgtagattccaaatcattatgcacacttgcaatgtaaccaatcgtattcaaagttcttttcttcttgtcctttttggcttgcttcagcgccaacgctacttcttcattatccggatccaattctgccgctatcttcagatgctccattcccttagaataaatgccatctgccacttgtccttttcccatataatagtgggccatggcatagtccggaatcaagtctgttaataaattaaacataccccaagcacctgccactccccttttttcttctttcaaaaaggattctgtcacatcctctgcaaagccatcagagagttgtcccttcgtatctatccaaccaagtacggaattcagccaaacaggtgctttgccatccacaaaactacctatataatcaatccttcccggtagtaataaagcaccttgactattatataaccccattgcaaaacttttggcaatccagacctttgccgatacatcataatatacccattgataaacacaaggcaatatagtacgcccatatatatccaaaactccccatttatcccgcttgcaagcaagaacgaatccatcttcagctattataagctcctcatattctgtaggaattacaatttgttctcccactataaggcccattttaccattatcttcccttattctgagagaatcggttataacttctgttccaggattattaattttttcattgacctctctgctacattcagcgattttatcaagcaaatcatcaaaatcaccgttccctttcgcatttttcatttcttcttgtttctgacgatataccttattggatataggaacgcttatcattgcttcttctagaatatatttacatggaacaacgatttcccccctcaaattaatagccccgaacttaccatcttgcttgattgtagccaacatgttatctctaaaattatcagcgtaatcaaattgaggttcaatgacaaattctccttttttatttataaagccaaatttgccattcttctttaccgcagacagtcctaaattaaacccatgaacatcatctacattttcaaactgcggtttaattataaaacggttgtgtatgtctataaaacctacttttcctcctaaaactactcccgccaacttttctgtaaatctcttagtcacctcttcatattgtggagaaatcaaccaatttatctcataatcctgatttactaaagccgcatcccattcaccaaacatagaattacctctatattttgaattttcccaccatcctttattttcggtctgctcatatccccatttctttgttgcagcattttggcgtgctttctgcgcataaaaactaaaaggtatagcacagcataacaaaaacaatattactttttttacttcattcatatacatgtcttttttttaaccttatgtggcttcaaagaaaaacaattaacgccattttacaaattcacaaaaccaagagaaagtatcaaacagcctaataagcatactattctatctaaattaatgactatataacctcatttccatataccgcaaaggaaaaattaagcactaaaagcaaaaaagcagcaatctcacgactcctgctcttccattgtgatttaaaatcactttctataaacttgtattttcaatgttatcaatagattcactacaacaaataaaacctatcctgtaattcttttctgaatttcttggaaacctgaagttccgtaatattctcaaacgggggaaacatgacacagcggttctccttaatcatcatcagataattgatattaatgatatacgactgatggatctggacgaagcaggggtcatatcccttgatatgatcagccgtagtatttttcttcagcagcagaggcagctggttgttcagcaccacttcccacagtttccggtcggagttataacggaaaaaaccaatgtcaatggaacgtagaatacgcaaatcattggtaggcgtggatatcataaaggtatgctcgccgaccgaatgcacacgcgcaggaatagccaaagatgcagctgccgactcttcctcctttttcatgaagcggtcgataatcccttccagctccttcttgtctatcggcttcagcaagtagtcgaaagctgccccacggatggcataaatcatgtatttatcataagccgtatagaacacaatctgcatattccaagtgattgccccccttatctgttccagcagttccatgcccttcatgtccggcagttccacgtccaggaacagcaaatccggatgaaccttttccagcagtttccggccattcacaccgttacgcgccatcccatctatagacagcctgttatatttcttcagttccagacaaagattgtccgcagagaactcatcatcatcaattattacgaccctgtatagtttatccatagtaaacaatcctgctttagttattaacggaacaaaagtattaaaacatgttttaacgcacaaacccgacactctggttatggaactatagcgaccgtttcggacactattctagcaaaaataatgactaaaccatctttttcaaattataatcataaccatggggcaggaagacagcaaactcgcaaccggtttctccgtcttccaactgcacattggttatggatatatcgatatgcttcttattgttagcgttcaacaactgtatggtttgaagaatcacttttataccggtgcctgtacc

SEQ ID NO: 14460 - DNA, 10991 bp, Unknown
  gut microbiota DNA sequence
gcataatcagcaacaaaaaagcactcatgtgaaaaagaatctttcaatgaataaataacctgaaaatcaacaattagatatggaaaatatagattttggaatacttttccaaggcattggtacaatgatagaaagcggttggttccttgcctgtgcgcgcgtttttttaattcttttgggatttctactcatttatctaggttggaaaggaatattggaacccatggtcatgattccaatgggactcggtatgatagccatcaattgtggaacattaatcatgccggatggaaatctaggcaatctttttcttgatcccatgctctcggatacagacgaattgatgaataccatgcaaatagattttctgcaaccggtttacaccctcacattcagtaatggactcatcgcttgtttcgtcttcatgggaatcggaaccttgctagatgtaggtttcctgctacaaaaaccttttgctagtttgtttctggcactttgcggagaactaggaacctttctcacattgccaattgccaatgcacttggcttatcggcacaagagagtgcttctgtagccatggtaggaggtgcagatggtccgatggtactgttcacttcattggcattagccaagcatttgtttgtaccgattactgtggtagcttatctctatttaggattgacttacggcggttatccctatttggttaaattactgattcccaaacgtttccgttccatcaaaatgaccgtaaagaaagcgccgaagaattacgatgccaaggtaaagcttgctttcgcagcggtactctgcgctgtactctgcttcctttttccagtggcctctcccctgtttttctctctatttctaggagtggctgtacgtgaatcagggatgaaacatatttatgattttgtcagcggtccattgctttacggttctacttttatgctgggattattattaggagtgctttgcgacgctcatctgctactagatcctaaaatcttaaaattgctgatactaggtatgttggcattgttactatcaggtatcggaggtattttaggcggatatatcatgtactatatcaagaaaggaaattataatccagtcattggcattgctgctgtaagctgcgtaccaactactgccaaagtggcacaaaagattgtcagtaaagacaatcctgattcatttatcctaggagatgcactaggagccaatatatcgggagttattacttcagcaattattacaggtatttatatcacaatcatcccgctattatgaaacagcatgaatcctacctaataaatttcatccacttttaataatgctatcattttcgcagagggcagtccgcgtatctgccctctgccaccactaccaactaaaaataattggaatggtgaattgattcacataaaactcccgataccatttctttgaattgaaataataccccgtactccatctttcattcactaattgaagtacccgcaatgcttcggcatccattaatggatcaagtcctctcaccaactgaaaatctttcattgaaccatctatatccacattgaaactataaatcacccgtccctgctttcccgtagccttcatttcgggagtaattttcagatgagaattaataaattgcgtcaaagcaacagtaccaccgggataagaagagtatctataaggctcccaagtgatcttttccaaatcttcctgtgcgcattccctatataataaataatgctccagatcctctttccaaaaacgcatagttaaaaaataatcatatggcacagattttctgtttttcatagcaggaatcaaccggggaaaattagaaagaatacgtatggactctttatcaaaagccggatgagtaccttttatcacacggatatccacaatttctcctttttcatttaccgtaaaacggcaaatagcgacggctttatccactttatcgtcaggccaactcatatttcccataacaagactacgaatatcatcaggaaagacaggcatggaatcgacaagttgtcctctgcaagattccagaacttgctgctgccgccaaatgcggtcactgtaaacatcaggattaaaaggaatatgaaagacgatagtagtatctatatctctacccgctttctttgcaggctgccattcacgcataccctcaatcacatcttcggccgccttagcaaacaaggggtgagtggcttcaatatatttacaacggacagtccccaaactatcaatgcggagcgtacacacagcttcacctgcaatattggcccttaataaagaatccggatatacgagctgccacacagcataatccgtaataccttttactgtaggataatatggcgggagattcatgttcttttgtgcataaaaagatagaaagggaaatatgcaccctattaataaaagtgataatctattattcatgcctaagtcaaattttcacaaaattagcgactacacatgatataaacaacaccactaacattaatatatataaaagaaagcggagatacctcatcgcatccccgctttctacattaaatactaactattaattattttcaggacgaagtttacgtacggttacagcagtctgccacatttcgctttcacgcaatgccttcaattcttcttccaatttttcacgataatcgggtttagagttagaatcgatagaaatctgagcctcgttgccagtcttcacactgtgatataacttttcaactacgggtttgatagcatcgtgaaatggggtcatccaatccaatgcaccgcgctgagcagtggtagagcagttagcatacatccagtccataccattcttagcaaacaaaggcatcaatgactgggttaattcttctacagtttcattaaatgcttcagaaggactatgtccgttttcacgcaatacttcatactgagccaacaacaatccttggatagcccccattaaagaaccgcgttcacctgtcaggtcagaagttgcttcacgctggaaagtcgtttcgaataaatagcctgaaccgataccaatacccaatgcaatagtacgttcataagccttaccggttacatcctgatagatagcgtatgaagagttcaagccacgaccttccaagaacatggtacgcagtgaagtacccgaacctttaggagctaccatgatcacatcaatatcagtaggaggaactacccctgtacggtcactccaagtaatggcaaagccatgagagaaataaagtgccttgccttgggtcaagtaaggtttgatagtcggccatacagacataacagctgcatcagataacagacacattacgatagtcgctttctgacaagcctcttcaataccaaacagagtttcacccggaacccatccgtcagcaactgctttttcatatgtttttcccggacgctgaccaacaattacattgaaaccattgtcccggagattcaaagactgccccggtccctgtacaccatacccgatcacagcgattgtttcatctttcaatacttcacgtgctttttccaaaggaaattcatcgcggataactacagtttctgtaacgccgccaaaattcaattgtgccattttaaattataaattaaaaattaaaaattagattctaaataaatatcaccttactacgaacgacaacatctgtgccattcttcttcacctctatatcatattctttctcctccacttcctcgcggtagaaactcaatatatcaccataataactctcagctacataagccatctcaaaacgtttaatccgtttctctttaaaaaactctataggaaacaaatcgagaatatgttctatatacttaatactgttcacatgaccattaatatcaatatcgctatatctggtctggtattcagaaaccggagctttctctgtcaccttaatacgaccgggcttgcttataggacatttcttatcgcatacataatcaatgatactacctccgtgaagcgtaagcaggtcagcaggtttgcgagtttccatactgatcatcgcccatacagaacgggcgtatccgacagtctttccttccttgtccaaaattgcaaaattacggtctgtaaaaagacgataaacattctctacccatgtctgaatactgaaaccctcatattgacagggcatattctctaactctacagctaaacgggaaagtacccatgtataatgattctcattgagcgtagcaattccgaaaccccggtcggcagcatgaaagccggcacaattcagtaaatgattacccaacacactcatggtcaactttccactgaaatcacagtgaaagggttctgccacaaatctgtatgttcctactttattctcactcatcattattctgttttttgctggcgatacttttcctcgcgttgggtcagatattcgttcacacgctcgaaacagctggtagtaatggccacacgtcccgaacggacaaactgcaacacacatcccaatccgcgcaactcctcataaagagcagtaatttcctcactcatcccattcttttcaacaatagagaaaaccggattcacttctacaatgcgggcactataacggcggataactttagatgccataggattctcctgaaattcaggagtagaaaccttgtacaaagcaatctcatgctgataaatctcactatcagtaaaataatgtgcctgcaaaacatctattttcttttcaatctgcttcaccactttttctatcacatcctgggtggtccaagcagtaatagtatatttatgcacccccttgatggaagatgcagaaacattaagactttcgatattaatttggcggcgagtaaacactgccgtaatctggttcagcaaaccggcgatattttctgaatgaacgattaatgtatataatgtcttgtccataattattaaattagcattccagtaacatctgattcaccgagcctcccggaggtgtcatcggcaacacatttccctcttctatcacacaagcttccagcaggaatggcccgtcagtagtcaacatttcatggatagcagcctgcaattcctcacgcttcataacacggcgggcaggaatctcatatgcctcggcaatcttcatataatccggattcaacatcggagtaaatgaataacgatgaccaaaaaacatagcttgccattgacgaacattacccaaatagttattgttcaataaaataatctttaccggtgctttttgctccatgatagttcccaattcttgaatattcatctgcaaaccgccatcccccataaatacgcatacagtacgatccgggcgaccgaaagtagcgcctatagcagcgggaagaccgaatcccatcgttcctaatccacccgaagttacaatgctacggttcttactgtatttaaaataacgagcagccatcatttggttctgtcctacatctgtcaccaatacagcctcgttgttcgaagcctcacttaccgcacgcaccacttcacccatattcaacgccccgtcaacaggatgaatttctttactgataacatgttcatattccgtcttttcatattcagtaaagctatcaatccattcggaatgttcattcttccggataagttgcgtcagcatagctagcgtatatttacaattacctaatacgggtacatccacttttacattcttatctatttcagaatggtcaatatccaaatgaatcacctttgcctgtttagcatatgtatctaattttccagttacacgatcgtcaaagcgcatacctacagcaatcaacacatcacattcattagttttgacattgggccccagatttccatgcatacctaacattcctttgtttaaaggatgcgaagttggtatagccgaaagtcccagcaaagtacagccacaaggcatatcggctttttctataaatgcacgtaactcatcttgcgcattacctaactctaccccctgtcctaccaacactaatggcctttgagcattgtttatcaattcggcagcctcctgaagagattccttatcaggattaggttctggatcataactacggataaaatcaagcttcatcggttcataatccaccatctccacttgtgcattcttggcaaagtccaaaacgacaggaccgggacgtccgcttttagctatatagaaagcacgggctacagcccaagctacatcttccgcacgacgaatttggtaactccatttggtaataggctgagtgatgcccaccagatccacttcctgaaaagcatccgtacctaaaaaggaagctcctacctgcccggcaatcaccacgataggcgtgctgtcaatcatagcatcggcaatgccagtaatggtatttgtcgcaccgggcccgctagtcaccaaacagacaccaacctcaccggatacgcgggcaaatccctgtgctgcatgggcagctccttgttcatgacggaccaatatatggttcaatgtatttctatgatgatataaagcatcaaaagtaggcatgatagaacctccgggatatccgaaaagagttttcactccttgatactccaaagaacgcatcatcgcctctgctcctgttatcttttcttttgccataattgtttagttgagaattgagaatcaaaaaaatacgatgccggacaatcgaccaatgacaacaaatctattttttttattctcaatttttaatttctaatttagtcaatgattctcactcctcctttatctgcagaacttaccatactagcgtatgccttcaagcttttaggaactttacggtcacgggtcaccgctgtcatcggtcgggcggccaattcttcgtcactcagtttcacattgatactgcgattcggaatatcgatttcaattatatcaccatccactatttttccgatattaccacccgctgcagcttcgggagaaatatgcccgatgcttaatcccgaagttcctccactaaaacgtccgtcggtaatcaaagcacattcttttcctaaatgcttggatttgatataggaagtaggataaagcatttcctgcataccgggaccacctttcggaccttcatgagtgataacaacaacatctccgctgactacttttcctcctaaaataccttcacaagcagcatcctgcgaatcaaacaccttggcaggccccgagaatttccaaatactttcatccactccggccgttttcactacgcaaccatcctgtgcaatgttccctttcaaaacggccaaacccccatctttactataggcatgttgcaaatcgcggatacaaccattggcacgatctgtatccagttctttataaacagcattctgagaacctaactttatattgaatttgtttcccggagcacttgaataaatacgttttgcttcagtatccacttctttcttacatatattatatttttcgacagcttccgccaatgtcaggccgtccactcgtttcacatcagttttcagcaaaccacccttggataattctcccaatatattaaggataccaccggcacggttcacatcctggatatgatatttctgtgtattcggagctactttacacaaacaaggcacatggcgtgaaagcatatcaatatcatccatcttgaaatctacttccgcctcgtgggcgatagctaaaagatggagcacagtattggtagaaccacccattgcaatatccaatgtcatggcattcagaaaagcgtcacgagtagcaatgttgcgtggtaacacgctgtcatctccctcctcataatatttataagcattcttcactatcagagcagccgcatctttaaacaactgagtacggttggcatgagtcgccaaaatagtgccattccccggaagccccagaccaatagcctcattgaggcaattcatggaattagccgtaaacatacccgaacagcaaccacagccaggacacgcattattttcaatttgagccacatcctcatcgctgaccgatgcatcagcagatttaatcatggcgtctatcaaatcaagatgctggttattccattctcccgcttccataggaccacccgatacaaaaacagccggtatgttcagtcgcatggcagccatcagcatacctggagtgattttgtcacaattactgatacacaccattgcatccgccttgtgagcattcaccatatattccacgctgtcggcaatgatatcacgactgggcagtgaatacagcataccatcgtgtcccatagctattccgtcatcaatggcaatcgtattgaattctgctgcaaaacatcccaatttttcaatctcaactttcacctgctgacctatttcatgcagatgggtatgtcccggaacaaactgtgtaaacgaatttactatggctataatgggcttgcccatcatttcttttttcatgccgttagccacccataaagctctcgctcctgccatacggcgaccctgtgtgctaaacgaactgcgtaactgattcttcatcttattctaaatctataacgtcctatacttattgaaaaagccttcctcaccatgtgagaaaggcttccaattatttctttatatgtacaactacacatacacaacctttctcacgctcctagtgtgaccaccacgacgcgaataatatgcaggactgctaggttatttagagtagtaatattcatatatctgttttctttgtttctttaacgactgcaaaggtaaggcgtttttcgtaacaaacaaataaaatgaagattttttttcttataaattattattcgtaactaaatcgagctttaaacaatcattttatcacaaatatacactgtatcttccaacggataaataaaaaagagaatgcattggtttgcattctcttttcagttcatttatttcattttataaatttacttattcgccacatcttccatataggaatccaaccccttgtttttcaatgtaacattcaacaactgtacatacttcttgtactgctcatttgtcaatgtacgtttcatcagtttgaagtttccatatacggcttcacgcaattttttaccttgtttagcttcttttgcgtagcttgcgctttgtactttgtcagcaaaataatcagaaatattagcaacttcctccatctgacgtgcatccaaattcaaatatttgctcaactttgcgacgttaacatctaccttccaatctttaccttctactttttctcctgcaaaacttgtagctgacattcctaatgccactacaaccaacaatactaaacgtttcataatacctaaaattttaatttgttaaacctaaaaacaatttatttagtacctaagaactaaataataccttttaaaaacaatctcgttatctctttctctttacactgcaaatataacaacatgctttacgacatgttgtcatatatccgttaattaaagcaaaaatctatcaaggcgagcggttaattgatttatatcaagaatcaaacgcaatcaaaagcgcatttatagtatcataataacaaatttatgtaatataaacgtaataacaaaggattaaggggaattaattcgtatctttgccaacaaaaaacttacgtaaatagtttatattacattattataataagaaaacatggaaaataagtacatcaccgtagcatacaaactttatgtaatgcaggacggccagaaaacattggtagaagaagcaactgtagaacatcctttccaattcatatccggattaggaaccacactggaacgctttgaaacagaaataacagccttaaagaagggtgacaaatttaaatttgtcattcctaccgcagaagcctacggagaatatatgcccgaaggtgtgcgcactgtatctaaagatatgttcaccattgatggtgtttttgatgaagaacgcatcttcccgggagctgtcattcccttacaggacaatgagggacatcacttctacgctaccgtaagcgaagtaaccaatgacactgtaactgtagatttgaaccatcctcatgcaggtaaagatctcacttttgaaggtgaagtagtagaatcccgcacagccactaatgaagaaattcaggaaatggtaaaaatgatgagtggagaaggatgcggctgtggttgtggtgactgcggagaaggatgcggtgatgaaggtggatgcggatgcggacattgtcattaatttcgttaaacaatagataaagaagaggacggaacaaaacatccgccctctttttattattgataacgaaacaatactgattggcagcttcagtgtttcttcaaacatttcaaaaaaaagaacttgaagttttcaaaaaagatctagttcttttctattaaacatctagttcttttaaaaaaagaactagaccttttttaaaaacgtccggttctttttgactataggaccggttatcttgattcataggcgaaacaaatgcatttagctgggtaataaacacatttttcttctattgcaagacacagataataagactaaagaataacataatgtaacaaagaagttaaaaatgaacagagagaatgccaaaccgtttgcccattccaaacactatctgtatttttggcagaaatattctgatcaaatgaatgagaatgtccttgccaaattgaaaatactcgcagaatctgctaaatatgatgtttcctgctctagtagtgggaccgtgcgccgtaaccaatccggcgcattgggaaacaccgtaggcggctgggggatatgccatagcttcgccgaggacggtcgttgcatatccttgctgaaaataatgctgaccaattattgtatctatgactgtgcctattgtatcaatagaagaagcaatgacattccccgcgccacgctttcggtaag

SEQ ID NO: 14461 - DNA, 123215 bp, Unknown
  gut microbiota DNA sequence
aataatggaggatattattactatatttatacctatcggttcattcaagaaaatcccggaaaattcaaaaacaatcaatctgaatattgggatggaagtgacgtttattacactgtaaaagctagagagccttattatggagaaactttccaatggaatggtatttgtttattagctccttatcaaatgggacctacgctaaaaacattaaaattaaaaataatatccaatggagaagcacccagtttctcatctgcagaaggtgaattggatttttcaaaaatagactttacaagaatttacaaatcatcgaccacacgtgtcgttaaagaaaatggaatggactatgtagaaccgatagcttatactgaagaagaagccaacaaacttaaaatggcatatatcacattcagatatacctcaacagctggttcacaagaagcatcaagttctaataacagatcttctgcagaagttccaacgttcaaagtattcgcaccgtttttaaattcatccatatacattgacaatggcaatagttcatatttctatagatattatcaaggttatctccgaaaaggaaaggatgaaaaaacatttattattgaaaactataacagctcttatgagttgcccgaagtacaagttatctatgaagaataaaaatatgaagaaaatatatatacataaaatccatctcatactatgctttacctcagtattatgtttcggtttacctataaatgcacaaaaaagcgcaaagaatggaacaaccgataataataaaaaagcatgggaaataggtataggcgcaaccggacttcaaatgacacgttttaatgttattaatttccatactaataataaaggcggttacactgtaggtactaacaaaaaagatttcattttcggaggaaatctatattttgctcgtgaacttaactctcatttttatctagatttacaaggaacattagactacagttccgatcctgtccgtaacggtaaggaatcaagatggctaggtatgacaggaatcggtttacagtggcgcctaggtgaatatttccattcaaattatattgatccttttcttcgaatgggggtcaactatatgtacaagaattttaagatcaattataaggggatggaagaattcaacagtgaggagatgggatggaatctgtcaaatgattatactaaagaagggaaggataaacaaaatcttatccctatttcattgggaataggcgtgaatatgtggcttaatgacaacattggcataggactccaaggagactatctcatcatgccatacaaacatatagccaattcatggcaaggaagcattcgattgatgtggcgcattggtggtaaatccctaaaagtcaaaccggaaattcaatatgtggaaaaaatcatagaaaaagaaatagaaaaacctataatcatgaaacaaattgtagagactccaaaccagcccaatgttttatgtgatttattcaacaatatctattttgagtttgataaaacagaaataactcctaaagcagctactatcattgatgaaatagctcaaattatgctgacagacacaagcaaaaaatatctcattacaggatgtactgatgcaaaaggatcatcacaatacaatatggaactatcccaaaaacgtgcagacgctgtagtcaatgcacttataaagaaaggagttcccaataaaatgttaaaagcaaaaggagtgggcgcaaaaatatcttatgcatctcagaatgctcccaacgaaatacgagaaggagatcgtaaaattatagttcaaatcgttacaaatatggattattggaattatataccataaaaaaatttcccctctatcaaaacggcatatattcctatatcgtggaatatagccgttttgcatgtttctaagaaaagttcgaaccatgtataccctcataccctcactgcatatataacaggtttattataaactatttatgtagtaaggataaaaatacttgctcttattcatgttctcatactctcacaacgttttgaagcatatttttacataacatccttgttttcagctatatattctttttttataaattgtttcggcttgatataaagtagggtattttaggctttttccccacaaaaagtacacatgaaaagtttgtacctccacagaatgacggtttacgatgtattggcagcaataaaaaagatcaagacgtttttaaaaaagttcctgttattttttaaaaaggtcgtcttcttttttgaaaagttcttgatcttttaaaaaacactttttgggcatgaggatatcacatatgtacgcataagactgtacgtacacatatataaccctgcacatacgtatgtatagttccatgcaaaagtatgctttctgatgcgaaatgaaaacagctttgcaacactctccatattttacaggtgatccgtaataaggtacaccgaaagaatactttgatatgcctatttttactatacatcaaaaaataaaaaatccccgtaaagtattaatttacagggattttctttgttttacaattctttccagcggagagacagggattcgaaccccgggtacctcgcagtacaacggttttcaagaccgccgcaatcgaccactctgccacctctcccaaacttcctttcagaagtgcttttgttgaaagcgttgcaaaggtacgactttattttaaatatgcaagacttttgaacaagaaaaattaaaggttttattatatttgcactctcaatcgaaaaaagcatatgaaactaaaatgtcttttcttactgttacttttggggatatccttttgtgtacatgcacaaaagcgccccgtcatccttgagaaacagttggaaatcattaggaaagaacctgataacggggatgccttaaaatttctatgccaatactatttaaataaaggagattattccaaaaccatcacttacgctgagattatgaaaaacgtagcggacaagactaaaaatcctctactccaactctattcatatatctaccaagcacaagcgcaaatgatgagcggacgggaaaaaatagccaaaaaaaacttgaatctttctcttgaattagcaaccaaactgaataatgactccaccctttgttccgtctatggtagtctcggactctattcagcaaatattgaaaccgattattaccgtgccatacgatggctttataaaggtatccaattggcacaacaaaataatttccaacaacaatacgctttgcttttaggcaatttagcaaatatctattacctcaaaaaagatacagccggcatcaaatacgcattagaatgttatgaattaggacacagtatgcgtaatccatacatcatttattccggtgcagtaaattctgcctatatgtattttttaatgaaacagaatgaggaagcaatgaaatatatccatgaagccgaaacattgatgctggaaaatgatttctacgaccaagcccatacctataatctctttggcaatatattatatgatatgggtgaatatgctcaggctttggaatattacaaaaaagccatgaaggataaacaggcggcacaaacttcctctattgtctatgcccatttgggatatgcacgtatactaatgcagcaaaacaaacaaccagaagctattttattgttaaaacaaggaatagctatttcttatgcacgcgtcaacgccatccatcgcaatgaactatacgaaaatctgtctacctgctatgagcaattgcaccaatatcatgacgcactgaagtattataaaatattccgtttggaaaacgacagccttttcaacaaggacaaagaaagagatttaagcgaaatgcgattcaaatatgactctgagcggcaggaaaatttaataaaacaaagcaaactagatgtaatgcagaaagaacagcgtatacagcaacaaacatttattcttattatcactgtaattgttttagggttgctttattacctctaccgccgtaaaaacaaactttatttaagtattgtcaagcaaaatcaagaagcaatcaaaagagaaacggaactgaatcgccgtataaaagaattggaaaccaatgccccctccatggtttctacttccgaaaagtatgcttcctcctcactcaccgatgagaaaagtttagaacttttccgtacattagagcgtattatgagagaagaaaaaatttacaaagacaattttataacaaaagacaaagtagcggaaatactaggaactaaccgtacttatttatcacgtatcatcaatgagcaatccaaattatccttcactcattatgtaaatcgtttccgtattgaagaagctatccgcctattatctgaccccaataacgaaactccgatgaaagccatttctgcagagttgggatttaactccatttccaccttttataaccttttccaatcctctgtgggaatgaccccctcccaatatagaaacaaagttatggaactccaaaaagagcaatagattatctttttgctctattttttattctgaaaacagcaattgccgatatttatataggtatagagagacatatctaagatattatcccttactttgcggtatgaacattaatcaaaatttaaataatacgtaatgaaaaagaagttttttttaagttgcctcttaatcgttatggcattgcttccggcagttgcccagattcaagatccggtacaattcaaaaccgagttaaagacgatttccgatacggaagcacaaatagtattcactggtaagattgacgccggatggcacgtttattccacggaccttccttcgggaggtcctatctccgctactttcaacgtagacaagatagaaggagtagaattagtagggaagctcactccacaaggtaaagaaattgaaaacttcgacaaggtgtttgaaatgaaattacgttactttgagaacactgccattttcattcagaaactaaaaataactggcgctacctatatgatagaaggttatatggaattcggtgcctgcaacgatgaaaactgtctgcctcctactgaagtttctttctctttctccggaaaaggagttgccgctgctactacaagcaagactactgaacccgcaaaaacagaaacagccataacggaagttcctgtagcggaaacagctactgcaactaccgcaacagatagtgctacaactgccgccctgatcggcaatgacactgctgtccaagattactggactccggttatccaagagttgaacgcatttggcgaaacgacatcacaacaagaccgttcatggatttacatcttctttgccggatttatcggtggattactagccttatttacgccctgtgtatggcctatcatcccaatgacggtaagtttctttttaaaacgtagcaaagacaaaaagaaaggaatccgtgatgcatggacatatggtgcttctattgtagtgatctatgtattattaggtcttgccataaccttgatattcggtgccagtgccttgaatgcactttccacaaatgctatttttaacatattcttctgcttgatgctaattgtattcgcagcctctttctttggagcattcgaacttactcttccttcaaaatggagcaacgcagtagacagtaaagcggaacagaccagtggtttgttaagtatcttcttgatggcattcaccctatctttggtttcattctcatgtacaggccctatcatcggctttttgttagtagaagtttccaccacaggtagtgtgattgcccctgccatcggtatgttaggtttcgccattgcactggcattaccgttcactctgtttgccatgttcccatcctggttgaaatccatgcctaaatcaggtggctggatgaatgtaattaaagtcgtattaggcttcctcgaacttgcgtttgctttgaaattcctgtcggttgctgacttggcttatggatgggggattctagaccgtgaaacattccttgctttatggattgtgattttcgctttgctaggcttctatctgttgggtaagatcaaattccctcacgatgatgatgatgataaagtaggtgttgcccgtttttttatggctcttatctcacttgcatttgctgtatatatggtaccgggcttatggggtgctcctttgaaagctgtcagcgcatttgctcctcccatgaatacacaagacttcaacttatataccaatgaagtacatgcgcagtttgatgactacgatgccggtatggaatatgcaaaacgtaccggaaaaccggtaatgctcgactttacaggttacggatgtgtaaattgccgtaaaatggaagccgctgtatggactgatccgaaagtaaacaagttgatgactgaggactatgtactgataacattgttcgttgataacaaaaccccgttgcccgaacacatcaaagtgatggaaaacggtaaggaacgtacactacgcacgatcggtgataaatggagttacttgcaacgttctaaattcggtgccaacgcacaacctttctatgtattgattgacaatgaaggaaaaccgttgaataaatcatattcatatgatgaggatatagataaatatgttgacttcctccagaccggattacaaaactataaaaaataaccaaagtgtgtcaaaagtcgaaggggtgtcaaaactaaataaacctatcattctattcattcagaatattctttaatgaaaaatattctgaaaatcaacgaaaaggaaaagacaaacgaaatgatagttttattcgagttttgatacactttcaaaaagatttttgcaagaccccttaataattatctactatgatcgccaaaccagaaagagagcaaatcattgcccttataaatcgcgaggtcgttccggctatcgggtgcacagaacccatagccgtagccctttgtgtagcaaaagcaacagaaacactaggtaaaagacctgaaaggattaaagctttactcagcgccaatattcttaagaacgccatgggagtaggcatcccggggacaggaatgattggactacctatcgctatcgccttaggggcattaatcgggaaatccgaatatcaattggaagtcttaaaagacagcactcctgaagccgtagcagagggtaaaaaactaattgactcacaagctatctctatcgggctgaaagagaatatagaagaaaagttatatatcgaaattatctgtgaagctgacggtgataaagcaacggccattattgcttgcgggcataccaattttatatatgtggcctttaacaaccaagttttactaaacaaacaaactaccgccgcctgcaatgaggatgcaaaaaaaccggagttgaacttgcgaaaagtgtacgattttgccaccaccacaccattggatgaaattcgttttattcttgaaaccaaacgtttgaacaaagcagcggcagaacgttctttcaaaggaaactacggtcacgaattaggcaaaattctgaaaagtagcaaaagtgaagaacaaatattgggaagtaatacatttacccacatcctttcttatacctcggcagcttgcgatgcacgtatggcgggagccatgattcctgtcatgagcaattcgggaagcgggaaccaaggaattacagctaccttaccggtagtagtctatgccgaagataaccataaatcagaagaagaattgatccgcgcactgacactcagtcacctaacagtgatttacatcaaacaaagcttggggcgtctgtctgcactatgcggttgtgtagtagctgcaacaggttctagctgtggtatcacttatttgatgggaggcacttatgagcaaatcacttttgctgtacagaatatgatcgccaacctgacgggtatgatttgtgacggagccaaacccagttgtgctctgaaattaagcagcggtgtctctaccgctgtattttcagccatattagcgatggaacataaatgcgtatcttctgtagaaggtatcattgataatgatgtggaccgtagcatccgcaaccttaccagaatcggttcacaaggcatgaatgaaaccgataaactagtattggatattatgacacacaaacaatgtgattaaaggtatatataaagataagagagctaaaaacgaatcagacacggtgtttatacaatccgtgtctgattttatttctcactccaccaacatgtctttatattgggtatgccgggtaaaaaacatttttgcaaaagaacaagtaggacatattttaagccctacgaccgaagcatatctcacagcagcctcggtcaaagcctgagctattccctgcccctccaactgtgggggaactattgtatgaaggatatccaaaactccgttcttttcatcatattgcaaataggcgatttgtcccgattcaaatacttcgaaacggtctactttctcgtcatgtataactgtatgttccattctatattgattttaatgtatgactattattaataaaaacaataataaaatggaattgtttttactcatagatgaaatctgttacagaacgtatgtctgttgacgaaactccgatacaaaccttaaatggcactataaaatattgaaaactatctaccttgtttatattggaaagccgaaggtagtataccaaattcttccttaaaatatcgactgaaatatttcggattattaaaacccacctgataggctatttctgaaatattctgttgacttccacggagtaattgggcagcccgctttaaacgaattatacgaataaactcgataggggtcttaccggtaatagccaataactttttatataaatgaacgcggctcatccctaattccttgcttagctcttctacagacaaatcgctgcgtgcaatattatcctctacatatttcacagcatgatttatcagtttttcatccatcgaagttatggcagtcccactaggtttgagatcaatataagcatgattccaaaccgttttcaactccagttcacttttttcttcaggaacagcggtcaccatttcctgtaccccctccggtggaataatatgagttatcatctcattactctcaccctcaaccaattgaatcaccgttgctctttgtggagcaacggcagagattgtttctatatttttttcttctgcaatttcttccgtattaccagattctaatcttcgaatatcctcctccagtccttctattgttattatatggttcagttcttctttcgattcctccccgacattagacgccacataagactccggaacttgaagtgtggaaatatcttctaccgacttatctacaacttgcacctgttctatcttcatcggtttacccccagaacgttttactggaatatggataataaaaacacaaccgacaggggtattatccattacgttcaccgtgccatcgtgaagcgtgacaaaatcacgtacaatactcagactacctccgccacctgagaagctcatatccggataatccacttgataaaaatgtccgaaaatgcgttctctgtcttcttttttaatgccgatccctgtatcagccactctgatttccagcatttcccgagaatcctgtccttccactaaactgacagacacatcaactcttccaccactgcaagtaaatttaaaagcattggaaagcagactcatcatcacttccctcattttatccccatcaaacaacatattcaatgaggaaacagctgaataaaaagtgagagaaacatctttctgttcagacaaagagataaaagaatcacaaatcgtatgaatataagagatgatatcatcatcagacaaacttaaataatatccattcacatcaattttcctaaaatccaacaactgatttacaagattcaacaaccttaccgcattgcgttgcactatatttaatttatccatcagaacagcatccgattgatattccttcatcagcgtttccaacggtgagataataagagtgagcggagtacgtagttcatggctgacatgagtgaaaaacttcaaattcatatctgccttctcctgattcctctctatttcttgctttatttgctgtattttaaatttattccgttctccacgcagaacccaatagcatcccaataccaatacagcaaccaccaaaaggctataaacaatatatgcccaaacggaacgccaaaaaggaggatagataacaattttcaatgaagcttcttcatctccaccatatccgtcactgttgactgctttcactttcagcatataagttccgggggctagattagtataagtcactttgtcataggtagtagtcatccaatcctcattgaaacctttcagcctataagcatactccgttttttccggcaaaatatagttatcagaagcaaattgtacactgaacatattctgctcataactcaattttatctgatctaccttgttcaacgccttatccaaaatcaccctaccttcatattcctcacccacccctacttcttcattgaacaagaacaaacgggtaaacatcacgctgggacattttttattgtattttatatcatccgggcggaaacggttaatgccatacagccctcccataaaaatttctccagaagacaattttttaatggaacgcaggttgaacccactattttgcaaaccatctttatcatcataaacacaactatgaaaaatatagcgccctgtttttaaatctactgccggtataacattagttattccacgtgctgtagtcacccatatattttcattaccatcttctactattccagaaatgatagggctggaaactccttgctccactcctaatataatcagttcatccgttttgggattataaacattcagcccctcacatgtaccaatccatatcaatccacggctatcctcatacacctgacttatattctgatcagaaaaatattccttaccagatttagtaccttccagattaaccacttttttagtttcaatatccaattccgaaagtccctgaacggtgccaatccacaaagagccctcttttcccatacacaaagaggaaacataatcggatatcaagccggccgaagttgtattataagtggtgaacaaccccgtcttgggattcaaactctgcactcccccacccaatgtacctatccatataatcccctgcttatcttcagccaaagccaatacattattatgagccaaagaattttgccgttccggtatgttttttttataatgaataatacgaccattatcataacaaatcaggcctccccccaaagtaccaatccaaagtttcccatcactagctttcaaaatgcaaacaatggcatcagtaatgagtttatccgtacctttctgtggaaaagcagcccgattgccagtcacggaattccaatatatgataccgacatcgttgatacccagccacacatagccctctttgtcttcttcaatgcaactaatatctcccatatactctgcaccaaatttaaaagcacactcattaaaataggaaattccttttttataagtccccacccacatagtttcactggaatcctcgtatagaaccattactgtattattttgcaagctacgttcatcacctgccttgttccgcaactgcctcacttcccctgtcttcttatctaatatatcaatgccatcctgatctgttcctatccatatacgcccctgcttatcctgtgatacagcacggaccatgttatgagaccgacgcttgataatatttgccagccaagacagccacttcttctgctccggactataaacccatattccaaatggactatacatccatatatcattatcacgatctacaaacagagtgaaaattccctgcttgtcagttcccaactccctagctaaatcatcctgctgccatttaatcttatttgtccgagtatccagacaaacaagcctcccggtattatataccaacaagattccctctctacattctacaatgtccgtaatatcaccttctggcaactgatgagtatcaaacaaaagcggatatagtaattgagattccggaatgtacaaataacagccttttccttttatataaaaccacatatttttattatggtctatatatactaatgcaggagttccgtcaataccgacttcacatagccatgcatgcacctccctattaaatgtttctgattccgagttgtaaatggcataacccacaccggtaagaatccataagtttcctttataatcttcttgtatgcttttgatataattatcaggtaaagaagccggatcggcattataactacgaaacaaagtcatctgacacccgtcataccgattcaacccagaagctgtggcaaaccacataaaaccttcggaatctttaaagatatcaagaacttgattgtttgacagaccatctttcacctccaaatgtttaaacatgaattcacttgcatacattagactagaaaagcataataatgtaatgatcaaacatttttttcttattcccatagattttaaaggctaattatttttattccactgcaaatgaagcaaaaagcttgataacagacaaactaatatcggcttttttatcattcgatacccacaatatgtttcatttttcctatttttgcaattgaaatgaaagcattaacggatacacaatacatacgacagcttgtctcggagggagaacactgtcatcaggattttaaattcgagatttcggacgcacgcaaaatagcccgcagcctttccgcattcgccaataccgagggcggcaggctattaataggagtaaaggacaatggcaaaatagcaggagtccgctctgacgaagaaatatatatgatagaagcagcagcaaccatgtattgcaagcccaaagtcgaactggaaacgcagacttacaaggtagaaggaaagactgtattggaaatacgtattaacgaaacggtttctaaacctgtatatgccctagacgaaatggataagccatgggcctatatccgcatcaaagacgaaaacatactggccactcccgtccatctaaagatgtggcaacacagcaagaaacctgaaggagcacttgtaacatttaccgaaagagagcaacggttactggatgtcttgaaagaaaaagaaaaactttcattaaatcaatgttgcaaactttgcagattaaaccacaagacaacttgtgaactattagcagactttatccgttttggtctagtggaacttgttttccatggacataagttctattttaaattaaacaaggaataagtaaaatggatatactgaccctattaatcagcagagtgaatgatgtgctttggacttacattttgatcatcatgctgttaggatgtgcgttttggtttacttttaaaacaaatttcgtacaattccgcatgataagagaaatggtacgtctattaggtgattctaccggcaagacagaaggtcgcgaacaccatatttcctcttttcaagcttttgccgtttccatagctagtcgcgtgggaacaggtaatttagcaggagttgccaccgctattactttgggtggtccgggtgctgttttctggatgtgggtaattgctcttttgggtgccagcagcgcttttattgagtccacattggcccaattatataaagtacacggacataattctttcgttggcgggccagcttattacatgaaaaaaggattaaaacagccatggatgggagttttgtttgcctttctgcttatctttacttttggatttgcttttaattcagtacaaagcaataccatttgcgctgctttcgaggaagcattcaatattcctcccagcttaatgggagtgatacttacctcgctcacattagttatcatcttcggaggtattcagcgtattgccaaagtaagtagcattattgttcctgtcatggcattgggatacatctttttatcccttttcatcgtaattgtgaatgcaaagcatttgccagaagttattgaattgattatagcgaatgcctttggctgggaacaggcattgagcggaggtataggcatagcattaatgcaaggaatcaaacgtggattattcagcaatgaggccggtatgggttccgcacccaatgtagcggcaagtgccgatgttacccatcctgtaaaacaaggattaattcagacattgggagtctttaccgatacacttgtcatatgtacctgcactgctttcatcattcttttcagcggaggggcctccactaaagaagtcaatggaataaaacttactcaaatggcactaaataatgaaataggcaacattgggactatttatgtagcggtggcaattctgtttttcgcctatagcagcattttgggaaattattattacggtgaagccaatgtacgctacataactcatcagaaatgggctatccccatttatcgtatatcagtgggggggatggttatgtttggggcattagccagtctggacctggcatggagcctggccgatatggcaatgggatttatgactatctgtaacttgatagccattactttactagggaaatatgcattccgtctactggaagactaccgaattcaaaaacgcaacggggtcaaaaatccagttttcaccaaagacagaatgaaagacattgaaaatgatttggaatgctggtaacacaaagcaataaaacaaaaccccggcatcaaccattcaataaaaatgataaatagtaaaacaaaaggattttaatcaaaaatgtttcagtttttatcgctatctttgcagacaggaaaacaatataatttaagaacacaatgagcatattttcaaaattatttggtaaaaaacagacagaaggagaagaaacaagccacgtaggtggtatggaagacttcatgacactgatccgtgtatattatcagtctgtaatggcctgcaatataggtatcacaaatattaattttttgccagatatggcagttttcaaacgtacactcaaaataccgacccaaaacaacaagttgggaattgctgagaaatcacgctgcaaaaagatgttagtagaactttatggtttaagtgatgatttctttaaagaaattgacggttctataaaaaagaattgcaagaatgtaaatgatgtcaagacttatctttttatgttccaaggattcagcaatgacttgatgatgctgataggtaatttgatgcaatggaaattccgtatgcccagcgtaatgaaaaaaatgttacgtaacatgaccgagaaaacaattcatgatatcatgaccaagaccgactggaaagacgaaagcgtgcacaagacctgtgttgccattcgtaaatacaaacaagccttaggatattctgaaaactggatgacggaatatgtgtataacatcgtattactggctaaaaaagaaccaaagccaaaagaataatcattaaagattttatgaaatccttattaaatatagaagaacatccattagagccttttttaccggctaacgccaaactgctgatgttaggtagttttcccccacaaaagaaacgatggagcatggaattcttttatcccaatctgcaaaatgatatgtggcgtatttttggaataatatttttccaaaacaaagagcactttctgaatcctgataaaaaagtgtttgacaaggaacgtattattgatctcttaaataaaaaaggtatcgcactttatgataccgcttcagctgttcgccgtttacaggacaatgcctcagacaaatttctggaagttgtagaacagacagatatcagtttgctactgaagcagattccaatgtgcaaggctattgtaaccacaggacaaaaagcaacggatattattcgtgaacaaataaaggtgaaagaacccgttgtaggaaccagcgaaccttttgaattcgaagaccggataatgcgattatacagaatgccttcgtccagccgtgcctacccgttgcccattgaaaaaaaatcagcaatttaccggatcatgttcaatgaattaggtctattaaacgaataatgggcaatattttttcataaataggtttgtatattccaaatattacactatctttgcagccgcaaacacgggagtagctcagttggtagagcaccggtctccaaaaccgggtgtcgggagttcgagcctctcctcccgtgcaaaaaagattattcaatgccaaaccatcgaataatcttttttatatcttctattttcttaaggaatttgcaaaagtttatgagtttgtaagctcaaccgccactcaggatgttgcaaaatgtaagcaatcacttcttccgtattagcacaagaacaaggttgcaaaaaataatgactagcagacaaatccaaataagcagaaacatcctgccccacataaaccactttcacctcatctatacgatctagatttattttcgccccttctttaggggaacaagtaacccaatctatattttcaggcaaccgacaagtgccgtttgtctcaatacaaacatacttcctttcatgatgcaatgcatcaactaatttttcatcaatccacaatcctggctcaccaccagtcagtattactacttgagtcgaatattttgccacttccattgcaatatcctcatcactcatcaatgtcccctcttcatgctgagtatcacaaaaaggacatctcaaattgcacccggaaaaacgtacaaaaacggcaggtatcccagtatgatatccctccccctgtaaactataaaatatttcattaatccttctcatagataacggtatttccttctgactcgcggacttcaaccttgaaacaagtgggaatttgctcacatacccagcgtgcaatattttcagctgtaggattaagagaaacaacctcattcaaattctgatgatccaaacgccccatcaccgtttccttgatatgcgtaaaatccaccaccataccatcctcgttcaaaacctcggaacgacaataaacggtaataatccaattgtgaccgtgcaaattctcacatttacttctatacgacagcttcaagctatgggaagctgaaatttccattcgtttaattactgtatacatagcatttaattataataagaaagaactcacacctaatgtcacctcggtgctacaggacgcaaagatacaccataaaaaagaataatataaaaaggacacagcatttttttgttttttggtctatatttgcatctatgaaaatactatataccattgtaggaacgacctcactcatattaggcattatcggcatatttcttcctttactgcctaccaccccctttttattactgacagctgccatgtatttccgcagttcaccacgcttgtattattggctcatccaacaaaaatatttaggaagctacatccgcaatttccgcgagcataaagcaatacctttacatgccaagatcgtttccgtatcattaatatggattaccctaagctattgcgccatctggatactaccctacatttgggcaagaatcctgttcctgattattgcaatcagtaccacctggcacatagtatcctataaaacattaaaacagtaaacaatcctcaacagatatatgtaatagtaaaaagatcatattcgaatagcacgggaaaaacagctaataaagacgttaaaaaagttttttaaacgataaacgataaatttaggacgaaatattttcgtgtttgctcccaatcctttatatttgtgtacaattttggtataaaatgactgaagaagacaaaaagctattaaatactttcgaggcaaaactgaggcattttatgtatttgcatgatgaattgaaacatgaaaatgcaaagttaaagcaacttctcactgaaaaaaacgagaaggtgagacgattggagaatagccggaaagaattagaagtaatgtataccaatttgaaaatggccaggacaatcagtattcatgataaagatatcaatgatacaaaacaacggttgtcaaggcttgtgcgtgaagtcgacaaatgcatcgctttattaaacgaatagaagaagttgaacaataaaacgatagtattatggacgatatgatgaagatacatctactgattgacaacgaacgatacccgatgaccattcgtcgtgaagatgaacagttatacagggacgctgccaaacagattgacaataaactaaacaaataccgtagttattaccccgatttcagccccgcaaggcattgggcaatggctgcactggagttggctttcgaaaatatttctatgaaagacaggaatgatactgcgccttatcaggaaaaattacaggagctaaccaaagaacttgaaaaacagatcagtaacagagagtaatagtttagaattaataaggatattcacgcacagctatactgtcaagagaagggttcttaacagatagattgtgcgttttttatttatatataaattaataacaatgataacaacggtaataatagcaattgtgtgtttcgctgtaggtggtggcctatcatacatgcttttcagatatggcctgaaatctaagtatgacatcatcatcaaagaagcacagacggaagctgaagtaattaaaaaaaacaagcttttggaagtaaaagaaaaattcctgaacaaaaaagctgatctggaaaaagaagtcgccttacgcaaccaaaagattcagcaggccgaaaataaactaaaacaacgcgaactgatgttgaaccaaaaacaggaagaggtccaacgcaaacgtacagaagcggaagctatcaaagaaaatctagaagctcaaattgtcatcatagacaagaaaaaggatgaactggataaattacaaatgcaagaacgtgaaaaactggaagctctttccggtctttctgccgaggaggccaaagaacgcctgattgaatctttgaaagaagaagcgaaaacacaggctgcttcctatattaacgacattatggacgacgccaagttgacagctaataaagaagctaaacgtatcgttatccagtctatccaacgagtagccacagaaactgctatcgaaaactctgtaaccgtattccatattgaatcggacgaaataaaaggacgcatcatcggtcgtgaagggcgtaacatccgagctttagaagcagcaaccggcgtcgaaattgttgtagatgacactcccgaggctattgtactttcagcgtttgaccctgtacgccgcgaaattgcccgcttagcattacaccaactggttactgatggacgtatccacccggcacgcattgaagaagtggtagctaaagtacgcaaacaggtagaagaagaaattattgagactggtaaacgtaccactattgatttaggtattcatggcctacaccctgaattaatccgcattatcggtaagatgaaatatcgttcctcatacggtcagaaccttctacaacacgctcgtgaaacagccaatctttgcgctgtgatggcttctgaattaggtttgaatcctaaaaaagcaaaacgtgctggattactgcatgatataggtaaagtacctgatgaagaaccagaattgccgcacgcattgttaggcatgaagatagccgaaaaatataaagagaaaccagatatctgtaacgctatcggtgctcaccatgacgaaacagaaatgactagcctgctggctcctatcgtacaggtatgcgatgccatttcaggcgcacgtccaggcgctcgtcgtgaaattgtagaagcttatatcaagcgtttgaatgatctagaacaattagctatgtcttatccaggggtaacaaaaacttatgccatccaagctggccgcgaattacgtgtgattgtaggtgccgacaagattgacgacaaacaaactgaaagtttatccggtgaaattgcgaagaagattcaagacgaaatgacttatccgggacaagtgaagattacagtcatccgcgaaacacgtgccgtaagttttgccaaataaaaatcagaaactagaaactcaactataatccctctttttctttagaagaaagagggatttttcattttacattctcatattttatccacagactggacaaattcaagaaaaaataaatttctaattgccaagcagtaaatcatctaatctctcatttaaactatgtagaacataaaataagatcaaactatgagacttaacagtatgctagccacagtgcttattttcctttgctctttagtaatttcatcgtgcagcaatgatgaacttgctcccatctccttaaaaaatagagaaacagcaaatataaaattaaactatcctaataatcagacatactcttttcccttgcaaggaggagacgggaattatgaaataagctgcgataaaccggaaattatagaaactaaaatgatttcttcttgtgacatatccataaaagcattagcattaggtgaagcaattattactgtaaaagatcaatcaggaaacacacttgacattcatgtaatagtagactattacaccgataattacattgtaagcaaacaggatatatttcttacaggagatttaaaagactctgaaaaacaaacaattaaagaaaaagcattagctacaataccagtaaaaacaggaggaggatacaaatttatctatacggatgcagaaatagcaagaggcaaagtactggtttatcaagaaaagtttggagacaaagctatagaaggtagttttgaaagaaagtccaatgaaatagaaaatgaacaatgggggacaaaacatctcatctcatttgatttaactcttccagaacagcccaaaagaacatttataatttccgaatatataccttcttccaggacttcccccatagtcctcatggctttttttgaagatttaaaaaagacattcactatagattatccgactgtcgagcaagtttataccgagcaagtattaactgtaccgtcacatttatattactaatatattatctttctttccaaaaggaaagagcattcattcttgttatatggggcagatgaagttccaccccatataacaagaatgatcccccattcctccaatatccccatttataaaaacaatcttggccaaaaatttatttttgaagtatttgtttttcttcaaacattttttttgcacagacatacccttcctcatataaatcggtcagtttctttatatctgtttcaatacgatccacttccatcggcttttcaggacgaattaccacaatcctgcccttgtcttccaattgctctactaaatcaagctgttcgttgtaaatacggcaacgtttacttaaaaccacgcgcaaacgagggtattttttatagataaaatgaggaattttcatatcctttccttttttgcgatatccccgattacgggtaagtaccactacatttttatcatatccttgttcaatagcacgcaacacaggaatagaatccacaattcccccatcaagcatcggctcaccatctacataagctataggacaaacataaggaagactgctggacgccttagctatggcaataatacgtcgaggatcatgtttctcttccaaataacacgccctacccgtaatgcaattagtagtcaccatttcaaaacgagcagaattttcagcatatgttttataatcataaggaagaatttccttaggaaaatgttcataaagcaattcctgatcaagaatactgtgcttacgccataaatgctttatgccgatataatgatatttctccaataaatcaatattactaaacttagctctaccacgctggcgagacatatatgaaagaccattgcacgctccggcagaaactcctaccccatacggaaaccaaaccttcttatccatcatatagtctaataccccgcaggtaaaaactccgcgcatacctccgccttccagtaccagtcctgttttatcatctattttcataatcaatgttgaggaacaaatctatccttgaaagagttcagtgcaaagttaaccttttcaaagtatttagccgtatcttttatatttattaaataattgcattccatcataaaaatcaatcaaattctccttcattgataaattactgaatggcaacttatcaaggaaatataagagaaacctgtgaaattagaaaagcaagattgacaaatgataaaaataaagccgaaatcgattaaaaaatcaaataagcaaatagtacttttaagattataattattacatttgcaacacagttcaataaatattcaattaaaataaagttaaccatgtttgattccgcaacttatcaaagacgccgtcaggcacttagaaataaagtgcaaaatggtattatccttatactaggtaataatgaagctccggcaaactatccggataacacatataaattccgtcaggacagttcattcctctacttcttcggtcattctcaccccggatatgcaggtgtaatagatatagaagcaggagaagattatttcttcggaaatgatgtagatatggacgacattatctggatggggccccaacccagtgtgaaagaattggctgcacaagtaggtattcagaaaagttttcctttcccccagctaaaagaagtggtaaaaaaagctatcacacaaggaagaaaagtacatttccttcctccctaccgattcgataatatgatgctcttagaagacttaaccggtatccgtgcggctatagtaaagaaatatgcttctgtagaattgataaaagctgtagttgatttacgttctgtaaaagaagcttgcgaaatagcagaaatcgacttggcatgtaatattggttatgaaatgcacacaaccgccatgcgtctatgtaaaccaggaataaaggaacaatatatcgccggagtactggatggcatcgccgcttcttatggaagcatgacttcatttgccactatcctgactcaacatggggagacattacataaccatgaccatagccatatcttagagccagggcgcatgatgctaacagatgccggagctgaaagagtcacaaattattgttcagaccatacacgtaccgtacctgtgggaggcaaatttgaaggacggcaaaaagatgtgtataatattgtattggcttgccatgataaagcattggaaattactcgtccaggtataacctatatgtctgtacacttagaagtctgcaaagtgctagttcaaggattaaaagacctgggactcatgaagggcgacgtggaagaagctgttgccgctggtgcacatgctttattcctgcctcatggattaggtcatatgatgggattggatgtacatgacatggaagacctaggacaaatttacgtaggatatgacgatgaaatccgtccttcttcccagttcgggctagcctctctacgcatgggacgtcgcttacagaaaggctttgtaattactgatgaaccgggttgttattttattccagcattgattgacaaatggaaagcagagaaaatgcatacagacttcctgaactttgatgctattgaaaaattcaaagattttggaggcatccgcttggaagatgatattttgattacttcggaaggctcccgtttcactggcgagaaacgcatccctatcactatcgaagaagtagaaactattatgaatgagtaacataacaaacaaaacttttatttctaaaatgaaaagatttacattattagcagcattaggtttatgcagtataagcctctttgcacaagatgcacaaaaagaagagccaaaggaagaagggtttgtattcactacagtaaaagaactgcctattacttctgtcaagaaccaaagccgtgccggtacttgctggtgctattccagtatggcctttctagaatcagaattacttcgtatgggaaaaggagaatacgacttttctgaaatgtacatcgtacaccaaacttatttggatcgagctgatgccgccgtacgtactcatggagatgtatctttttcccaaggaggatcattctatgacgttatctatggaatgaaaaaatttggtctggtgcccgaagaagttatgcgtccgggagtcatgtatggtgatacactaagtaaccatacagaacttacagccgtatcggatgctgtagtagcagcaatagccaaaggaaaattacgcaaactccaaacagataataaccataatccattatggaaaaaggccattgccgctattcatgatatctatttaggtaaatgccctgaaaaattcacttataaaggaaaagaatacactccccattcattcttcgaatcaacaggattaaatccaaatgattacatttcattaacctcgtatacccaccatccgttctacgaaccatttgtccttgaaattcaagacaactggcgttggggacaatcatacaaccttcccattgatgaattcatgcaggtttttgacaatgccattaataacggctatccaatcgcatggggatctgatgtcagtgaacaaggttttacacgtgatggcgtagctgttatgcccgacacggaaaaagtgcaagaactaagtgggtcagacatggctcattggttgaaaatgaaaccggaagaaaagaaactgaacaccaaaccacaacctcagaaatggtgtacacaagaagaacgccaggaagcatatgacaattgggaaacaaccgacgatcatggcatgttgatttacggtatagctaaagaccaagaaggaaatgactattatatggtaaagaattcttggggaaaagctggaaaatacgaaggcttatggtacgcctcaaaagcattcgttcgttacaaaaccatgaatatcgtagtcaataaaaatgcactgcctaaagaaattgctaaaaaattaggcatcaaataatccgctactatacaatactttaccgctaattccataaaatatatatggaattagcggtttttttatttgttttttcctaactttacggattgattgggtaagtataactagaaaatggtatcatcccgtctccgagagcagaaaaaagaaaaaacaatatataaaatgaatcacaaatggaattatcaacctccaagccaagaacagacagaagcagctaaagcattagcaaaggaaacagggatcagcccgattctttgtaagctgttgctggaaagaggtataacctcagcagcagaggctaaaagatttttccgtccccagcttaacgagctacacgacccattcctgatgaaggatatgagcattgccgtagaacggctcaatcaagctatgggcaggaaagaacgtatcatggtttatggagattatgatgtagacggtacaacagctgtagcattggtatacaaatttctccagcagttctattcgaacattgactactatattcccgaccgatataatgagggctacggagtatcagtaaaaggagtggattatgcctgtgaaacaggtgtaaaacttattattgtgttagattgcggtattaaagccgtagaggaaattgcttatgcaaaagaaaaaggtatcgatttcatcatctgcgaccaccatgtacctgatgatatattgccaccagccgtagctattctgaatgccaaacgggcagacaatacgtatccttacgatcatctttcagggtgtggtgtaggcttcaaattcatgcaggctttcgctttgaataatggcattgaatttcatcaactaactcctttattagatttggttgctgtcagtgtagcatcagacatcgtacctatcatgggagagaaccgagtgctgacacatcatggtttaaagcagttgaactccaatcccagtgtaggtctgaaagctattattgatgtatgcggattatcagaaaaagaaattaccgtaggtgatatcgtattcaagataggtccgcgcatcaacgcatccggacgtatacagaacggaaaagaagcggtggaattgctcatagaaaaggacttctcggcagcattagagaaagccaaccaaatcaaccaatacaatgaaacccgtaaagatctggataagaccatgaccgaagaggccaaccaaattgtagaccacttggaaggactagcagaccggcgttccattgtcatttataatgaagcgtggcacaaaggtgttatcggtatcgtagcttcacgccttacagagatttattatcgcccggcagttgtattaacccgtacagataatctagcaactggttctgcccgttccgtatcaggtttcgatgtttacaaagctatcgaatattgtcgtgacttgttggaaaattttggaggacacacttacgctgcaggactatccatgaaagtggaaaatgtggaagaattcacccgccgttttgagacctatgtcacagaacatattttgccggaacagactagtgctgtaatagatattgatgcagaaattgacttccgggatatcactccgaagttccatgccgacctgaaaaagttcaatcccttcggaccagacaaccacaaacctatcttttgtacacataatgtatatgattatggtaccagcaaagtagtaggtcgtgatcaggagcatatcaagttggaattggtagacaataaatcaaacaatgtgatgaatggcatcgctttcggacaaagttcacaagcacgctatattaagaccaaacgttcttttgatatttgttataccattgaagagaatacgcacaagcgtggtgaagtacaattgcaaatagaagatataaaacccagtgaggaataatggtaaaaatttatctttgaaatatgtcaaaactttaatgacgttatcagatacttatcagaataataagatgacaagtcattggggttttgacataattttcttattctccttccaatgacctataaagaaattctaaaacaatattggggatatgataactttcgaggcatacagaaagaaatcattgaaagtataggcaacggtcacgacacgctaggattgatgcctaccggtggtggcaaatccattaccttccaagtaccagctttagcacaacccggattatgtttagttatcacacctcttattgccctgatgaaggaccaagtacgcaatttacgcggccggggtatcaaagctttagcaatttattcaggcatgacgcgcgaagagatcatcgttgcattggaaaactgtatcttcggcgactataaattcctttatatttctccggaaagactggatactgaaatattccgtaacaaactacggaacatgaaggtaagtatgatcacagtagatgagtcacactgtatatctcaatggggatatgatttccgccctgcttatctgaaaattgcagaaattcgagaactccttcctgacatacctatattggcactgacagcaactgccactccggaagtagtaacagatattcaaacaaaactaaactttaaaaaaaacagtcaggttttccgaatgagtttcgaaagaaaaaacttggcttatattgtacgtcctacagaaaataaacaggaagagctattacatattttaaatagtgtgcccggctgcgccattgtctatacccgcaaccggaaacgcacacgtgaaattgccgaactactggtcaataacggcataactgccactttctatcatgccggtttgaataatgatgtaaaagatcaacgtcaaaaaagctggctcaccggagaaagccgtactatggtagcaaccaacgctttcggcatgggtatcgacaagccagatgtacgtatcgttatccacatagatatgcctgattctcctgaagcctattttcaagaagccggacgagcagggcgtgacgggcagaaagcatatgctgttctgctatacgcccaaagtgataaaaccactctcaacaaacgtatcagtgatacatttcccgacaaggattatatccgaaaagtgtacgaagatatcaactactattttcaaatggccatgggagacggtataggttgcacctttgcttttaacttggatgaattctgtcgtaacttcaaacatttccccgtacaagcagacagcgctttaaagattctgacccgtgccggatatttagaatatacggacgagcaagataatgcttcacgtattcttttcactatgaaacgcgacgaactctataaactacacgagaatgatacagatacagagaaactgataaacatcatcttgcgttcttatacaggattatttactgattatgcctatattaacgaagattccttagtaatccgttccggattaacccgccaacgaatctatgaaattctactgacgctaactcgtagacatatcatacattacattccacggaaaaagacaccttatattatatatacccgtgaacggcaagaaaagaatcgccttgtcctaactcgggaaatatacgaagaccgaaaaaaaagctataccacccgaatcaaggctatgatagaatatgccacagccgatgataaatgtcgtagccgaatgctactcagatattttggagaaaagaacgaacacaactgcggacaatgtgatgtatgccttaacaaacatcattcaggaataaaacagggggaatttcaagaattggaaaaacaaatcaaacagctattacaggcaaacgccatgcctgtttcagaactactgaaccaattgaatagcaatcgtgaaaaagcggaaaaggtactctcctacctactttccgaagaaataatacaattaaaaaatggaattctttctgtataaatcgtatctttgccattgatttattaaccttttaccccaacagaatatgaaaaaaatgcatctggcaatcatttgtctttttaccggttgtactatctttgcccaaaacatagatgtacagcccatccctcaacaagtttccaaacaaggcggacaaatcaatttacctgaaacttaccagctcttgggagaaactgaagctaatccatatgccgtacaagaattaaaagatttattaggtggaaaacacccggccaataccggtttgcgcatttatattggagaaaaaggagacaagtctatccgcaagtttactcgtcaaatccccaaccaaaaggaaggttattatctatccatcaataataaggaaataattctggcagggaacgatgaacgtggaacctactatgccttgcaaaccttaaaacaattgctcaaagataaccaattaccgataatagagatacaagactatccggccatatgctaccgtggtgtcgtagaaggattttacgggactccctggagccataatgcccgtcttcgccaacttcaattttatggtgaaaacaaaatgaacacctatatatacggtcctaaagatgatccttaccatagttctcccaactggcgcttgccttaccccgaaaaagaagcaaaacaattacaggaattagtaaaagtagcccaagaaaacgaaatagattttgtttgggccatccatccagggcaagacatcaaatggaataaggaagaccgtgaactattattggcaaaatttgaaaagatgtatcatctcggtgtccgttcttttgccgtcttctttgatgatatttcaggagaaggtactaaccctgtgaaacaagcagaactgctgaactacatagatgaacattttgtaaaagtaaaaccagatgtaactccccttatcatgtgtcccacggaatacaataaaagttggtccgaccctgctaaaggatatcttacgactttaggagacaaactgaatccatccatacaaattatgtggacaggagaccgagttatttccgatattacccaagatggtattcaatggataaacgaccggattaaacgtccggcatatatatggtggaactttcctgtttccgattacgttagagatcatctgctcatgggaccagtatatggaaacgatactcaaatagcccatcagatgtctggctttgtaactaatccgatggaacatgccgaggcttctaaaatagctatttatagtgtagcctcatacgcttggaatcccccaaaatataacagtgaaaaaacttggaaagatgctattatgaacattttgcccgatgcagccactgaattggaattctttgctgcccacaattcggacttgggtcccaatggacataaatatcgccgagaggaatctgtaaatctccaacctacagcgcaaagctttactgaaagttacataaaaaataaaacttacactgaaaaagatttctctattctacaagaaaccttcagccagatgattgaatcaagtgatattttagtcgcccatgctgataaaaatccgattatagtagaaatcatgccttggctttatcaattcaaactattgggagaaaccggaaatgaagtattggcaatggtcaaagcatacgacaaaaatgaccaatctttatttatgcgtaaatacaagcacgtgaaagccttgcaacaacaaatgtttcaaattgaccagacatacaaccaaaacccttaccagccgggtataaagacagcaggaagggtaatcaagccattgattgatcaaactttcgccaccgtcacgcaatgctataaccaaaaatatagtacactgctgaatgctgaaaccgactatatgccgcataaactaataagcgatatcagtcagataaagaacttacctttacaggtaaagataaaccgcattcagatttctccggcgctggaagttatcaaatggcccggtaatggttcattgactatcgaactggatcaagtttatcccggagaaaatatagagatagatttcgggaaaccggaaatcgcaacttggggaagccttgagatatctgcaaatggaaaagattggagtaaagtaaactttacacaagaaaagaacctactgactgccagtttacaacagaaaccaataaaggcagtacgttttaccaacatgcagcatcaggaacaagaaatttacctcagacgatttattataacaatagacaaataaaacaactataaattatgggcttatttaaatccttattcggcggaaacaacatccccgaaaccgaaaaagagaaaaatgataaaaagaacttcgagattttaaaatacgatggcatccgcgcccaacgtatgggtaaactaccttatgccattaaatgttttgaagaggcagttgccatcaacgatgaattagaaactctcagcctgctagccactgcttatacacaggcgaaccgactagatgacgcccgtatcacactagaccgcatggctacaaaagatcctgaacaagtaaacaccttcctttcactagctggcatctgctatatgcaggaagattacgaaaatatgaaagatgcctgccaaaaagctttggttttagataataagaaccccctatctttctatttgacagcaaaagcagctatcggcatgaaagatgatatcactgccattgccatgctgactaaagctatcgtattgaaagaagattataccgaagcataccagctacgcgctgaagtactttggaaaatgaaacaagcaaaagatgctgctgaagatatacaaaagttactcagcctcaatcccgacgacgaacaagccttgctcttgaaaggagaaattctagccgccaccaatgaaccggaacaagcacaagaatgttttaatcaagtattgtcactcaatccgttcaatgaaaaggcctatatcctgtcaggcgaactatatctggcaaacaaagattttgacaaagcattggctatatatgatgaagccattgaaatcaatccaaactttgccaaagcatatcatgaacgaggacgtatcaaattacttaaaggagacaaagacggatctgtggaagatatgaagaaagcaatagaactggctcctgaaaatgaaattaatattagcggtcaatacaataattatgaaaacatgactaagaatgttccgttttaaaagcggaacatttcaattcgttttattgtttatttatatacaaaataagcaaaaaacacatgagcgtaaaagaacaatattggaaatactcccttatcaccattatactgggattaggacttattttatttataaaaatgtctcctttcatgggaggtattttaggagcatgcaccatttacattatggtaagaaaacaaatgttttatcttacccaagaaaagcatttcaaaaaaagcattacagccattttactcttgatagaagctattatgtgctttcttgtacctttatcattggccgtatggttattgatcaataaattacagacggtaaacgtagatacgacaggttttatccatacggtaaccaatcttgccgattggctccataccaagacgggatatgacttactaaatgcggaaaacatttcatccatagcctcaattcttcctgccatcggacagtttctgatgggaagtatcagtagctttgccgttaatgctttcgtattggtctttgttctctatttcatgctaattggcggaattcaaatggaaaaatatatctatgagttacttcctttcagcgatacaaacaaaaaaaatgtactgaaagaaattaatatgattgtaaggagtaatgcgataggtattcccttactagcagtcattcaaggaggaatagctacattaggttactatttatttgatgtacccagcgcgctattgtttggcttcctgacctgctttgccaccgtcattcctattgtaggaacagcattggtatggttcccgctagctgcctatcttgctctttcaggagattggacacatgccatcggattacttctttattgtggattaattgtaacaaacattgataatctcatccgttttattctgcaaaagaagatggcagacacccatccactcatcaccatttttggagtagtcatcggactttctttattcggattcatgggtgtcatattcggaccgttattgttatccatcttcattttatgcgtgaatattttcaagacgcaatacttaaaataatcactttatatatagttgataagcatccgccagttgtttcatcgccttttcgatgatacaacgcggacttgccacatttaaacgcataaagccaataccttccttaccaaacatctccccgtcattcaatgccaaatgcgctttatctacaaagaattcattcaaatctttctggctcaacttcagttcacggcaatccagccaaactaaataagaagcccccggacgaatggccttgattttaggtgcatgatttttcaaaaaatcgtctacaaaatctatatttccttgtatatatgccaaacattggtcaagccattccgtaccatgactataagcagcctcaacagaaagaaaagcaaagacatgtcccatatccaactcaccggcatccatatagatacggaaacgtttacgcaaatcttcattaaaaataagagcatgtgaggcagatagtcccggcatattaaaagccttgctaggagacataaaagtaacagagttcattcgagccttttcactgacagtagcaaaaggacgatgtgtatgaggaggtaaagtcaaatccgcatgaatttcatccgagaagaccaatactttctcatcataacagatatcagctatcgctcgtaactctgcttcagtccacacaacgccacccggattatgaggattacataaaataaacagcttacaacctttaatctgttcacgaaaagtatccaaatccatacgatacatgccgttttcccattttaacggattggtaaccaaagtgcgctcattacgagtagtaacccatgcaaaaggatgataaacaggaggttgaatcattaccttatcccctttctgagtaaaacaattcatagccataccgatacctggtacaatgccgggaacaaaatttatcatttccttggccacaaccagatcataacgctgttttacccagtttataatcgcattataatagctatctggtttacctgtataccctagaacttcattttcgcaacgtttacggatagcatctgttacaaaaggagctgtggcaaaatccatatcagccacccataaaggaatcaaatccgtacgtccccaaatatgcttcagcccttctactttctcagcagacgtaccgctgcgatctatcactttatcaaaattgtatctcattgtttctatttttaggaattgtcgcccaaatataggaaatttctacattgggcgacattaattcccttattttttcaaggcttcaattacctgaggcatcattgtccaaacaaagttttcactttgtgctgtataaaaattaccatcaacaaccgatttttcatcagtagccatccctttacttacagccggttttgccaaaggatgcacagctaatctctttccctctgtaattccagcaaaatcaaacaacaggcctgcagcacaatgacctatcaggatctttcctttcccagcaaatgctttcaagaccgacatcaagtccacattataaggcttatccgcattttgagcgaatacaggaaccgcatccccacaggcaaaaaccaaagcatcaaaatcatcctcatgccctataagatttgcaatcacatcatcggccaccaattcaatacccgagtttgttttaatttcctttgtttccgccactgcatacaccttataggatatagcattttcaaaaaacgcttccaaatattggaacaaaccgaatccgttcaccggatttactgctaaaacagctactttctttgccataatcttaactaattataagtgaaacaataaatttatctagtaaaacaatagttatctttagtaagtttattacttttgtgatacaaatataagtatccttcttccaaaaaacaagaaggcacctgtagataaggaacttacatagaggtaaccattgttgaacgacaaggaaataggaaatattaaaaaatgaaaaattttcatccggatgataattgtcctgtacggaatgtattgtgcaggcttggtgataagtggtctatgctagttcttatcacattaaatgctaacggaaccatgcgattttgcgatattcataagacaatagccgatatctcacaacgcatgctgactgtaaccctgcgcacactggaaactgacggactagtgagccggagagtatatgccgaagttccgccacgagtagaatatgaactgacagaaagagggaaaagcttaataccacatatagaaggattagtagattgggctttacaacagatgccgggaattatggaaagcaggagccaaacaggcactgtctaaaaaaaaaaattgaaaaaaaacttcttatttatttgtttttgctagaaatatattacttttgcagcgtattcaataacaataagaacaaaatgaaagcattatacaatacatactttttcttcttttattacttttactttagcaacaaagtgaagcgggaatttgtatgtatacgttaaacaacgaataaatcaatgtgataataacaacgaaatcccgcttccggcagaagcgggatttttttataatacaatagcgaatgaaaaagatagcaatacaaggtgtaccgggctcatatcatgacattgccgcccacaaattcttcccaggtgaagaaatcgaactaatctgctgctccacattcgaagaaatcttttcgaatatgaaacaggatagcaatgtcattggtatgcttgctatcgagaacaccattgcaggaagcttgttgcataactatgagttgctgcgcgaaagtggaatgaccattatcggagaacacaaactacgcatcaagcacagtttcatgtgtctgcccgacgatgactggaatacattgaccgaagtaaactcccaccccgttgccttggcacaatgccgagagttcctgatgcaacatccgaaactgaagatagtagaaacggaagatacagcaggaagtgcagaaaccatcaaacgggaaaacttgaaaggtcatgccgccatctgttccaaatatgccgccgatctatacggaatgaaagtattggaagaaggcatcgaaacaaacaaacacaacttcacgcgtttccttgtagtggccgacccatggaaagccgatgacttacgtgaacgttcgaaagtaaacaaagccaacatcgttttctccctccctcacaacgaaggaagcctgtcgcaagtgctctctatcttttctttctataaaataaacctgaccaagattcaatcattaccgattataggccgagaatgggaatatctgttctacgtagacgtgatcttcaatgattatttaagatacaagcaatctatcgacgccgtttcaccattgacaaaagaacttaaaatattaggagaatatgcagaaggaacatcaaccatataatattcagccggcaaaccgtctggcgaatgttagcgaatactacttcagccgtaaactgaaagaagtggcacaaatgaatgccgaaggtaagaatgtaatcagtttgggcatcggaagccctgacatgcctccttcggaagaaaccgtgcaagtactgtgcgagcaagcaaaacgccccgatgttcacggataccaacctactgtcggcatccccgaactacgcaaagctatggccgactggtataaacgatggtatcacgtcgatcttgatccggcgacagaaatccagcctctgatcggttccaaggaaggtatcctgcatgtgacgttggcattggtcaatcctggtgaccaagtattagttcccaatccgggatatcctacctacacctctttaaataaaatattgggcagtgagattgtgaactacaacctgtgcgaagacaaccattggcaacccgattttgatgaactggagaagatggacttgagccgcgtcaagattatgtggaccaactatcccaatatgccgaccggagcgaacgccacgatggaactttatgaaaagctggtaaactttgcacgccaccataatattgtgattgtaaacgacaacccatacagctttattctgaacaaaaaaccactgagtattctcaatgtgcccggagccaaagaatgctgtatcgagttcaactctatgagcaagagccacaatatgcccggctggcgtgtgggaatgcttgccaccaatgcgcagtttgtacaatggatattgaaaataaagagtaatattgattcaggaactttccgccccatgcaactggccgccgcacaagcttacaacaatagtgtggaatggcacgaagaagcgaacgtcaatgtatatagccgccgccgccaactggcagaagagattatgaaagtactcggttgtagctttgatcccaatcaggtaggtatgttcctttggggacgtattcccgaatcttacaatgacgtggaagaactgaccgaaaaagttttgcacgaagcacgtgtgttcatcactccgggtttcatcttcggcagtaacggcaaacgctatatacgtatttccctctgtgccaaagaagaaaaactggccgaagcactggaaagaattaaaaagataatgtaacaaaacaaaatatcagattatggaattagatttaaaacccatcgaacttccgggaattgaaaaaaaacgcccgatgattatcgccggcccatgtagtgccgaaacagaacagcaagttatggatacagctctcatgctggccaataaaggcatcaagattttccgtgccggcatttggaaaccgcgtaccaaaccgggaggtttcgaaggcatcggtgtagatggcctggcatggctgaaacgtgtgaaacaggaaaccggtatgtatgttgccaccgaagtggctacagccaaacacgtttacgaatgtttaaaggcaggtattgatgtgctttggattggcgcacgcaccactgccaacccgtttgccgtgcaggaaattgctgatgctctgaaaggtgtggacattcctatattgattaaaaaccctgtcaaccctgaccttgaattgtggattggagctttcgagcgcatcaataatgcaggtttgaagcaactgggtgctatccatcgcggattctcttcttatgataaaaagatttaccgtaacctgcctcaatggcatatccctatcgaattgcgtcgccgcattcccgaactaccgattttctgtgatcccagccatatcggtggcaagcgcgagttggtagctcccctctgccagcaggcgatggacttaggttttgacggtttaatcgtagaatcacactgcaatcccgactgtgcatggagcgatgccgcccaacaagtcactcccgatgtgctggactatatcctaaatctgctagtcatccgcaaagaaacccaaaccaccgaaaacctgggcgaactgcgtaaccaaatcgatgattgcgacaatgagattatcgaggtattggcaaaacgtatgcgtgtctgccgtgaaatcggtacattcaagaaagaacatgatatgaccattctgcagacaggccgttacaatgaaattctagacaagcgcggtgcacaaggctcactgtgcggcatggactcagatttcattaaaaaagtattcgaagccatccacgaagaaagcgtaaggcaacaaatggaaatcataaataagtaaaccgatgagaatattaattttaggagccggtaaaatgggctccttctttaccgatgtattgagcttccagcacgaaaccgccgtatttgatgtagacccgaaacgccttcgttttgtttacaatacctaccgatataccacactcgaagagattgaagaattcaagcccgaactggttatcaatgcggcaaccgtgaaatatacactggatgcttttcaccaagtattgcccgctctccccaaggattgcatcatcagcgatattgcctcggtaaagaccggactgaaagaattttatgaccaatgcggattccgttatgtgtctactcaccccatgttcggtcccacatttgccaacctagacaaactgagcaccgaaaatgccatcatcatcagcgaaggcgaccatttgggtaaaatcttcttcaaagacttataccaaaaccttggtctgaatatctttgagtataccttcgacgagcacgatgagacagtggcctattcactgtctatcccttttgtttccacttttgtttttgcggcagtgatgaagcatcaggacgctcccggtactactttcaaacgccacatgaagatagccaaaggagtactaagcgaagacgactacctgttgcaggaaattttattcaatccccgcaccccggcacaggtagaaggtatccgtacagaattaaatgagctgttggatatcatcaacaagaaagatgctgcggggatgcgtgcctatcttagcaagattcgagaaaagattaaataacgcatcagtataacatagaagaggatgtcaaagctccaacaagactttttgcatcctcttttttattttatccataaaaatgatttatcaacatatggcacaacagccacacaatcagatgctctgccgcataacaccaccaggcaggattgggaccggaccgaaatgaagccccccaacgctccccataccaatgcccacataccggcaatctgtataaactgattcaccgctttgcctatcattttatttcccattactcatccattttagaaagtctatcaattaaatcgtccaagatatttctcaccgtagggtaactgacccccatacttttcgccatgcccttcaaacttccgctcgatttgacaaacgcaagaataaactgctgctctttatctgaaagccgtgccagcacaggcagttcaaaatctccgcacacttccgtgcggcattctccacagaaaagcctacccaccctcaacggtgcattacacgcagggcattgcaacggcaaacgtttctttatttctcccatatcatttcagttttttcacaaatgtactgacagaagctatcaaagcactgttcaccggcagagaaggattcccataagtaagcatctgctgctgtacggcctttgactcacaatctttcagcacatggttcatcttatcaatcaaaagcagctcggcagccgggcaaccctttttcagaaattcggcatcctccaccgatacctgaatatcatttttaccctgaacaatgaggaccggcactttgacggaagcaatcaccgtccggggattatacttgaaccaggaaatcaaataaggctggacagaagcccgatacaatgattgcagataagccggcacgtcactcacttccttgccgtttttcaaagacccgttaatggatgccacctctttccgcaccgcttccggattctgttgagcggtcacttgcgcctctataatctcgtaggcaggacgacccgcaccggcaatcgagatatagcctttcaccttcggccggttctgacaggccaacattccaatcagcgccccttcgctatgtcctgccaccgtgatcgtcgtaaaacgtttctctttcgacaggtaatcaatccagccagttacatcgttcacataatcttcaaaacgaagtttcgcttcctccttaccagccgacgcactggttcctatcccccgcttgtcaaagcgcaaggaagcgatgccgtttgccgccaagccttctgccaggaacttcaacgaattattcctcaaattgccaatggctgaattaccatccatatccgtaggtccggatccggctataataagcaccaccggacaggttttcaccccaccgggcaaaagcagttttcctttgatttgtccttccttggtgttcaacaccacattttcttccaaaggaagcacctgtgcccgacaacaaagaccgcacaggaaaaataaaccggctaaaataaaattcaaatgtttcatctattacgtattttaagattattcatttaacaaatatagtgattatattgaataaagcgaatcaatatttgaatgttgttaagcatcagttttattttattcaatactatttcattttatcttcaacatggatagaatcaagtagttttgccactaaaaaagaaccgttacacacgcctacttttgctgggaaagaaataaatctgcaactaatttcaaaaaaggattttttatcatttcccttttcttattcatccaaacaaactatctttgccacgttttgttccgcgtacctccgactgatgcgaggaagcggatgaaaagggaatcaggtgcaagtcctgaacagtcccgctgctgtaagctccatctacccctataaggggataggtttatttatccactcacgccactgcctgtatatataattaaggtgggaaggcaagtaaacaggagtaagtcagaagacctgcaaaacgtaaagtcatcgaccgtcgctttcgaggaaagagcagcggtaagaatgcggtatttattcattaatatgtttttttaaatgaaaggaaataaccaggcttataagctatggctttgtctgctttgcagctttatcctattgccgcttgaaatacaggcacaggagaaaggagattccattaccgggaaagtgcataaaatagacgaagttacggttacggctgaacgtaccaagcaacaggttaaaagtagcagtcccttccaacaactcaacaagaagcaattgcaacaacaaggcattacggatattgctgatgctttacgtcgcttctcaggagtcaacataaaggattatgggggtgcaggaggaatgaaaactatctccgttcggagtttaggagccaaacatacagccgtagtttatgacggggttacactcagtgattgtcaaagcggacaaatagacttgtctcgtttctctattgacaatatccagcaaatttcactgaccattggggacaatgaagatatttttgtaccggcacgtacagttgcttctgctgccgccttaaaattacaaagcatatccccggatttttcaaacaaaaaaaatcacttgacgggacagataaagacaggttctttcgggatgattaatccccttatccgctacgaacaaaagtttaacgaaaagatttcagcatctaccactggtgaatttatgagggcagataacctatatcctttcactttagtcaacggagattatgtttccaaagaaaaacgctataacaacaacattcaaacctacagaggagaactgaatctttacatcagccctaataacagaagcacactgaacggaaagatttattattacgatacaaatcagcaattacccggtgcagtcattctttacaacgcgaaaagccgtgagaagttacgcgaacgaaatttcttttcacaagtacattaccgtacttattgggaaaataatctttctttgttaatcaatgggaaatttaactggagccaatctcattaccacgatgaaggaggaaaataccccggaggagaattaaacgaccgttatttccaacgagaatactatacatcaggagcattactatatactccgactagtcactggagcatggtttatgcggcagattacatatataataacctaaatgccaatactcctaacaatacaagcccttaccggcactctatattacaaacagcaactctccgatatcaaactgataacataacagctgttgccatactactcggatcgatatatcttaatggtgcaaaagaaggaaacggagctgagaaccggcgaaaattatccccttccttctctttttcatggaaaccttgtacagacggacagctataccttcggacttcctataaagacatattcagagtggctactttttctgaaaactactttgaccggatgggtagccgtgatcttcgtcccgaaaaggctcaacaatataatataggtatcacttaccagaacaactttacaagctggctaccagcaatcagtctgacattggatgggtattataataaggtaaaagataaaattgtggcaatgccctataatatgtttatctggaatatggtaaatttaggcaaagtagaaatttggggagtagatgccaatataaacaccactttccaacttgcaaaacattattccttactattgactggaaactatacctatcaatatgcagtagataaaacagacccggaagtcgtatattacaaacatcagattgcatataccccacgtcatagcgcaggtgcttctttagccttggaaaatcctttcataaatgcttctcttcatgctacaggtgtgagcaaacgatatattgcttccgaaaatcgtccaagtaatgaaatggatggatatatagaatacggactttcattataccgcagcttcaagataaagaagtttacatacaatcttcggggagatattatcaatttgggaaataaacaatatgacatagtgaaaagctacccgatgccgggtagaagctataaactaacttgcagtattcatttttaaaaattatataagtatgaaattcaaacatttattttttgcggcagccttatttagtatagctccgctgttctgtgcttgtaacgatgatgacaatgagatcgaagttcctagagatccggaagaagacccttcttcacaacccgacacgactcccgaagtaacttcgccaaccgaggcaacaggcttgtacgttattaatgcaggtaatcttagcaacaatgttaatggaacactttcttttattaactttgaaaaaggaacagcaagcaataatgtattttttgacataaacaaaagaagtttgggaagtacccctcaagatgcaatagtgtacggttcgaaaatgtatattgccatatatggttcaaatattatagaaatagtagacaaaaatacagctaaatccatcaaacagattgttccgacatccactcaaggggaaggtccacgtgatattatagctgctaatggaaaagtatatgtttctatgtatgatgggtacgtttcccgtatcgacacccttagtctaactatcgatgcaacattaaacgttggtccaaatccagaagagatgacagtggccaacggctacctgtatgttgctaactcagacggaatgaattacggtgcagattatgcaaatggaaaaagtgtttctaaaataggcctaaagacatttacagaagcaaaaagaatacccgtaggactaaatcccactaaaatttgttctactacggaaggaaacgtatatgtcttagcaatgggtaattataatgacatatcagctaaagtacaaaaaattgacaatatgaatgttgttacagatgtaacggaagcaacattaatgactgtaaaagataataccctttaccttatcaatgctccttatggcgcaacggcaaatacttatttcagtatagatacaaaaacaggaaatgaaacaaaaaatttaatagatcaacctgttgatagcccttgtggcatcgcagtcaatccatttaccggaaacatttatatcagttcttacaatatggttggaggatggccaagttataccactgatggctatgtaaacgaatattcggcaaacggcaaatttacaaacaaatacaatgtaggggtaggtccatgcggattaaccttcttactgaaataataaaatatggttttgcttctcttcacttttgatgaaggaagcaaaactacaattatttccctcataaattaaataatctcataaaactttcctcacttttttaccgtacttttgtacaggattcacaaacaaacctagaaaaatgaacagcaaagaattacagctcattataaaatgtggagaaaccagtacggtacaattcaaggaatgctttcccaaccaagacagtattgccgccgaaatggtagctatgtccaatgctcgtggtggaatgatactattcggcataaaagacaaaacgggagaaatcatcggcttgtcttatcaggaaatccagcaactcaattctatcttggccaatatagccactaacttgcttcgcccggttatctatatacagacggaaaccgttattgtagatgaacgttcccttcttatcgcccacatagcagaaggtgataacaaaccttacaaggatttgaacgggataatctggactaaacaaggggcggataagcgcaaagtaatggagaatagtgaaattatgcgtttattccaatgctccggcatactgtacgctgacgagcaacccattcctttcacttccgaaaaagatatcaacggatatgctttggacaactttatccgcaaagaatatggtcgcgaaaaagattcattcggtattctatacacagaacttttacacaaccttcatatcatgaaagaggacagaatgactttggcaggcctgctgttcttcggcaaagaccctcagcagtaccgtccaacttttgtcatcaaagctgtttctttttttggtaacgatataggaggtatcaactatcgggacagtaaagatatcaccggcacactgcccgaattatttgaaaagggaatgtcttttctgaaagcaaatcttcataatatacaggcaggacaaggatttaattctatcgggaaactggaaatatcagaagtggcattagaagaaatcttgcagaatgccttggtacatcgtgattatacgcgtaatgcaccgataagattactcatttttgataaccgtgtagagattatcagcccgggatgccttcccgatgggctgacggtggaaagcatcaaactgggaagcgccgtagtacgcaatcctttcattgctaatttctgtgctaaaacgatgccttatcgcgggctgggctcggggattatacgtgcacttcaagaagagccgaatataaaattcattaatgagccggtaggtatgcagttcatttcagtaatagacagaatcgctgatgagggagtaaacaaagatgagggaataaatgagggaataaatgagggaataaatgagggaataaacgaacttgaaagccttatcctcaccttcttggaaaagaaacccggtgcaaaaggatatgaaattgcagaatatatccaaaaaggagctgctacgacagagcgttatttacgatcactgaaagataaagaattaatagaatacaaaggttcccgtaaaaccggcggatattataaaaaataacatgaaacaagtaatcctattcatcttcttacttgcccttctttcctcctgcggcggaaaaagcaagagttcttctgtaatagaagcagaaaaagcaatccctttgcgttatgcagaaaacctcagcctgtctgcaaccgaagactataccattgcccgtctgcgcaatccatgggatacgacccggatactgcacacctatgtcttggttgacaaagaaaagtccctgcctgccgacttgccggaagggacacttgtccgcacgccattgagtaaggccgttgtttactcatccgtacattgcggattgctcaaccagattggtgctttgaaaagtattggaggagtctgcgatttgaagtatatcaaactgcaagaagtgcaggatggctgccgcacaggaagcatcgtcgatgtagggaatggaatgaacccggatatagaaaagataatcgacctgcatcccgatgccattatgctctccccttttgagaacagtggcggatacggacgggtggagaaactcaacatccccattatcgaatgtgcagactacatggaaacttcagcattgggacgtgccgaatggatgcgtttctacggtcttctgttcggtgaggcacaaaaagcggacaacttgtttgccgaggtggaaaaaaactataatgagctgaaagcattggttgctcccctttcatctgcaccgagtgttatcagcgaactgaagaatggttcggcatggtatgttccgggagggaaaagcacctccgcacggatttatgcggatgccggggcaaattatgtgtttgccgatgacgagcatagcggttctgttcccctagccttcgaaaccgtgtttgacaaagggcagaatgcagacttttggctcatcaaatataatcaggccattgacaagacttataaggaattggagcaggactatgctccatacaccggtttccgcgcattcaaggaacgcaacatttatggatgcaacacagggaaggtagacttttacgaagattcccctttccatcccgaccggttgctgaaagatttgataaaaatattccatcctacgcttttagaaggatatgaattaaaatatttcactaaattagcggagtgattttgaagaataaaggaacgaaatacggtatcatactgctcctcctcatccttgcattgacaggagccaacctgttgttcggttcggtaaacatccctgccgaggcggtgtggcatatccttacaggcaatgaagtagaaaaggcgagttggagttttattgtctgggaatcccgcctgccgcaagtggttacggctttactctgtggaatggcgttagcctcatcgggactgatgttgcaaacgaccttcaataatcccctggccgatccttccatcttgggcatcagttcaggggcaagtctgggagttgctctggtcatgctggcaggtgcaggaacaatcaccgccggagtatttactttatccggttttatttccgtcattatcggagcgtttataggatccatgctggtgatgggaatcattctattcttctccactttgataaaaaacagcattatgctgcttattataggtatcatgataggatacatcacctcatctgccatctccctgctcaactttttctccacggcagaaggagtacattcctacatgatttggggaatgggaaactttggaggagtatctttacaacagcttccctttttctctctggttacagcgacagggctgctgattaccatactcttgataaaacctctgaatgccttgctgctaggcacacgctatgccgaaaacctgggaatcaacattcgccggacacgcaacctgctgcttatcgccaccggaatactgacagcaataacaactgctttttgcggtccgatttctttcatcggactggctgtacctcatatcgcccgtctgatgttgggaacatccaatcataattccttgctgcccgtcactatgctgaccggcggagtgattgcactagtttgtaactttatctgtattttgccgggcgaagcaggtatcattccgctaaacgccgtcaccccggtcattggtgcgcccattattatttatgtcattgtgaaccaacgtaaaatccagtatttcaactaatggaaaagcaagctgttatcaccgcaacagacctatgtataggttatcgcacccataaagaagagaagaaagtgcacgaacacctttctttcgagctttacccaggagaactgaccagtctgcttggagccaacggagctggaaaatcgacattacttcgtacattatccgcctcacaaccctctttagccggagatttacaattactggacaaacctttacaacactattcggaaaaagaacgttcccgtaccattggcgtggttttgacggacaagacccaagcaggaggattgaccgtgtatgaactggtagctttgggacgccagccgcacacggggttcttcggaagattgcaccggcatgaccatgccatcattcaagaagccctagatgccgtaggaatcactcacaaagcacaaagttatacagccgaactttcggacggagagagacagaaagtaatgatagccaaagcattggtacaagaatgtccactgattattctggatgagccaaccgcctttctggatgtagtaagccggatagaaatcatgactttactgcacaggctagccgtggaacaaaacaaggctattctgctatcaacccatgatatagaacaagctctagtcctgtcggacaagctttggctgttgtctaaagagaaaggattgcaatgtggagtgacggaagatatgattctaagccatcagatggacaacttattctcacacagtaatatccggttcgattatgatcatggcatctactatccaaccgtgaatggaaagcaggaaataacggtggaagcgacagatgaaaccttgctgcactggactatcaacgcactgaaccgtcacggatatacttgtctgcaagccaaaaacgctcctgccggtctgccccatctacaagtcatcgcccctgatgccttgtacctcacccgggacgggaaacatcggacattcacttcgttcggaaagttgctggaagaaataaaataaagacacgcatcaatcattccgaattatgcacagtatctttctgtaaatcaacgacatgctgtgcaaatatattctaaattcccctgaaacggtttgccattctccgctgccaaattctacttgacgtatattggttgttccaattcctgtgtcatagttgcggttgcttccttgcaggggagcgtcataaggcgtatttttgtccatctgcatttgttgcttcacccgagtgaagaggcgatttcacttaggtgaacagccgtttccgcctaggtgaaacagttgcttcacccgggtgaaatatcaaatggaacggagtgaaaatatgataggaataggctcttgttacatacgtaacaggattcgatagccggaagcataccaccgattgagggggatttgagaaaccttcacacagaaagtggttagtaatgagcatgttgctgtgacggaacttttttgttcttcatgtaaatgaacccaaagtaactattcaatccgcccccacggtgaaccattggatagttactttggacttttggccccctctcttatcagaatttctaaaagctattctttcatcaaatagcctttgaaactttcaaaggctttttccatcggaatactttgtttagttcctttcataaactcttgcagtttggtgggaatctccactttgtcgccaatgataccttccacagtttccaggaatttagccggatgtgccgtttccagaaaaatacccgtctcgcaggggaacaatccttcggataaagcacgataaccgcaggctccatgcggatcgagcaagtaaccggtttcccgatatacctcacccaccgtttcacgaatctgttcatccgtataagtcgcaccagagatatccgctgttatggcagcatgactgttatcatacaatgacagtacacgggcaaaattacttggatctcccacatccattgcattggcaatagtagcaatggaaggacgagggttgtattttccggtctgcaagtattggtagaaaatatcattccggttattggccgcaataaaacgcttgacaggcaagcccatgcgtttaccaaatagtccggcggtgatattaccaaagtttccgctaggtacgcatactaccagatgatccgcttttccttctttctttaactgcgcgtaggcatagaagtaataaaatgcctgtggcaggaaacgagccacattgatggagttggcagaagtcaacttcatgtgtgcattcaagtcagcatccataaacgcattcttaaccaatgcctggcagtcatcaaaagtaccgtccacttctagcgctgtaatattctgacccagagtcgtgaactgcttttcctgaatttcactgacttttcctttcggataaagcacatacacatgaataccttccactccgaggaagccattggctacagcactaccggtatcccccgaagtcgcaaccagtacattcacctgcttttgcccttcttttttaatgaagtagcccaacaaacgggccatgaaacgtccacctacatctttaaatgccaatgtgggaccatgaaacagttccaaagagtaaatattatcttttacctttacggcaggaacatcaaaactcaatgtatcataaactatctgcttcagtgtttcagcaggaacatcctcaccgaagaaagcatcggccacgcgataagcaatttcctgaaacgacagattctcaatctgatcataaaactcttgcggcaatggcttgatggcctcgggcatatacaaacctttgtcagaagccagtcccttcactacagcttcttccaaagaagcatcgggagcctggtgattcgtactgtaatatttcatagtaaacaatttttcaatgtgttaatgtgctaatgtgccaagggctttacatggaggattaccattggggcaaattagcaaactgccacattattttttcataaattcattcataaactcatcttctttcaatattccataactgccttccacacatgccacttcatcaaaggtctgcacacagtccggttctataccgggataatagataaggaaaggcacaggttcggccgtatgggtacggagttcgcaaggcgtaggatgatccggaagcacggcgatagccacaggctcatcccaatccttcactgcttcataaataggtcctacagcacgtttatccagattttcaatagtaaactgcttcaacttaaaatctccttcgtgaccggcctcatcactggcctcaatatgcagatacacaaagtcgtccgtcttcaatgcttccaatgccgcagcaaccttattctcataattcgtattatataaaccggtagccccctctacagcaatacggcgtaatcctgcataatgtcctatgccattgattaagtccaccgctgaaataacagatcctttctgtatggccggatacttctcgaaaagaggttccatctgcggacgatagcccggactccaaggccagatactattagcaggatctttgccttcggctatacgtttttgattaatcggatggtctgccaataatttctgagaagccaggataagattattaatcaatccggccgtttcctgcgcctccggtacttccgccttcaccatgagcggacggaaaggctgcaaaggtacatcatggggtggggtgcagtccaattgtttatttcccccttttatcaccaacaaatggcgatattgtacaccggtatagaaatgaatccggtcagaacccaatttctcgtccaaatatttaaccagcacatcagcttcttcggtagtgatatgtccggcggagtgattttttatcttctcatcttcgatgcagataatattacaacgcatagccatatcacccggttgcaactccaccccgatgcttgctgcttccaacggcccacgaccttcgtacactttcggtaaattatagcccataacagacatattcgccacttcactacccggatgaaatccgggagcgactgtaatcaatctcccggtacgtcccatagcagccaatttatccatatagggtgtactggagtattgcagcaatgttttgtttcctagtgattcagcaggccagtcggccataccgtcgcctaaaataataatatgtttcataagcctaaatattagcgatgctcatgatatcggcaaatactccggcggcagtcacactggcaccggccccatatccttgtatcatcatcggatattctttgtatcgctcggttgtaagcagaattatattattgctgccttccaagccatagaacggatgtttactgtctacttcctgcaaagacacactgcctttcccattttccagtttggctacaaaacgccaacgtttgttttcatcctccagcttttgacggcgtgattcaaaatccgcgtccaaagaaggtactttcttccagaattcctccaatgagcctgcaaagaaatcattcggtacaaaaagatgtttttccacgtcttcctgttccaatttatatccggcttcacgagccagaataaccaatttgcggattacatccttgccactcaggtcaatacgcggatcgggttccgagtagcgttcttcctgtgccatttttatggtcttactgaaaggaatatccgcacttattttattaaagatataattcaacgtaccgctcaataccgcctctattttcaagatcttgtctccactgtttatcaagtcattaattgtgttgataatgggaagccctgctcctacattggtttcaaacaagaatttcacaccgcgacgacgggctatttgtttcagttcactataaacggagtattcggaagaagcagcaattttgttggctgctaccaccgaaatattattcatcagaaaatctttatataaggatgcaacttctgcactggctgtacaatccacaaacacagagttgaatatattcatacctataatctcgtcatgcaacacctgggtggacgaaggcattcctttctctgccaactcttccttatactgtgacaagtctacgcctgcacgggtaaacaacgcatgatgtccatcggctatacctaccactttcagcttcaaaccgcgttcctgcatcaacttttgttgctgacaacggatttgctctatcaaactgcctcctaccgtacctgtaccgcagataaaaaggttcagcacctgatattcggacaagaagaacgaatcatgaatcacattcaatgatttgcgcagtgacttggattctaccacgaaagagatattggtttctgaagcaccttgcgcacaagcaatcacactaatgccgttacggcctaaagttccgaacaatttaccggcgatgcccggtgtatgtttcatgttctcaccgacaatagcaatggtggccaaattcatttcggcaactaccggactgatttcccccatttctatttctttggagaattcctcattcagcacttcacaagccagcgccgcatcttgattacgcacaccgatagaagtactgttctcggaagatgcctgcgataccataaacacgctgattccgttttgtgccaatgctttaaaaattcggaaattcactccgatcactcccaccattcccaggccggtaaccgtaatcaaactcgtatcattgatggatgaaatacctttaatggctttagaaccggaattaacttcctgctttatgatagttccctcgccttgaggattgaacgtattcttaatcagaatagggatattcttatgacataccggataaatagtcggtggataaaccactttcgctccaaagttacaaagctccatcgcttccacatagctcaactcattaatggtataggccgtactgattacacgcggatccgccgtcatgaaaccatccacatccgtccatatttccaagctatccgcattcagtgccgcagctatgacagaagcggtataatctgaaccgccacgtcccaaattggtcacttcaccactgttcttatcagtagaaataaatccgggaaccaatgccacttccggtaattcctgaaaagcttctttaaccaagcaagtagtcaattcggaatccagaatatgcttggcatgttttttttcagtcttaatgaagttgcgtgaatcataccataccgcaccctttatcaacgaagctacaataatagacgacaagcgctcaccataacttacaatagtagccgacgttttagacgacaagtcctttatcagataaattccctgaaaaatatccttcagctcactcaacaattcgttgaccttatccaataaaacagtacgctcattacctgccggaattacggtatataccatttcaatatgacgattcacaatttcacgatattctttctcgtatgcggaatccccattggcagccatctgcgaagtattgattaacttgtcagtaataccacccaaagctgatacaactacaattacaggctcttcaactgcctctactatctgtttgacacttaaaatgctgttcacggaacctacggatgttccgccgaatttcataactttcatgcaattatctatttttgtcccagcttcttttgtcattctgcccttctcaccatttcaaatccggtaaagaatctactttcgtttcactcagcatgacaacgaaaagaaactgtttctgtttacactaaaaaaataaaattaaaagcttgttttgcttacgtccgtaagcgtgtatcacgtagaaacacatatactatccttaaccccgaggggtcattgttgtggatgtggacattgtagttgtcatgtgccccatccctaatgtggtggttgtatggagatagtacatcgtcattttataattgttcttcttctgttttttatttgaacgatgcaaatataaaaacaatttcctacaatctatcacaatttcccatttttttgcgataaaatataagaatactttttattaaggcagaaataagacaaaatagcggtgaaaaagaaggaaaaacaggaggattcaccacagattacacagattcacacagatttagttgacccaactctttagtatcaatcgtcataatccgtgtgaaccgttataaatccacataatctgtgaatctgtgtaatctatggtgaaactatcccccgtcagaaattataagcaacacctacccccaatatttctttgaactgaactttcgcccctcttttagttccatcctcttcaaaagtcttcacatcattatcatatttcaaagtcgtattgatggtggcggacaaaaacttattaattttcatgctgatcaatacatcccaatttacatccacattaccaaactggctactgtaaggagtaaagaaatcggctgttgtaatcatgctcacattttccataagtggcatctcggccctgcctttcagataagcgccgcattctattttgaaacggtctcccggatccacaccaaaagctcctatctccgaaagataatcatcttccacaaaagtcatttttgcagaaaccggagaaagaaaaacagaatagttactcttagggcgatactccatacctaatgagatattagaataagccggtgcaaagaagttcgagatatagtgagtcttgtccggatagttgtatcctttggcaaattgtgtattcaagtctcccattaaagtataataccatacattattagtggaatatcctaattgggtagaaaggcctattttatcggtagtctttctcattccctgcgattttgttttggacaggccataatccaatatcaggttagtcacccatagccagtttccatttttatgagtcaacgaaccattcaggtaagcgtttcccgataaggcattctcaccaccggccgaccagttagtcatggcggtttgtgacaaattcagaccggtaacaccattcagtacccatgccccttccttatatcctttatcatcggtttgagcatatatgccggttgacataacggcaagtaatattaaaaagaatatacgcttcatttcagttttattttttagttctttaatttataagacgtcttaataactaaaacggaataatctttccatttgttcaggtatttttcatttcgataagaaagcagccttgaaaagcctgaaacatccagctacttctgaaaagagaaaaaacctttaatacttttttatctggcccataattggtatgcagaactatttccttacctttgtacaaattcagcctcaagttgtgctgttttaattatcccgtaagaatatggcaaaggaaaaaactgtatatgtatgcaccaactgtgggcaggattcacccaaatgggtagggaaatgtccgtcttgcggtgcatggaacacatacgtagaagaagttgtacgcaaggaacctgcaaataaaagaccggtatccggtctggagcccgtaaaaagcaagcctgtcacactgaatgacataaccggaggagacgagcctcgaattgatatgcaagacgaagagctgaaccgggtattgggaggtggtttagtaccgggctcactcgttttactgggtggtgaaccggggataggcaaatctaccttggtgttgcaaaccgtacttcatctgcctgacagaaaagtattgtatatttcgggagaagaaagtgcacgacaattaaaactacgtgcagaccgtatcccgcataattcttccgactgcctgatcgtctgtgaaacttcgttggagcagatttatatacatataaagaatacacaacccgatctcgtcatcatcgactctattcaaaccatctccactgaaacaatagactcttctcccggcagtttagtacaggtgcgtgaatgttctgcctctattttgaaatttgccaaagaaacaaatacgccggtcatcttaatcggccatatcaataaagaaggaagcattgccggaccgaaagtactggaacatattgtagacaccgtattgcaatttgaaggtgaccaacattatatgtaccgcattcttcgcagcatcaagaaccgtttcggaagcactgccgaactgggcatttatgaaatgcgacaaaatggtttgcgccaagtgagcaacccgtccgaactgttgcttagccaagaccatgacggaatgagtggagtcgctatcgcctctgccatagaaggtgtccgtcctttcttaattgaaacacaagccttagtcagttcggctgtatatggaaatccgcaacgttctgccaccggatttgatttacgacgtatgaatatgcttctggcagtactcgaaaaacgggtaggattcaaactggcacaaaaagatgtctttttaaacattgcgggtggattgaaagtgaatgatccggccatcgacttgtctgtcatcagtgccattctatccagcaatatggatacagaggtagaacgcgatacctgcatggccggagaagtgggactaagtggtgaaatccgacctgtaaaccgtattgaacagcgaatcggagaagcggaaaagttaggctttaaacgaatccttataccaaaacataatttacaaggaatggatacatcaaaattgaaaatagaaattattccggtcagaaaagtggaagaagcattccgggccttgtttggataaaaatctattttctcctttaagacttaatttgaagaatgatataaaatgacaaaagataaatctcacacccctacctgcgtagattgcggcacacagaactgcaagttcaaagagcgcacctaccccgaattttgcctgacaacccatttggaacaagaagacttggaatgggcactgaaacgatataacgaaaaccacaacgtaatggtggccagtgccgaagtggaatatgaaggttattgccggttaacccgtgtggaagaaatcatgacttttgcacgaaagatgggatatcaaaaaataggaattgcttattgtatcgggttggtaaatgaagcccgtatttttgcccgtatcctccgtgctaacggctttgaggtttactcagtaatctgcaaagtagccggagcagccaaatcctctattggaatccccaaagaatgtgagaatatcggtgctgctatgtgtaaccctatcctgcaggcacgtcttctcaaccaagcacatacagagttaaatgtggtgatcggactgtgcgtaggacatgacagcctgttctacaaatactctaatgcctatactacaactttggtgaccaaagaccgtgtgacaggacacaatcctgccgccgcattatataccgccaattcctattatcgcaaaaaattaatgccggaaggcgaataacctaaacaagaaccatgatacaagaatttcaaataagagtcttgcctgaacaggcagctaatgaacagtcactgaaacaattcatcggacgtgacaagggattggatatacgtaccattcatgcccttcgtatcctgaaaagaagcatagacgcacgtcagcgtactatctatgtaaacctgaaagtgcgtctgtacatcaatgaagttccgcaggacgaggaatttatccgcactatatacaataaggtagaaggaaagccacaagtcatagttgtaggagcaggtccgggcggactgtttgcagctttacgattaatagagttaggacttcggcctgtcgtagtggaacgaggaaaaaatgtacgcgatagaaaaatagatatcgcccgtatcagccgtgagcacaaagttgactccgaaagtaattatagtttcggagaaggaggagcaggagcctattcagatggtaagctctatacccgaagcaaaaagcggggtaatgtagacaaaattctgaatgtattctgtcaacatggtgccagtacctccattttggtagatgcccatccgcacatcggtacggacaagctgccgcgcgtgattgaaaacatgcggaataccatcatagaatgtggaggtgaagtgcatttcgaaacacgaatggattcccttatcatagaaaaaaacaaaatcacaggtatagagacaaataccggaaagactttcaaaggacctgttattctggctaccggacactccgcacgggatgtatatcagtggttatatgataatggtgtagaaatggaagccaaaggtattgcggtaggagtacgtctggaacacccgtccatgctgattgaccagatacaatatcataataaaaacggacgtggaaagtatctgcctgccgccgaatatagctttgtgacacaagcagaaggacgtggagtctatagtttttgtatgtgtccgggaggattcgtagttcccgccgcaagcggtccgcatcaaattgtagtaaacggcatgagtcccagcaaccgtggctccaaatggagcaattccggaatggtagtagaaatcagaccggaagacctgtcggacaatagtctttttacagaagaattaaaaacgaaaagtgaagaattaaaagccacgaataaaaataatggtcaatggactaccggccattgtccattaaccatgatgtattttcaagaagcattagaagccacctgctggcaacaaggcaatatgcgccaaaccgcaccctcacaacgaatgatggacttcacccgcaaaaaactaagctatgatttacctgacagttcgtatagtccgggattagtttcctctcctctgcatttttggatgcccacattcatcaccagccgtttgatcaaaggcttccaacaatttgggaaaagcagtcatggctttctgaccaatgaagcagtgatgattggtgtcgaaacacgcacatcggctccggtacggattctgcgagataacgagacactgcaacacgtcactatcaacgggttatttccttgtggagaaggggcaggttatgccggcggaattgtttcagcaggtattgatggagaaagatgtgcggaagccgttgccacttatttaggtatagaggaggattgaatctgtccgaaaatgatttactgtatacatttgggcgcattaaatgcgcccctacagtaaataaatgatttgcgatattattttattattctttcttattggaagtaaagtcttcttttatcagcttgcaccaatcagcaatacgtttactggtcaattgagcctgattttcttggtcaattaccaaaccgcagaatttttcaccacgtactgccctcgattggttgaaggtatatccgtctgtcgaagtaaaaccgaccaactcagcccccgccttttgaaaagcatctgctaaaatccccattccatccacaaaattatcaggatagttcttctgatcccccaaaccgaatattgctactttctttccctttaaatccaacgactccaattcgggaaccagttcgtcccaataagtaggaagttcaccatcaaaccaagttgacgctcccactatcatattgtcatacgcttgaaaatcattctgccaagccttttctatcaaaacgacttctattactttcactcctcccaaatcttcccgaatcttttcagctatatgggaagtcttggctgcattcattgcataaaataatcctattgttttcataattcttttttattcaccacagattaacacggacaacatataaaacggtccatgtaacctgtggacatttgattaatattccagcagtgtcctggctgcatcataaattttatcctcagtaggtaaaatagccttttccaatataggatggaaacctacaggagtgaaaacagaacctacacgctgtacaggagcatccagataacggaacagctccgtaccaattccggcagcaatttcagctccgaaaccagagaaaactttatcctcatgaaccaccaaagccttacttgttttcttcactgacgcataaatagtttctttatccagtggaataagcgagcgaagatcaatcacttccacactccacccctcttgagccaagcgttcagccacattcaaacagaaatgagttgtatttccatacgttatcatacttaaatctgtaccttcacggcggatacgcgccttcccaaacggaacctcaaattcttcgggtactacggaagaagcctctactgaattatacaaggccttcggttcaagatataaagtaaacccacgagagcgcatcgcagtacgaagcaacccggccgcatcatcggcaaaagaagggcaaacaatccgggcccccggcaaagtagctaatgcaccctctatattttgagaatgataaagtccaccaccaatatatccacccgaggccagacgtaatacaatattgggaacaaacttcccattgctacgccagtattcatgagtacactctacatattgctccacagcaggccagaaataatcggcaaattcagctccttcaataacgacatgtatcttaggatcgaaacggcacatgccatttgccgtacccacaatatagtcctctgctataggagcattaaacacgcgggcatccccaaactcctgctgcattcctttagtaatattgaatactccacctttctctttattcgctacatcctgcccataaatgaaagtatccggattatggcggaattcctctttcaacgtttcgttgatagcagttaccataaaggccttctcaccattttcttcttgatgaagtccctctttatacttttccggtatataaggatcgggcaaaacataatcaaagatacttttcggatcaggatcaggcgctgcaagtgctttccggttagcaaccgacagttctttctttgccgctgcttctatctgttgcaactcttcttccgtaagacgtttgtaacgcaacagcatccggcggaatttcatcaaaggatcagcctcttttacataagccaattcgttttcatcccgatacaacgtctgtttatctgaattagaatgggaaccaatacggacacaattggcatgtacaataacaggagtacgatgggctatggcaaattcacgggcttcactcatggcattcatcgagtcgaacacatctttgccattacaatgaataatcttcagattcttaaaaccggaaaaattatcagcatacttccgggcaactgtctgatcctttttgggaacagagataccgtacccattatcctgccatacaaatatcacaggaagaccttccctactggccccgttaatcgcctcgtaaacatatccttccgaagaagcagactctccatgcgaagtgatcgccacccccttatgtccataatacaccatggcacgcgccactccggcagcatgaaggtcatgcgttccggtagcggacgacacattttctatatgccattcgggtttagcaaagtggttggacatatgacgtcctccactgccgggatcagttgctttcgaaatgccattcaatatcaattcctccacactcatgcctgccgaaagcacggtcagcatatcgcgatagtatggaaaaaggaagtcctctcctttggtaaagacttgacctacggccaattggattccgtcatgccccgcataaggcgcatgataggaccaacccaatgattgcaacagataagacggagctttttcatcaagcgcacgtcccaataccatcaaatgataccactttttcaacgtttcggtatcagtggtctttatatcatattttttcattatattatttttttactgtgatgaatggttattctttccaattttccagataatcttttatcgcatagaggaattgcccccctaacataccatccaccacccgatgatcgtatgacaaagaaagatacattttatgacggacagcaatcacatcgccttcagaagtttcaataactgccggcttcttttcgatatatcccacaccgagaatggcaacctgcggctgattgattataggagtaccaaacaaagacttgaaagttccaaaattagtaatcgtaaacgtaccacccgaaatgtcatccggcatcagtttattatcacgcgctttcaccgccagagtatcaatggtcacagccaaaccattcaaattcaacctgtcggcatcatgtatcaccggaacaatcagatttccatcattcagtgaaacagcaataccgacattgatatgctttttaaacaggatattataaccgtctacagatacatttacctgcggataggcaaccaatgccttcgttacggcttcggttatggcaggcatataagtcaatttgactccttcacgacggaaaaaagcctctttattcttatcacgccatttcacgagtttggtcacatccacttctaccacattcgtaacatgaggagaggtatgtttagacataaccatgtgatcggcaatcattttccggacacgatccatctctttcacttccacgccttcttgcgaaccggaaactgggggtgttaaagaggaagccgatgatggcgcagttggagaagtccggacagaaacagccttaacagattgggcggatgcagatacaggttcagttacggttatgttaccttgttcctttctagtaatataagcttttatatcttttttactcagacgcccttcatatcctgtcccttgaatacgatccaattcctctttcgaaatatgtgcagcctgagccagctgaagtacaatgggggaataccaacgctcttcttctgttttagccgctattgccttaggaacttcctttacttcctgaacagatgttacagatggtacatgggaggacgtttcttctacttgcggtacatttcgctcttctacaagagcctctcctattccttcatcactatctatatctacaattgctactactgtacctacaggtacggtatctccttctttaaataatatcccgatcaccttgccttctacgggagatggaatttcagcactgacctttgctgtattcacttcgaacaagacatcgtcctcttggacagtatcacccacttttaccgaccaggatataatggttccttcagtaatactttcgcctagcttaggcatttttatttcaaatcttgacatattgataattttattttttttaatccttttatatgaacaacaagccactgaaaaagaaagttttaacttaaatcttttttaaggtgacccggtgatgtatccaatcctcattagcatatttttctactttcagcaactcgattgccgccaaatcctttcgggaaaaatgataaatgctattcttttcatcttctatcaagaagtaatgaaacaaaagatgaataaaccgtttgatattcaccgaaacatccaaaaaacaattgagattgaccacttcactaggtacagacggtacggcacggatattctttaatccgggaatcgactccaattcatcagacttccccttcaacactgtatgaagtacatccaagtttgcagaaaataacaaagtacaatgatacatcacacggtttttatgaatacattgcgcactgcccgatattttctttccatccagataaatccccaaacgctcatccgtataggccgtgactcccatcgtttccagaaaaccaacaatacgctgcaaatagtcttcaaacaggggttgcgatgtcgtttctataaaagtaagattaatatttcccttatcatggtaaactgcaccacctcccgaaaacctacgagccaaacgaatgcccttctctatcctgtaatcctcattcacctcggcacgaacagactgattcttgcccatgaccacggaaggttccgactgccaaattacaaaataatccccctgtgtctgctttaaaagatactcctccactgccaaattgaaataaacatccgtacagcggttatctatgcaaaacattatgcaaaaagtgtttcgtgataaatctcgcctaccgtaggatgtggaaataccgttttttgaaattcttctacagtatatccatattgaacggcaatccccgctacaacgattatttccgaagcaggatttcccaacaaatggcaacctataatgcggtcttcctcatccaaaatcaatttgcaaagcccgttccctgtttcattttctgccacgaaacgccccgaataagccatcggtaatttctgtacatgatagctagttcctgatgctttcaactcctcttccgtttttcccactccggccagttcaggattcgtatataccacccccggtacacaatgataattcatccggtcctccactcccagaatatgattaatggcaacttcgctttcacgaatagccgtatgagccaacatggagtatccggttatatctccacaagcatagactttaggatgggaagtaagcatgtgttcatccacttttacaccgttacgcaccatttccacttttagtttatccagccccacttggttcagattcgcttttctgcctacacttaccagaaccttatccgcttcaatcagtgataatttaccggctttttctatggtaactcctgccggactgacttcaatcactttagaattcaattggaagttaatccctcgcttctgatactctgtacgtaacatcgcactggtttccttgtccatagcccctaatatttcaggcatcatctcaatgacactcacctttacccccatactattaaagaaagaagcaaattccattccaattactccgccaccaataatagccagcgatttaggtaatgcagccatttccaaagcctctttggaagtccaataatctatttccgacaagcctttaatgggtggaatcacggtatccgaacctgtacaaaccaacagataagtcacttcatatttttctcctccggctaaaatttgaatcagtccattatcttctccggttataaccgcttctttttctatcaattcggctccataagatttcacagtctgttttacacctccggtcagtttcttgaccactttatctttacggtctattattttctccaaattgaagctgattccatccggtacagcaattccatattttgccgcaccttttgcattatccaataattttgctgaatacaaaagagttttcgtagggatacatccttcattcaaacaaacacctcccatggctttcttttcaaaaatcacagttttcaatcctccggcagcagctctttccgcagccgtatatccggcaggtcccccaccgattatcgctatatcatatttcatattgttaaggttttaagctttatatactataacaacaaataagtgagggacttagttgtccaaaagaagatttcttcatctttatgaacctattttttctaaaagatatgtatctttgcaccaaagaaagcattatgcatcatcccgaaatagccatagtagatccaaatacccttacttgtctggggttaaaaaacattttggaagatatcattccaatggctactatccgtgtattccattcgtttggtgagttgacggatgacacaccggacatgtatgcccactattttatttctgcccaaatctattttgaacatacttccttctttttacttcgtaaaccaaaaacaattgtattagcaggaggtgacaaccaacctcaattatccggtatccccaagctgaatatctaccaagatgaaggttctttgataaaagacatccatcaattacgccaatatggacatcaggcaagaaaacaagcagtagataaagcaatgcatatagaaaaaacagaacatgaattgtctatccgggaaatagaagtattgatacttatcaccaaaggacttatcaataaggaaatagcagacaaacttcatatcagcctgaccactgtcatctcccaccgcaagaatattaccgaaaaactgggtatcaaatctgtatccgggctaactgtctatgctgtgatgaacggttacattgaggcagacagaatataaaatcctcatttattaggattgcacacatatcaggtttaccgttactttgcagccggaatcattctccatcatggattatacagagtggaatgtataaattttccgcctggtagaaacttgtaacaactctggtcatccgtgatgtatcaaataaaaccaaacaataaatatgagaaaaaacattttattcattacatcctgcttgctggctacaacaacttttgcggaaaatatcaacacgctgcctaaggacactacgaaagtcattgatatagaagaggtggtggttatcgcttcacctaaagaaaccggaaaattaagggaactccctacagccgtatctttactctcccaaaaagatatgcaagcaaaccaaatcacaactttaaagaacgtgagttcactggtacccaatttctttatgcccgactatggttcaagactcacctcagctatttatatccggggaatcggttcgcgtatcaacactcctgcggtaggtttgtatgtggacaatatcccttacattgacaaatctgcatttgatttcaatttttatgatatagaacgtattgatattcttcgcggtccacaaggaaccttgtacggacgcaataccatggggggattaatcaaagtacatacccgctctccattctcctatcagggaacagacgtaaaactgagttatggaacaaaaagtaactaccgcagtgtttcattaacccattaccatcgttggagtgactgttttgctttctccgccggtggttattatgagggctcagacggattcttccgcaattctcttaatgggaaaaaagtagataatatggaagcgggaggcggacgaatacatgctatctggctgccttcagaaaacctaaaactagactttaccataggctatgattatagtgacgaaggaggatacccttattactatacaggagctatagacggatacgacaaagagaatgaaaaatataaaaactacacagggaagatttcatacgatcaggattgtacttatcgccgtggactgttcaataccggtttgaatattgaataccaggcacaaaagtttatcttaagcgctgttactggatttcagaatttaaatgaccgtatgtttatggaccaggatttcctgcctgtcagcatttatactattgagcagaagcaacgtctgaataccatcagtgaagagattacttttaaaagcaaaaacaacaagcgctggcaatgggttacaggagttagtggtttttatcaatggctacataccaccggtccggtaaacttcatggaggacggagtgaccgatatgatcgaagggaacatcaacaatactttcaagaaaattcatttagacaatccccgtacccctgaaatgagtctggacgttttgaacaaccgtatccgcgtaagtggaagttttgacacaccggtattcagcaccgcactgtaccaccaatctacattcaatgacctgtttgtgaaaggcctttcagtaacagcaggtttgcgtttggaatatgaaaaaatgtctatgaattatttctcggatagtaatatcgatttcgatttctttcttaaaatggcaatgcctccccttaatattccattcagaaatttgaatgccacaccgctattggaaggaaaagaaaaaaacgactatgtacagctacttcccaaactagcttttaaatacgatttcagccctgcaaacaatatgtatgtaagcataaccaaaggatatcgttccggagggtataacgtacagatgttttcagaactgatacaaagtgacatgcaacaaaaaatgattgaagccatactaaacaaggcaccagaatctatggcaggtatgatagaaggaatgatcaagcaacacatgcccaactacggaaaagaattgaacgtacaagaaacaacagtctacaagcccgagtacagctggaattacgaagtgggatcacatctcagtttgttcaacggcaaactgaagtccgaccttgccgcattctacatggatacccacgaccaacaaatcgccaaatttgtcaatagtggcttgggacgaatgatggtcaatgccggtagtagcgaaagttatggagtagaggccagctttctggcatctatcaacaaaaacctgaatatgaatgtaagttatggatatactcattccacattcaaaaaatatgacggaggtactacatcatcagaagagcaaattgattatagcggcaattatgtaccatttgttccccgccataccatgaatgcaggcgcaaattatagtttctttttcgataaaagcaattggatgcaaagcctgactttaggcatgagctataccggagcaggaaaaatttattggactgaaaaaaacaatgtctcacaaagtttttacggaacactgaacgggcgcatttctttgcagacagaagctttacagatagatgtatggggacgtaatttaaccaacaaggattatacaaccttctattttgaaaccatgcatagaggattcgaacaaaaaagcagacctttacaactgggggtggatatacgttatcacttctaaccattcttgcaaaaataaaaagggggttcttcgcagaactccctttctgtttccacatttaccaaatcaaatttattttctgtcacactaagaaaagtaagaactttattattgctgcaaatgaagcgaatagctcctaaaacaaacctattcgtttgagtgtatgtacatagagaaaatgctgtttactatagaaaactgcttgagtctttgttaaaagaagcaaacaataaaattattcattgacagcgccgcaatgaggacacactcctttattcttcatcttcgccccgcaatttccacaactgaatttataccgagaggcgtgctttatacgattaaatgaccatacagcatataccaataaacatggataacccaaatagtagtacgtagtaaatgtaaaaaacaaatatagaaagatgcagcaggacatcaatcccaacaaataaaaacatgcagcttcaatatgtgtctgatgaaacaaatcatctaaagtagccaaccccacaagaataattccccaaatattaaacatgaaaagagaaagaataaaaggcaagctaaaaggattcaaagaaggattataataaaactgctcccaagttcctggaacaaaatgctgaatactagcataaagcgtagctgcggtagctaccaaccaagaaagaactgtaggaaaaacgctatcaatatcattcaaccaaattaattgcagcttctggcgacgaatagccctatggacataccaaataccgaaaaagcctaatatgataaagaaagcgatggtatgagaattactgaaaaaatgaataaactgtgacactgaatccacagggactactttctccaacaattccttttcatgtacccatcccattgtttcctgatcccgtgcgaccttcacccatacagaatccacactatcagcaggttgtatcataaactccgctaccaccagccgttctcctttaaaaacaggaagcacatcaaccaatggtagttgctgtaacataagcgaatctgaagtaacctcaaaattactgtttaatgtataatgccgttccaccaaataattgacagaatcccttgtcttttgcggcatatcctcactcgaagtaacaggtgaaggatattggcaagccatcaaaatagccaataccaaaaacagtaatccgatgtacttacttttcagcatagactttcatctgacaattcttacaatcaaactctaaacggaaacgcctgttatccgagctaaccagataataaggttccttataaggagaacgcactttatgccaagagggacaccatcccatactataacgcaaacaatgcttgcaaaacatcaatactgcttcttctgccggagccttttcataagccggagcaatacgctgcacaccatgattcctatagaaggaaacagcatcagcattcatcacatttcccaaataagtcaattcattcacaggaaaagcatgatgcgttcgaggcaacttgtaaatttcctgccgatagttaatacggcgcacttccagcagtttctctattcccttacggcgaagttcggcaagcatagaagccggaataaaccaattgtccgaccagtcaatcactatatctgatacttcaaatggagtatttcctaactttccaagttgtgtacgcaagttatcttcctgcagagtacgggcacgttcctgctccctttccagcaccacactgacactgttatcatcttcatcagtcagagacagagtaaagccccgattattctcagccaattttaaaatgacagcaattttcctttcggctgatttacgcgacatcaacctctcaaattcctgatcaaaattacgataaagtatcgtacggggctttatccgaggcatctcctgaggaaataatttattattctccacccggtttatgcgaaatccctgcaacttaccagtctcatccaaaaaacaaacaccatctccattattaaaagacttgattccggctacggtaagataattaccacgaatttccttcactgttcccatctcctcccctaaagacttgggagtatcaaaagaaaaaatatccttattcctgtcaaaaagaaaataattagtaaaaccacgactgaaactcttatccaattgaggtttgaactctaatttcacttctcccgatgaagcacggatatactctttacgacgtttgaaaatagtatccagcttctggcgatagtaagctgttacatttttaacgtaagatacatccttcaaacgtccctctattttcagggaagaagctccggcatccagcaattgctccaactcttcgctctgattcaaatctttcagagacaatagatgcttattccttactatagatttaccgtccgcgtctatcatatcaaaagcaaggcgacagaactgggcacattccccccggttggcactacgcccaaaacaagcctgactaacataacattgtccactatagcttacacacaaagcaccatgtacaaatacctccaaaggcacatcaggacaagcatgatggatattttctatttcaacaagagaaagttcacgagccaataccacctgacggaaacctgcctcagccaggaatcttactttttgagaagtacgattatccatctgcgtactggcatgtaacggtataggtggcagattcaattccaacaatcccatatcctgcactatcaaagcatccactccggcacggtataaatcccaaatcattttttccgtatctttcagttcctcatccttcagaatcgtattcacagtcacatagatacggacattatatacatgagcgtaccgcaccaactcagcaatatcctccaatgaattccccgcagccgcacgtgctccgaaacggggagcaccaatataaatggcatcagcaccgtgatcaacagctgcaataccgcactccagatttttagcaggagctaataattctatttttcgttgtctgatcatcgtatctcgtttatatcaaacggggtttcctgatatacataatagttcaaccaattagaaaacaacaaattggcatgtccgcgccaacgcaccaccggggcattgtccggattatcgtccttataataatttacaggcatttcaataggcaaccctttccccaaatcacgcttatattccgtatcaagcgtataaggagaatactccgaatgcccggtaataaagaattcacgcccattacgagccatagccatataaaccccagactcatcagactcagctatcaaagccaactcttttactttcagaatatcctcacggtgtatttcggtatgacggctatgtggtacaaaaaactcatcatcaaaaccacggaatatgggcaatccctgtacattgatatgatggcggaaaataccaaacattttttgtttcagcggatatttgggaactccatagaaatgataaagcccggcttgggccgcccaacaaatatagagagttgaggtaacatgagtacgcgcccaatcaaaaatagtagtaatctcattccaataattcacatcctcatacggcatctgctctaccggagcccccgtaataatcatcccgtcatatttctcgccacgcatcaaatcaaagtcatgatagaatgctttcatatgttccaccggtgtatttttcgatgtatggcttttcaacttcataaatgatatttccaactgcaagggagtgttggaaagcaaacgtaccaaatccgtttctgtcgttatcttcaacggcatcaaattcaatatcacgatttttaacggacgaatatcctgtgcactggcacgtgaattgtctatgacgaagatattttcctccttcagcaattcaatagcaggtagtttatcgggtaaatttaacggcattttcttatctgttaattagttgtaagtgcaaaattaaaaaaatcccgccaaatctccttactaaacgatcttttggactaaattatttcctttcttgatcgttttcaatcaacaaaccttgattatttttagattttcactcatatcttcacaacttctgtcttgatcccactttttccctcccttcattttatttattaactcacctttttctcagaaaaaagaggacgaacttatatccataatcaaaaaagattaattatctttgagcgcaaaaataaaaaatattcttattattaatgtgaaatataattaagtttcaagtagttgactcaagaaacaacctatatttttaaattttaatctttaaattcaaaaagtatgagaacctttaaatcattgatgataagcttatgtatgggtacaaccctatgcatgtgtttaccacaaaccacgacagcacaaaccgtaagttcaggagattcctggaaatgggacaaaggaaccattgtgattgacactcctgaacgtccgtccggccagaaaagtgtattaggcttaaccatcccgaaaatggaagtagtccgcgtaggatttgtcggattgggaatgcgaggtcccggagccgtagagcgcttcacttatattcccggcacacaaattgtggcactttgtgattatgaagcatctcgtgcagaaaaatgtcaggatatcctaaagaaagcatctatgccgaaagctgccatttattccggagaaaagggatatgaagaattatgtaaacgtacagacatagatttagtttatatcgccgcagactggttgcatcatttccccgtagcaaaatgcgcattggaaaacggtaaaaatgtagctattgaagttccctcggccatgaacctgcaagaatgctgggatttaatcaacctgagtgaaaaaacccgcaagcattgcatgattcttgagaactgttgctatgactggtttgagatgaatacactgaatatggcacaacaaggtgtatttggcgaaataatccgtgcccaaggagcctacattcacaatttaagcccgttctgggatcattattggaaaaacggcaaagaagacaaactaggatggcgtttagattataacatgaaacaccggggtgatgtatatgccactcacggcttgggtcctgtagcacaagcattggatatccatcgtggtgaccgtataaccactttagtagctatggacaccaaatctgttgttggtaaagatttagtggagaagagaaccggcgaagaatgtaaagaattctgcaacggagaccataccaccaccctgcttcgcacagcaaatgggaaagttattgaaatccaacataatgtaatgactccccaaccttacaaccgcttgtaccaactgacaggaagcaaagggtttgccaataaatatcccgttgaaggatacgctttggatgcagcacaactgaccgcatcgggcgtgcaacccaaagtagacgatttgaactctcacggattcttaccccaggcagaaatggaagcgcttattgagaaataccagcatcctattttaaagaaatatggtgaaatggcaaaagaagtcggcggccacggcggtatggacttcatcatggatagccgtctggtatattgtctgcaaaacggactgcctttggacatggatgtatatgacttggccgaatggtgctgtctggccgaactgggagctatctctatggacaacggctgtgcggcagtagccttcccggacttcacacgaggtgaatggaacgtgaccaaaggttacaaacatgcatacgcttcacccgaagacgaaaacgcaagcatggaaaaagcaaaggctttcaccgcgaaactgaaagagcagggagcgaaagaatgggcgaaagaagccaagaaaaaaaagaaataaatagaaataaacaagaaaaaatgtgtcggaagtcactctgttataaaaggtagcccaattcttccggcacattttttatgccattctgaacgacaatcgtttccagcttttattaagaatcaaaaaaaggacgtaaccggcattcttcgaatttctagccaaagtactttggctttaaggagagtatcatcataggacgattcagccaacctgggaaaccaactgacagaccatctggcggacggatataatgtgaaactggaggaaatagaaaccttatcggcaacattgatcagccggaagattacggacaaaaaaacacaatccgcttcggtacatttttgacagcgacagtctgcttttttaaatgaaaaagcaggataacacggatatagtttgttgactatccgtaccatcctgccatccgtttttaccctatctgcgttaaaagaacagactgtcagctttacaaattattcttgtaaatattcgccatcaccttctggtattgattctcaatctgcatatacgcctggagattcttataaatattttccgtttccacaaaatattcaatcaatgaaatttgtccctcggtcaatgcttgcttcaataaatccagcgaacggtacatcaaaggaacatcatacgcattcatggcatccttcaactgctgcatctcattgaagagagacatcagagaagcttcaacctgatctttagcattttcttgcatcaattgtgcgctgatagcctgtgccttggctatctttacctttttacgattctgaaacaaaggcaaggagccccctaccacaaaaccattcatcgaaaccgcatcatccgtgttacggcgaaaaccggcttccagtttcggcaaccatccttgacggtctaccgaaacctgcttctcggcggcacgggcagtggcgacggcggcctgcaagtcaaggtctgatgccatcacttcatcccgcatgacattgtaatcattgatttcctgtatggcagggtatgtggtttcagcaaattctaaaggcatgttgccgttcatggcaagcagagattgcaaggcagtgcggtgggctgcgctgttttgggcaacttccgtctgcacattcatacgttccattttgattttattgacttccaatatgttcgcatcaccggtagtcagacgcttttcataaagtgcctgtaattcatctgcatttttcatacggatatccatcaatgttttttcctgattcaacagaataaggtctagacagagattcttcgcattcagcaaaatatctcggcgagcagcctgttgttgcttgtccaccgcttcgttctgcaaagtagcctgccgattgcggacaatatactgagtagggaaatcaaaaccttgtgaagcgacaagttccgtaccgtgccccccttcggcaccattactgtaaaaagaactgtagctcactgtagggtcaggcaaattgttgtttgtccggttttccatcttggttgcatcggctgcatgtttctgcgccttgagctctttattattctgctcgatgcttttcaaaatgtgctcaatactctgggcctgcgccagcaagggagagcagaaggctattataaataagattcgtttcatatatttctattatttcttctttcgattcatcagttcataaacaatcggaataatgaaagcgttcaagaaagtcgatgtcaaaagacctcccagaataactttcgccatcggactttgtatctcattacccggcaaatcgccacggaatgccaaaggtatcaaagccagcgcggaagacaatgcagtcatcaggatagggttcaaacggtctaacgaaccgtgaagaatgctttctttcaaatccataccttcttcgcgcaacgtattgtaatgacttatcaacaacataccattacgggtagcaataccaaacaacgagataaaaccgataatagccggaatgcttatctcacccgttgttatcatcaatgcaaataccccaccaatcaacgccaaaggcaaattcaacaaaatgactccactttgggctgcattcttaaactgggtataaagcaacaggaagataactacgatactcataaacgaagtaagcatcagcgtacggctggccgcctgctcgctttcaaactgaccgccatattccacatgatatccttcgggaagcttgatttgcgcatcaatccgttcctgtatatcattcaccacgctgcgcaaatcacggccgctggtattggctgaaatcacaatcttacgcttcacgttctcacggctgatggtattcggtcccatggcagaaatcacatcggctacatagttgacagggattttctgaccgtcaccggtatcaatcatcaggttacgcactttctccatctcatcacgcacctcgtccttggtacggacaataagattaaacgctttgccttcttcatatacctgcgaaacaacttcacctgccatgtttacagatacaaattcggcaaagtccggcaaagaaataccgaatttggcaagcatctcgcgtttgggaacaatcttgagctgcggacgttcgatttgttgttccacattcaagtcggcaataccctccacgctactgatagcatcctttatctgattaccgatggcaaacatcttgttcaaatcgttaccaaacagtttgatggcaatgttggccttggtacccgaaagcatagcatcgatgcggtggctgataggctggcctatttcgatattcgcaccggtaatggtagataacttggcacgcacatcggctaccagttcctgacgggaacggtctttcaattcaaacggagcctcaatttcactcacgttaacccctagtgcatgctcatccagttcggcacgtcccgttttacgggctacagtctgtatttcgggaatagacatcagcaactcttccgcacggtgtcccattttgtccgattctgccaaagaaattcccggcaatgaactgatattaatggtgaacgaaccttcattgaaagatggcagaaaactacgtcctaatgcaaaaaacataaccaatgccaccgcaaacagtccacctgtaaaacccaatactacggatttatgattcaaggaccataacaaggtattgcggtaatgctttttcatccatacggctacaaatgcctctttgggtaatcctttacttttattattacctaacagatagctgcacagtaccggagtcagtgtcaaagccactaccgtagaagcaaacaacgccacaataaaggcaatgcccagcggaaccagcatacgaccttccattcctgtcaggaagaacaaaggaacaaaactgactacaataatcaaggtagagttcaagataggcatacgcacttctttcgaagcattgaacacgacttcaatcacgcttttacgttccccttcgggcaacaagcggttctcgcgcagatgtttccatacattttccacatccacaatagcatcatccaccaacgaaccaatggcaatagccataccacccaaactcatggtattgatggtgagccccatatagtgaagagtcaatatagaaacaatcaatgacaacggaagagttaccaatgaaataaccgtggtacgtacattggcaaggaacaggaagagaacaatcaccacaaaaatagcaccttcatacaacgaatccttcacattgccgatagaactttcaataaaacggctctgacggaaaatatctgtagaaacgtgcacatcagccggaagattcttctgcaaatccttcaatgcggcttctaattgctctgtcagttcaatagtcccagtcttgggttgtttggtaacggtcagcagtacggcaggttttcctctctccgaagcagtacctagttttggttcctgcgaaccgatcttcacatcggcaatatcctccaatgtaacgggcaccccttccaccgtcttaataacggaacgtgacaactgagccacatcatggctggaaagcaccccacgaacaatatattcgtttccatattcataaatcactccgccattggcattctgattcatgttacgggtaacgttcatcacctccgccaacgtaacattgtaatgtttcatgcgggcagggtcaagcaacacctgatattccttgatatcacctcctagcacggcaacctgtgccacacctcccgtagaaagcaggcgcggacggatagtccagtctgccagtgtacggagatcgagcatggaagtagtatccgaagtcagaccgataatcagcaattcacctaaaatagaggattgaggtcccatggtaggtttacctacattctcgggcaattcctcgctgaccaaggacaatttctcactaacaatctgacgggccagatagatatcagtatcccattcaaattccacccacacaacggaaaagccattggtggaagatgaacgcacccggcgcacattggtcgcaccattcacagcagtttctacagggaaggttaccaattgttccacctcttcggcagccataccattcgcttcagtcataatcactacagtcggcgcattcaaatcggggaacacatcgacttccgtatgaaaagccgtgtaagtaccgccaataagcagcaaaaccgacgccaccagaaccaatatacggttttgaagggaaaaatgtataattttatttagcatagggcggcttgattaatgttcatgactatgagccggaatcgcattgctggccgatgccaatttcacctgataggctccttttgttaccacacggtcaccggcttttaaccccgtaagaatctgaacttcctttccgtcattagcccccaaagtcacttcctgtttcttatacccttcttcatccaattgcagataaataaaatacaagccctgttcttcggtcaatgctgtaacaggtaaggccagcacatcgggcatttccgacgagagcagatacacctccacatacgaaccgggaatcacatctccccgattatcaaattcgaaagtaacaggtacatagaaagaagtaccaccggatgctttaccataagaaagcagatgccctttcaactcacccaactcatataccttattatcgtatggagtcttgaagtttgccgactggatgctatgcagataaccataatatttctcggaaacatctgcacgaaggaacagacgacggttctgagtgatactcaccaaaggctggcctaccgacacataatcaccttccttcaccagacaattcttgatatagccacctaaaggagctgtaacggacacacctgtcttggtctggttctttgaaatagcctcgtatgccaataatgcattttcataactctccttaatggcattgaaatctttctgtgatattatctgactttttaccaacttagcggcacgttcatattcttttttggcggtttcatatgcgatacgggtacgttttacagggtctccgtccggcatattctcagcagagatattcagaatgggagcccccttgctcacactcataccgtccgttaccggatggcggaaagaaaccacaccggctacattggcaactactacgctttcatcaccttgtgccgcctgtacctgtccgctggtcgttattacctgacggaatgatttaggctggattatttccgattctactccagctgctttcgctttttccggagccaggattatctcatcggaatgtccggttgccatctctgcctcgtggttatgtccttcgtggttttcactcgcatgatcgtgttcctcatgctcgtgatcatggccttcatgatcatgattatgtgctttttccgtttcatgactatgcccctcatggtcatgttccgatttactgttgcaagagcctaaaagaaataatcccaagactcccataaagataagtttcttcatgatgatataatttgttcttacttttttattaaatacaaaattagcgtaaagaaaatgcaacaaagttgcggataaaaagataaactttctatctgttaagcaagaacatcgcaaggaggagcacgcaacccctttacgtggggaagacacgtagaatgcagtttttctaaatagtaattataaggtaatgtgttgtgttctgtcaactgcaatgaaagcgccaatacatccgttaccgtatatagcaacaaacaaaacgaataatcaggagaaacactgtcctgagcccgatccggagttacacttttaaacttggtcacgcatccggcattacatgtatgattctcatcggaactattatgctgctgatgctgtacagaacattgacagccgcacaaagtcatatcatgctgcaagcaaaggatttcccggtgatgatgatgaggcagaacagatgcagtcaacatgattatgctgaccaacattaatacccatgctatatatcgtctccgtttcatcgggcacaaaaataggtgtttatcatgtaaattccaaaaagaaagcatggtaaatgccaaattatcagcaattaccatgctttttattatcttttatgtataaagcttaccaaatagagacacgtttttcaggagccaaatacataggatccccctctttaatgccaaaagcatcataccatgcaccaatttgagggagtgctccgttcacacgccatctgcccaatgaatgtggatcagactttgtttgcaaacgaatctgctcgtcgcggatattgccagcccacactccggcgtatgacaagaagaagcgctgttccggagtaaatccgtcttctactggtagcggagcatcttttgtcgcattcttgaacgcttggaaagaaacctgcaaaccaccatggtcggctatattctcacctaaagtcaaagaaccgttggcattgagtcccggcaaaacctgaatgctatcaaagaaattcaccattacctgagcacgttcttcaaaacgtttggcatcttcggctgtccaccaatctttcaaattaccatccttatcgaactgacgtccctgatcatcgaatccatgagtcatttcatgaccgataaccacgccaatagctccataattaaatgcatcatcagcattcatgtcaaaaaacggatattgaagaatacctgccggaaaacaaatctcattcgtggtcggattataatatgcattgacagtctgcggagtcattccccattcatctctgtcaaccggcttgcctgccttggacaacatataatccagttcgaattctgtagcacgcttcacattggcccaataagaatctttttcaatattcaaaccggtataatccctccacttatcaggatagcctacctttacataaaaagaattcaacttctcaatagctttaatctttgtgctgtcacccatccattccaaattccggatacgttctcccaatgcggtctgcagattctttaccaactgcaccatacgttcttttgcggctgccggaaaatatttctccacatacatctgacctaccgcttcacccagtaccccattcacagtacttacggcacgcttccaacgaggttggttagcctgtttaccggatagtgtttttccataaaaatcaaagttttgtgctaccaaatcatcactcaagtaaccggcagccctgtctatcagattccattgcatataagcgatctgattttcaaccggcaagctattgataattttctcaacctctttaatcggctccacttgagaaacactcagttcagtcacccctttcacgcctataccattcaagaaagcatcccagtcaatgcccggaatctctttctttaattcatccaaagacattttatgataattggccgcagggttacgctgttccaccgcactgaaagaagctttcgcaatacgggtttcgatatccattacagcctccattttctttttagcggcagcctcatcaaaaccagccaattggaacatctttacaatatgttctttatacttattacggatattggtagtcacatcatcattgtccaaataatattctctttcacccagactgatacccccttgatacaattgaaacaaattgctcttgctgtccatgatatcggcacccacatagaaactgaaataagggaatacaccgctatgagccagttccgccatcaaaggaactatttccgatttatccttcactgaagcaatcttttccaaatcagcttgaataggagttactccatccgcattcagtttcacactatccatagccagattatagatatcccctattttctgacctattgtaccttgcgcattctgtccggcagcaatttccacaatcaatcctttcagttgttcccggttattttcggcaagcatatcgaatgagccaaaacgggaatattcattggtcagagggtgtttcttcatccatccgccacaagcatactgataaaaatcagctccttgaacagccgtagtgtccaaatttgtcaagtctatacccgaagtcatgacggcttcctttttactgtcgcatccggcagctactgccagagccaatacagccattggtaaataatgttttgctttcatttgttctatatatatgatacatattaacttccctgcatctcttctaattccatagaaacggcctcccattcttctaccgtctgatccaagtcctttttcagtttctgatgcttttcatacaaagccatatccgatgcaccttcgggagtagccatatcggcttccaccccgctaatctcagtttccagcttttctattttttgttcacaatccgcaattcgtttctccaatttacgaattttcttattcaattccttttgcgcctcataagataatttgttctcactgaccgtttcgggttcttcctttttagtggcagacacagtaggagaagccgaaagctgcaactcattcagactctctattttctttttctgtaaaaaatcataaatgccgccaatgtgttcttttactactccacctccaaattcataaactttggtcaccagtccatccaagaactcacggtcatgagaaacaacaatcaccgttccatcaaattccttgatagcttctttcaatacatcctttgagcgcatatccagatggttggtaggttcgtccaaaataaggaaattcaccggttctaacaaaagttttatcatggcaagacgactccgctccccacccgacagtacctttacttttttatcagaagcctcacctccaaacatgaatgctcccagaatatcacgaatttttaaacgaatatccccttttgccacataatcaatcgtatcaaaaacactcagattttcatccagcatctgagcctgattctgagcaaaataaccaatctgtacgttgtgcccgatggtcagtttaccttcgtatgggatttcgtccattatacatttcaccaaagtggacttaccttccccattctttccgacaaaagccaccttctcacctcgattaatagtcaaagtcacatcgtgaaaaacgatatgactgccatatgctttcttcaccccgtcacaaatgaccggataattgccggaacgcatggcaggcggaaacttcaaccgtaaggctgaattatcttcatcatcaatttcaataggaactattttttccaattgcttgatgcggctctgcacctggacagccttggtagccttataacggaaacgctctatgaaatcttccgtatcctgaatttgcttctgctggttctcgtatgcacgcaattgctgctcacgacgctctttgcgcaataccacaaactcatcgtaagccactttataatcatagatatgcccgcaagatatttcaatcgtacgattggtcacattattaataaatgcgcggtcgtgactcaccaatacaacggcccccgcacttgtcttcaaaaagttttccaaccattgaatgctttctatatccagatgattggtaggctcgtccaacagcaacacatcgggccgtcgcaacaacaacttggccaactctatacgcatacgccaaccaccactgaactcggatgtaggacggttaaaatcttcccggttaaatcctaaccccatcaatgtacgttctatctcagccgtataattggtacctcccatcatcagaaagcgttcattgtcatgtgtgaatttctcaatcagtttatgatagttttctgaatcatagtctgttctatccgccaattcctgattcattctctcaatactagcctgcaagtcaaagatatgttcaaaagccatctccgcctcttccatcacagtatgtttatcactcagaatcatgacttgaggcagatagcctatcgtcacatcacgcggaacagaaacactacctgaagtaggcgcctgtattcctgccaatattttaagcatagtagacttaccggccccattcttcccgaccagcgcaatacgatctctcttattgataacgtatgacacgtcctcaaacagaggcgttactccaaactctactttcaaattatctactgaaaccattcgtttttatccttttgcaaaagtggcaacaaatatacggttttatatgtaaaaaagataaaatacaagtaaataaaaaaggcccttatccttaacaaataggataaaagtattaaaacgtgttagagaacatatttttttagttgttttatttgcaaaatccactaaaacacgtacctttgcaacgtgtttttcatagtattagatttaaggttaacaaaggttggagcaaggcgttgctcctttttttatgtctacattttcctcatacttaaatattgacttagctcaaccaagcaaaatttatctgtaatacaaaaaatgactgcttcattctcatgaagcagccaccaacaaaatacacgacgtaacacaactatgttttacacatatcagttatttaatatcgattccacaaggattgagtcccggaccaccaccacctgtatatcccctactttctcctgtgtcccatggagaaatccaaaaagcatataaatcgccacaagtaacataaaacttcactttaactatcttgcctgaaagagcagcaagttttttacctgatttccaagttaccaattgtttagtactgttcaaatcattcatttccttacaatcctctctggaaaatcccgtaatcacattaccattttcatccattatctccacctgcaaatcctttgcttgtgcattcacaaaaaaatgattaccatcaaactttattttctcggtaacaagtaccccttctgtgtctgtatgcatggaaacgaacccatcacgacgtaaagttgccaacccagtagaagtaaatccatcccacatcactttattcttcattcttccactagaatacaaatacaaagaatcaccaacaatgagaggtacgccaataacagactgcatatttccccaattccatgccccttccgtttcatttactcccataacaggttcataactgggacgataaaaatgaaaaccatcccgactatatcccatccctatttcatttcttttctgaatacctaacttaccacagagatcattctctggtcctttccacatagcatagaaccctagcataacactttcataaggcatagcatcaaaattataaatggctggacgcacatcaggaaattcaggatgtggcagttccttatcggaaggagtaaaccacaaaactatatttttatcctttattcctttagccaatgaatgcgccacgctaactgccatctctggatcttcattttccaaatagcctctagagcgtccgtctgctttactcccctgccgtagactaatagcccatttttgagtaaacggattatagaaagcagtggtacgatcccccaccggtcctgattgcgcaactccttccgaccaatgaataccatcttttgaatattttaaaattattttccatcctccactatgtttttccacattgaagagtttgaaacgtttttctggttctggacacattttatcgagccaaactgtagccgcatcccgatcacaagtatctacaatattcgtacccggcactatatccatattcactttttcccaatgcttcccatcttttgactccgcataacaagtataaaagctttgacgatgtttgtgcatagatccggcaccagccaaataccacattttaaatttttgttcgctttcatcataccatattccatcactgaaaggagcagcataaggagcacgttcaaaagtgtattcccactccttatccggagcaagtaccggattattctcatagaacatagccttatgggaaacacgctccatatctgtttctgcaattaaaaaatcatcaacgaataattggcgtcctagatttacagaaataacagtcggtttgtttgaaatataaggtaaagacatttcgcgacgtactccatcatcaatcatactaggaggccattgctcgggcagcacaatgccattatgcaatgttctaccattctctttcaccgttttatcattggaagatgacacacagccggcaaagcaagctgcacatataatataataaaatactttcataattattctatttttaattaccatcctggattatttttagtgatatatggattaccctctacttcatcaattggcaatggaacccattcattcttattttccttaaaccccatatattgagccctgctaaaccttttaaacaaaggatcagtattttccaattcgcgaaaacgctctactactttaccccaacgaagcaagtcaaagaatcgggagccttcataggtaagttctagaatacgttcatcttcaatagttctcatattagcttctgttacatgaggtactcctaccctatcgcgtactttgtttattgcttctaacggggttatgtttgcagtggctttccctcccattactacagcttcagcatacatcagcaaaacatccgaataacgaatcattctccagtttactccttgtgcacgtccattaaaaaaatgcccaccagcatcatctgtcggaggtaaggtccaatccaaccatttcctactacacattttatatcccattgccaactcatattgttcaccaaatgttccttcctttgaacccatttctgcttcccagtccttcccttcaagaaaagtaaccttcatacctttcggacgtataatctccgatacattatcattaaaaacaaacgaaccaaacatacgtggatcagtttctcctgtcactgtttttgacgctacaaatttatcatataaccaattgtgcataacctgtgcagaactattcgaatttctacttctattcattatacacattttacaccggacgtcattgaacaacccactgtccacaaatcctgggttaaatcctgtattcaacactccgacaaattgtacttcaaaaatagattcatcattattttcatgtgccacatcaaagttccatgaatagtcatctaccaatctgtagtccccacaattaccattaatgatttctgcaaaagccgcagcagcctcattataataagttatttgtgaagttccatatttgggttcaataccggatctataaagatatgacttacccaaaagtgcataagcagaagctttcgtcacacgtcctttatttttagcatcccaaaaattcttgtcaggaagtaaatctttagctttgatcagatcatctataataaaatcccaagcctcttcaggtgttgcctgaggcttatattcattaggagccttaggcaattctttaatcaaaggaatattcctataattgatgaataaaaagaaatgtgtaaatgcacgaagaaaataagcctcccccaaatatgcatcctgtaattctttattgctgaattctatttcagtaagactttcaatcatttggttagcttgggaagcagctgtatacattaactgaaaaggttgaaccaatgaataataggaaggggtaaactcttcattataagcacctggtactccataatcagctaccgaacacccctcatcactacgagtcaacatcaaaccaaatccacaagctcccaaattacgaggagtcgaaatatacccatagataccaagaattcccttattacaattttctagtgtagtataaaatgaattaacgtctgattgattaggattcaccgccaaatcattaaaaatatcttcacatgagcccatcattccaatagttacaaaactgatgatgataactataattttacgcaacattattttcatactcattctgtttttagaaagttaaattgacaccaagattatatactctagaattcattgttgcttcatgaggactttcctgtgcttgccagaaaccatccacacctctgtcaaacaacacgtttgaactaacttcgggatcatacaagggatattttgtgatagtgaataaattttgtacccccgcatatattctaaatgattctatatggaatttttgcaataatttcttattaaaggaataaccgatttgtagattcttgcatctgaaataagaaccatcctccacatagaatgtacttggaagcgagtttatgccagaactgtttttactattcagtttaggagcttccgcattaggattttgcggagtccatgaattatagaaagcatcctttagggtagcactattagctcctccaaaataccaatcatatttcattaaagcaaaaatatcgttaccttgcgttccttggaaaaaagcagtcaaatcccaattcttataacctacatttatatttaaaccataagtaaaatccggatgaggattaccaatatccgttttatcattctcatcaatcttcccatccggctttcctgtcaatacaccattcacactaccattattatcctgaaaaataaaattaccatcattatcaaaaccttccaccacatatccccaaaaggtaccaataggcaagcccggtttagtaatagtaggacggtcattaaaagaaccactcatcatcacctctgccttaatgggttgtactccctcacccaaactctttactttatttcttaatgccgaaatattggcagtaacatccaaactccaatccttccaattattacgataacctaccgtaaattcaaaacctttattttcaacagatgcagaattaaaaactggcaaatcccccccattagtcataatggtttgccctgacgatgctaatggaagtaatggagcaagtaagtcattattatctttccaaaaatattcagctgtaaaagaaattttattattcagaaaagccatttccaatgctacatttttagatattgatttttcccaagtcaaattttcctgagcaaatttggttacataaccattcatcacactactttgaccaatctgattttcaccgaatacagaaggtattggaccataagccgtagaaaggaaagaatatggatctataaaattagctcctaattcaccataactagctctaatcttcattttacttatccattctatattaaaaaaattctcttcatgtatattccaacccactgaaaccgaaggaaagtaaccgaccctatttcctttagcaaatttggaagatttatcactacgaatacttgcagaaacaagataacgctccttatagtcatagttcaagcgagcaaaaaaggagagtaaagctgaattgtattcttcacttgttatatctcctttcccattaaaaatagtaatattaggaccacccaaatctgtagaaccagaaccaatccccatagttctatagtattctctcatccaacttgtacctaccattacatcaatagtatgaccagcaaacatattcttataagtcaaaatgttatcaattgtataactaaatcgctgtccacggctttcagatagtgaattaatcgttctgctataatcaggatctgcattaccattctcatcccaattggagtcaaaagcaatggaccgagatatattatttgttgatatatagtcacctccaagtagtagcttataatccaatcctttatataaattcagccctatattcaaactaccagtaacattaactgttttatttcttcgaacagtattggaataagatgcaaacggattagtaacttttccttcatttacataataatctttacctgcagatacataccttccctctacatcagtcattggaacagtaggaatccccatcaccatccttacttgaggctccttatttgtaaaagcagcagaaagagtttcactaacagtcaaacgtcctttcttaaaagttccattgacacgtgcattatatttcttaaaaccagaaaattccataataccttgctgatcaaaataccccaaacttgtattaaaagttgaatattcaccaccaccagaaattgaagcattcaaattatacataggagcatttcttagatatgcatcttgccagtcggtattaatattaggattagtaggatgaatattttctggagcttgagtctggtttgttgaatttgcaacaatttgcttagtatattcgcgatgctcatttgcatctagaaaatcaaggtatttagaaggggtctgcaaagaatagtttgcagaaatttcaacttttgctttacctttttgaccatgcttggtagttatcagcacaaccccatttgcagcgcgagaaccataaatggcagccgccgaaccatccttcaggatttctattgattcaatatctgaaggattcaacgaatttagcccattattagaaaatgcgccatcaataacatataaaggttcagtagcaccaaatgtacctgctccccgaacaagtatcttgatatctgccccagcttctccccccttttgcaatatttcgactcctggagccctcccctgcaaagcagctgcaacagaatgccccatctgtttactcagttcttttggaggtactgtcgccacagatgctgtcaaactagattttttttgagttccataaccaaccaccaccacttcatctaattgttccaaatcctctttcagagttatattcacattcttttccccttccaaattaacagcaagagtcttataaccgataaaactaataataagagttgcattcgcaggagctttaagtaaaaacttaccatccatatcagtaatagtaccattagtagtccccttttccatcacattaactcctacgataggttctcccataacatccatcacaagccctgaaatatcttgttctttcttctcgttcaatatagactgttctacctccttcttccgaataacgatatttttatcttttatctcataagaaacattttgtccttccaagatttgctcaataacttcttgcagttgctcagcatctatattaacaatctttttcgtatctacatccccagctatatacacaaatgaatatccacttttttcttttagctcagtcatagcttttttcactgacactttattcattttcaatggtatattctgtgagaagatattcaaattaaggcaaagcaaagccccgaccaataatatggcctttctcttgtttttcataaattagtaatttattaattaaaaaattaaatgaacttagcttttaaagagaaaaatcattaactttgcactctctaaaagcgcactcacaatcgtaagtcgaaaaagagatttcatcaaggtgggaaaatccctatatcttcccaccttttcttttccatccccttcgtacccctatcacagtattacagctctaattctattcatacttttaattttaaggttaaacaattttaatccactccctatttaatataaagttatattgtgtccttcaataaaataatgaatcttacgggtcgcagataatgcttccaaaacttcctgaatattttgctcacgatgaacgaaatttccatagaatctgaaagtattcaaagtatcactagctatttgtattttcacattataactacgttctaactccttcacaacatccggtaacaattcctcatcaaaaaataaatatccgttagtccattgtaatgcattggcaacagtagaatgctccacatgcattctgccatcctttttattcaagaccaccctttcattgggtaacaaaaaagcttctttttcttttttcaataaattattcaatgacacttttccttcggacaaagaaacaacggcttctgcatcatccggataatcccgaaaattaaatttcgtacccaatacttttaccagcaaactattcgttttcacaagaaatggaacttcttcatttcgtttaacttcaaaatatccttctcctatcaattctatttttctattccctactccgaatccttgtgaatatgttatacgcgatccagcattcaaccacaccaatgtcccatccggcaaggttaattttgttctggaaccaagaggagcctccacaatgatatccgaaaattcctcttttatacttattccacccctccaataagaaaaataagaaactgagaacaatataacaataacagctgcataacgccaaaatttagacaaacagaaattttcacgttctcttttatcattcaacctctgattagcaattctatttttaaattgttcaaatgctttgctcttatcatatttaacatcctctttcacacttatggcagaaaaccaaatttcttgccgctgcataaaatacttttcattttccacagacgcagctatccactccttcagttcatgcacagcatttccatccaactcattacttaaataggatactattaattcatcaatatgttctttttctgctttcatctttgttgtttctaaagtgaagacgatttattttaaatacagggtagtcctaaaagaaacttttttctgtttcaacacgaaaaaaataaaatcaaagcaattaaatatttgctcaattcagtctgaaggaaagataatgcattctttatatgatacttaaccgtatttatagaaatacctaattcctgagaaatttcttcatattttttctcctcaaatctgcttttttcaaaaacacatctacattcaatcggtagtttgtctattgccatacggatttcatgctccaattcacgttccaataatattcccaaaggataattatctgactgcaaatacttttcttcagacatctcttccggtactagaactgaaaatgaaatttcctttttttcagatccagatttcagatagtctatacaacgattacgaacggcctttatcagataacttctaatagaaatagtaatgtttaaagtttctctgatttcccaaaggtgaaaaattacatctccgactatagtttccgataaaaaattatcgttcaaatattgatttgctacatgacacaaaagaacataatgataatcatagatgtatttataagcatcttcgttgccatttttcagttgttctactatcagtttctctgtgttttccattttatttcttttggaaaaggaataaagttaacgggaacaaatttagaaattaattctgagtaaccttataaaagtgcaaaaaacaaatccgttaatcttattatcacaccttaaatggttacaataaagactaacggatttccctattctagttttacaaactatatccaacacctcagataaaacgaatctgaatcatccctccataaggattaaaatcgaaaagaatcttatcagcatccttctttagaaaaagctttttcccatcttgcctaatctccgaaactctatttcccacagatttcaataccatagtcagtggttccgtaaataattgtgcattcatatccaaatgaggagttatgttatagccgttttctttttctagcacattcaagcgaattttttctcgttcttttgtataggcagccacctctctaaatgtacccacccatattttattttccagagcctttaccttactaaaatgttcccacaatatttcgggattcagaaaagcatcatatccttgcgatattccatgtatcattgccactccccatctaccggagtttaccaagctttccacccatttatctaaagactcaggagttgatttcgatttatctcccccgatgggatattgttcggtacgtgtacctaccctgttctttgaagttatttttaatatatcactattaacagcattgaaaggataacagaatgtacgcggtatttttcctgttttctcataaagtatactgtcattcttctctacttccatttttacttcctccaaagaaacacgctttaaattcgtatgtgaccagctatgactggatatttcttgccctttgtcactcatctctttaatttgcgcccacgacattctcggttttccctgcatagcactttcattctctatacatttaccccatatccagaaagtacctttaaagccatatttttccaatttagggaaaagcaacgtatagtgttcctgtaaaccatcatcaaatgtataactaatagcacatactctgtcacccttataaggtgccacataaacatcttgtgtgaacccgttatccctgatctcagcccctgtctgtttcaccaattctattcgaggcgatgattccggcatagaaacatactcttcatatactcccggacggacaagtatagatattgttttcttgccaccaccaactgccgcattcactgcttcctgaactgtaaagaaatccccactcccatctttcgccaccacataatcataacgtcgcacatattttgccaaagccggcacttcttccatcaaagcgtccacaaccaacccggcaactatacgtccaccatatatattcaagtgagtattatcaattttcccttccggacaaaattcatattgtcctgctggaatccacataaacaattttcttgaattctcgactcccataccggtaaccaagtcatgggtcaatttattcaaatcaataaaaggtacattcatttctccggccacccgacggggagattccagatattccccatgggtatcaaccaataccggaccttctttttcataactaccctttatctccgtcacacctttaggagggaaattacgacggactatagaattgaacagtacaggatttcctcccttagcacgtgtttcattcacaaaacgtcttaaattatcatcaaaggtacttccgggttctgtatgtaatgtggctctaggtttctcatcattatgcccgaactgaataaatacataatcacctttatgaattttagaaagcactacatcccaacgtccttcattgataaaactgagtgaacttcttccattcatagcgtgattatccaccacaacctcttccgtaaaatatccgggaagcatttgtccccaaccacgctctatattaccattcttcagacttttattcgccatagtggaatcaccaatcataaaaatagtaatgggttcttttctctcagcaataaaagccgataacaggagtaaagcacataaagcaagtaatacttttaatttcatgtttttcatatacattttataagttaaaagattcaggcaaaagtaaacaagaacaagaaaagaaaccataaaaaatgatacaagaatatagaaatttgttcaaaatcaatagctcaattactctttcagtaaataagaactaataaaaaaatgttcaaataacatttatttgccatttgaacattttttcaatccttcaaagttcacatcgaaacataggaggttctcccaaataaacaaactcttccaaaaagacaaaaaaatgaatgtccaactgtcagaatgatgcaggcaaagaaagtaattgatacatcaatgtatgtgccatacgttcttgaccattggtattaggatgcaaacgatcataccccgaatcatagaaataaataagttgttcttcaatcatcggattcatacctgtaaccgaattaaaatctattacaggaactccccacaaattacctgcttccttaatggcctgtacataagtatccacatattctccgcatttattctgatagctttcatccggttgtacattcttttcaccgaattccgctaaagaacgatgcaatggggtcaacaaaacaatttgtttatcgggaaacaattttttcaaatgactcaaaccaatattaatacggcctttatacgtatcattcgtcattataggaacacgccttttacgcgtttccagttttttagtttcaccacgggcagccatcacctgctcttctttctctgcaaaccaagtcccgacaggtacgctgctattaaaatcatttgtccccatcaaaaccacgatggcatcaacctcttctccatgctcctttttcaattgttctgcctgacggggtacatcattccattgacgtccactcactccatacacataaggagtgatatccaaccattctttcaaaaaatcccaatacttttttatgttatctccataacaattgggatcagttatcgagtctcctatataaccaaccttttttccataccatggatgccggatataacctttattacatgattcttttccacagagagacgtttcctgtccgtgtaacagcaacggacacgctaataaaagagcaaatacaataaactgtctgtttttcataagcaactattattttttcaatcagtaaagtgccatcaaagatataaaataagaaatagaaaataaccatcacaggcttttattttcgtttgtcctcctctatcattcataagacaagaagttcgaaaggttataataaacaaaactttacacttttagattcatttgttaacaagacacgacatatttataaagcatgttataaaacggcgaaatacagactagaaacttgctattataaataaagtccgtatctttgtagtgtgtttttcatagtattagatttaaggttaacaaaagattggctgtctgggatagatagcctttttttatgctttaaaacaggagaatttcttcataaaaaattcaatatcccaacaatcgcttcttcaaattctacccaaccgaacacaacaaaagtcaataagaaaaagcaatacgtatatctatccatcgaggcaatttatgaactacctagtcttaactaacgtttatcctatatatttttggatttatttcaataaaagaagacactctcatcactgagaatgtcccctatatttaaacgaaactttaaagagaatttatatatttcaaatcttatcttctattccaccatactcgttgctcacggctatcatcaccattcaaatctgctttcacggcagcttcataattttcaagattaccttgataaatttcgctatcaaattgatggcgataaggaatatgatcaatcgttgtacaaaccggaccgacttctagtttcggaatatcaaaacgacgccagtcagaccatgcctcaaaaccatcagccataaagccactaatccagcgttgaagagcaattttgttaattttatcagcatcagtacctgtataggcaactgcttcctgtgccaaatattcatcaacaccttcggccccccattgttcgaacgatgccttcacaccagctgcataaagctgggcaggatcagcctgaatccagccacgttgagcagcctcagcctcgataagcaacatacgagcagcagtaataatgggaaaagtagaggttacctgtgtgagcgaaggattataaaaacagcagactttgttccacgtattcacatctgcagactcaatacccaaaggcataccttggtatttatcaaaattcttcaagtcttcatccgttacgcccgcctctgcctgtgtcttaccgaaaggaatcagtgaacaagtagagaacagacggttatctttcaactccttcagctgatctacataatacttattagggacaaaattataattattgtttacaccattataatataaatatcccacagtattggcctcaaaagtataattcaaattataggcattttcttcaataccgccatcggcgtaagcttgagcaaaacgcgagcgtccttcggcaggatccacatctgccagttttatagcaagcatcatacgggtagaagcattcagtttcttccatgcacgaatgtcaccatcgaacaggatgtcggctgtactcaacgagccactttcattaaactgattatacgcttccctcaaatcggcatctaacttagcataaatcgtttcctgtgaatcaaataccggagtaaaattttcctcacctgcctgaaacgcttctgtataaggaagtggccctagagcatctgtaaggtgcatatagatgaatcccatcaatgtacgtgcaaccgcaatctgattggcattatcaccaaactgtacaatggcaggtttacctttttcagcctcatcactattaaagtcaataatcttctcgcagttcttcaacggataaagataataagaacttgtactcatagtaggtccgccaaacgcaccatactgattattatttttctcggacatataccccggatacatttgcgtccacgggtaataataatttgagttcatagagaagtatttcacataagtacaagcgtatgtaaacaacataccagtattagcctccgacggttcattgggatctttgttaatatcgccaaagtcagtcatatcacatgctgtgaatgttgctgcaaaactcagagataaaaataataatttaatatatttcataatgattcttcgttttatggtttaaaaagcaagattaacggtaaaacctatcgaacgggttgcagcggcattaccaccctcaaaatatcccataccaatttcagacacatccacattaggacaagctgaatagatcaaccatggattggaagcattaattgccacactggcacgactcaaaccgatatttagtttcttcaaagtttgtgacgggaacacatacgacaatgacacttcgcgaagtttcacgtaagtacggtcatacacccattcttcccatacacgggaagctgtggtataatacagtttggcattgacataggtatctaccttattaccatcctgatccacaccagtcatgtggataccaccacctttgcttaccggttcacgaacattgacgccacggtcattaagttcagctgttttatcaagaataccgctactgctaccccacatattagtataggatacaatctgaccgcctacagagaaatcaatattagccgacagacggaaattcttaaaactgatactagtattaaaaccacctgtgaaatccggatggaagttacccagttcatctagtgtattctgattgtaagtaggtacatattcaccaccatacaacgccttctgcgaggcactcagttcatggaaaattatattgccattgtcatcacgttcccatgtattaccggttatcacaccaagtgatttaccaaccatagcataattatacaaacgagttgtgaatgaagtccaataaatagagtaagaatccaccccatcagctagttccaccagtttattgctattcttcgctatattgaaattcatttcccatttccagttcttagtggaaacgggcatcccgcccaaactcaattcaacaccccgattacgaattaaaccagcattcatcttacgagtggagtaccccgattgtggagcagaggttacagagattatctgatctttgtcatcccgagtataatagttgaaatcaccccataaacgattattgaacaaacggaattccgtacctatttcatacgaagtggaaatagacggctcaatattataatttttctgagaagaaggttcatacattgtaacatgtgaaccataactggtatctagagaataagtaggataaatattataagcatcaagcgtagtacctacctgagccgcactagcacgcagtttccagaaattcagccattctgcattcacccatttatgagcaaggacagaagcggaaaggccaccataccaatagctattgtgattaggactcaacgtagatgacatatcgttacggacagaagcatcaagaaaataagtatcatcccagcccatagtagctgtggcataaacactacgttccttgtaatgtgtcttcttattataggccaaggcaatagtacccgatgaagcagccaaattataataattatccaaagacaagtcataatttgtattggtatatgcatataaattatcgtatgtatagtcacgtacttctgcaaaaagagccgcatctaccgttaatttgtctttaaagaatgattgtccccaagtcaaacgtccttgtacggtcaaatcaattaaactgctttgatcctgacgataatttgaccggaaattaatagatcctgaagggcgttcgcgttccaatttgtaaccacgtatgttaccatttacgcgtacccctgctttcaagttataaggaaggtccacagacacatcaccactgaatacattccattgataaatggtgcgatgattatattcatgaaacaaagcatacggattatcatggaatgcagcactttggttattcacactgttgatattccaagtcctccatgatccgtccggacgtttatagtccttataatcttttaaattgacattggtctgtccccattgggtatattcctgcaaaacggtacgtgaaccgttatatccactttcggcagcattatgatcttgacgataagtatatttataatccaatgacacattcatccacggtgtgggtttgaaattagtcttgaaccctaagaaacggcgaatagcgtccgaattgggttgcacaccagtacgatagctattggtgaaagaaacacgggtattaaaatctttcacactctttgaaaacgaaacgttggttgtattggttacaccagtccgataaagatctctcaaatccaacccatgttgccaagtggctggttttccataataatcactggtttcgtccaatgataatggagtgacatatttcacagccggatcgtatgcagctccccaagaagtgtcctcattataatcgtacacataagcaccttgcaaaccgggaatatcaccactatacaaatcataaatatcctgagccctgttacctttttccgtacctccatatcctccgccaccatacagcttctgcatattgaaatgattatagtaagtttcggcctgcaatgtatgacttacttcaagcaaccctttctcactttgtcccgccttagtagttatgatgatagcacctgcaccaccacgcgaaccataaagggcagtagccgcgggacctttcaatacgtttatgctttctacatcatccatattgatagagtttttgttggtgatagcaccatctaccacataaataggttcattggccggattatccgactgggacgaagaaggaatggaacctgcaccacgcaaaataatagtacctgcatcaaaacctgaactggcaccacctataaaacgtgctcccgacactttaccagccatagcattacccaaatcggtctgtcgtgaaatagtcaaatcctcacctgctaccttttgtgtagaataacccaacgctttttgtttacggttcaatccttgagcagttacaaccacttcatccaacacttttgtgtccgacttcattgttacagtaatagtaccacgctgaattccaactcgctgagtaatcatacccaaataagaaacaatcagcgctttagcatctgcaggaacattattgatagcaaacttgccatccacatccgtaatcgctcccatagtagtcccttccactaaaacagacgcacctattatcggctcaccatcatccgctgaagttacaactcctgcaactgttttaggcgcttgagccatagagaagccgatacccaaccacagacaagctagtaacattaacactttttctttcatactcactctcttttaattaaacattatccaagttcttttggaactcagttctacaaaagaggaaaatacaagaatccatttcttataaaaaacgtctaaatcttagtcgttccaaagatattcaactgttaaaagagtaatttcacacagggagctaatagttaaagaaataaaaagtagcagactactttattgggaacaagatatataaagaagaaaatgattaccaaagaaaaaaagtgattttcttgacaattttcatgtgttttacatcatttcatactcaaaataaaataaataccctacttttaacaaatatcgcaactaaataatacttatgaataaaaaatattatagacaaaaataatagccttattcttttatttttaataaaattttatatctttgcaatgttattgataaaatgagttccaaaagaacttatgcttaccgttccccctctattcattcagtccaccatacttatattatttctcccttttacttgatacacaatatattataactatttttttagtcactttctacttatactctaccattagcataatcagcactctaaaaatcaggctattatctatttaatattctatttattttctacttatatgaaccataaaactatcaatcgttttttttattacacaattacagtatttatcaatctactaaatcctaatcggtcaaactcgcaggcgcgaccaaataaaggctaacggttgatgtatccttccacctgacatacgcatatcagctaatattttccatatcggatgccctatcacaccataatcacagtaccccactattttatataaattatcatctcctatcccccactgctgcaaagcttcaaccagtccggaagtatttctgcgttttccatctacaggaatagaagaaaaggtctctttctccgcaaaaatcctcttcttttctggagaacaaaaagaggaggagtccttttcatttttttgctctgctttactttcctctgctttactttgtgacttcatgtttacatttccggttttcatgtccacattttccgttgaaatgcctacgttactgccgtctacatacaaattcttgtattttgaaatctctatcaacaagtaatcagcccgcacctctacacgcttccgtcgttgtgccgcctcaaaataatggccctgtatgctttccgaagtaagaattccaaatttttcgtattggactttactaaaaaagccacgttccaatagtgcatccaccacttgctgtacataatcggccgtacagccttcgggcaatctgcgggtaaaaagcagacactcatcctttccccaacggcaaaaatatcctttgtggtaaatacgtgccaacaagcgcaatacaagcaatgtagcccgactgcccaactcttgttccaccaacaatattttatcattctcgaagaaatccacactcaggtagaaaaattccaatccggttgtttgtaatgccatatcaatatttttttatttatggcaaatatagaaagaagcccggacggaatgacgcgatttgacgcgatttggcacaataatacgcaataatgcacaattgatgctccacacacatcttgaatagcaaccggaaagatatagacgataaagacgaaagatatattatcttacatgggtatcattatagatgttacaattttatcaaatatacatagaaacagatagatgtatacaaaaaaaagagaaactgcctccaaaagaaaacagtatctcttttttatcttataagattcttccctattattcttccgtataacgttcaatagtctgaccacgatcaggacctaccgaaacaatcttgatcggggtttccagctgttcttccaagaaagtgacatacgcattgaattcttccgggaattcatcctcactggtcatcttggtcatatcagtcttccatccgggaagctccgcatatacaggttccaacccctcgctaatatcataaggaaagtaatcaatttcctcaccatttactttataagccacacatgctttgatagtttcgaaatcatccaacacatcgctcttcatcataattaactgggtcaccccgtttaccatgatagaatacttcaaagccacaagatcaatccagccacaacgacgttcacgacctgtcaccgcaccatattcatgacctaaatcacggattttcttaccagtttcgtcaaacagctcggtaggaaaaggacctgatcccacacgggtacaatacgctttcatgataccgtatacattaccaattttattaggaccgatacctaaaccggtacaagcaccggcacaaatggtatttgaagaagtgacaaaaggataagaaccgaaatcaacatcaagcatcgttccctgcgcaccttcacaaagcacactcttacccgacttcagaagattgttgatttcatgttcactgtccaccaaatggaactgtttcaggtattcaataccctccaaccattgtttttccagctcggttatattatattcatagttcagacttttcaagatctgttcgtggcgtgcctttgcttctccatacacttcttcaaaattatgaaggatatcacctacacgtacgccgttacgactcactttatcagtataagtagggcctataccttttccggtagttcccactttggcatctcctttagcagcttcataggctgcatccagaatgcggtgagtaggcaaaatcaaatgagctttctttgaaatgtgcaaacgttctttcagggggtgtccgctagcttccaaagcttcagcctcagccttgaataaagccggatccagtaccacaccattaccaataatgtttactttatttccttgaaatattccggaaggaatggaacggagcacatatttctggccttcgaattccagtgtatggcctgcattcggacctccctggaaacgagctactacatcataacggggagtcagaacatcgacaacctttcctttgccttcatcaccccattgcaaacctaacaagacatctactttcatgtttcttcgttttatgttacttatcttttttcttcctacgcttggcccaagtacacttgctgcatacaccatagatatataaggaatagtgcgaggcatgaaatttcttcagcttcgtattggcaatggcttgtttcagattctcatcctgaaattcggtcactttgccacattccgtacatatcatgtgatgatgggtttcattgttgtacgcacgctcgtactgggaagaattgccgaactgatgtttaataaccaattttgcatcgataaaaagaatgatggtattataaagagtagcccggcttacccggaatttcccttcatttgccatataattataaagcgtatcaatgtcaaaatgacctttaatggaatagatagtatcgagtatagcatatcgttcaggtgtcttccgatgcccgttaacctgcagatattctgtcaagatctgctttaccttatctttcacattctcttccatcacagatttcagttccgccgtcaaagttaagcctttttatgataacatgaaagtttaatgccaatattctgtttctaattttatttctccagccaaagaagctatttctaccttatctgatttggctaatggagccaacaatcggttcacctttttgccattttctttgctttgaacggcaaacttcttcaaagcagtagcagctgctttgcggggcaacactccctcgctttgtaaagtggccattgcctgatccaaaaattcagcttccgaacgctcagtcagctgattacccttcatcaataatcttgccatcagcataaagccgcataactgaaaatattcacgatcatcggccatccattcgaaagccttctccgaagcataaggcaaatattggaacaaactcatgcaagtcagttccgctatttccggatagcgcatatcttctacccatatatcagctatttccggataaaatgtttctaccggctgtaacatccccgccagaattttacattcacggatattttctttccataaagcctgcgccacttcatgatttttttcataacgagcagctatttctttcaaacgcggaagttcgatgccaaaattcagtttatagtctaatcccttctcgcgcatactttgggaagccaccccattcataaacaaacggaattgcccctttatgtcttttattgtttcatgtacatccatattttttcttattcatttctataaggaagattcgcaaattctttgctataacgtaacatctgctccgcgtaaccttcattataagatacttttacatctataatatttccatctttatctgtcacagcctcatatacaggatttacaaaacctttgtaaggagccaaatgaagtttttcataacgtgccaatatctcggcgtgcaaaaccggatctattttcaccgcatacttttcgaccaatttacgggcagcctcaaaatcgccttcacttttaatgcgttgtatctcagccagcaactgtccgaacagagtgcgcaatttttgataatcgtttatcttcacatacgtttttccatccttcttaaccatttcaaccaccttatctgcagcacctttctcaaatgtccaccgcgcaatgagctggcggttacgcatgtgtgcttcctctaccatattacctaactcgatgcggactaactgggtcatcagaccattcatcatataagtataatattctgctttaaaggcatctccatccggtgtaagccccaattctatcattttgtcatccggcagatagtacaaaccgaataaatcggcacgtgcctcttctatcgtagatccatacgctttcaaagcatcctgatctactcccggtaacaactgcccagaaccgtgtcccaaacattcatgcaaatcagtatgtaaatcccctgtaagatctgcatatttctttatccattctttctcttcggcaccgcaaacaaattcatctgcaaatccattaccatgagccgctttattataggcatctgtcagatttccgatggttacagacttagaaccatgcacactacgaatccagttggaattagggagattaatcccaatcgccgtagcaggatacaaatccccccccagcatagcggctgtaatcaccttggccgacacacctttcacttccttttttttaaaccgatgatctacaggtgagtgatcttcaaaccattgggcattagcgctgatgatttccgtgcgcttggttgcttccagatctttaaaattcacaatggactcccaactagctttcaatcctaacggatctccataactttcaataaagccgttaacaaaatccacgcgtgaatccaaatccttcacccacgcaatagaatattcatcaaaatccttcaagtccccgttcttataaaatcgaattaatttttcgataactattttttgttgtgcatcttctgccacaccaagagccttatccaaccaataaatgatcttatcaatggcttgcccatacaatccgccagatctccagaccttttcttgtacttttccgtcctctttcactaaacggctgttcataccaaacattaccggcatcatatcatccggattcttcaaattatgataaaaatcttccgcttctttctgggttaccccttcgtaataatttgcagccgaagtcaggaccaaatcttccccgtctgcctgattcacacgtttaggcatcatttcaggatcaaaaatcaccggaaagacttcttcacaaagttcttccactgtttcccctttacccaaaggcaacttcaatgcatccacactattcaatgcgtctctaagaaattccggagtgaaacctggtacgaacttatccgaagcataatgatgatgaattccgttagaaaaccatatacgtttcagataagtttccaaattgacgaaattcacatctgtacgatctccctgatactctgtatatacggtttccaacattttacgaataagcaaattgtatttgccattctgatcaaacaaaatatcacgaccttgcaaagcagcttgtgacaaatagtaaatcaactctttttgtttcaaactcagttcttcaaatccatacactttatatcgaagtaactgtaagtcggcaaattgttcaaccgtgtaattaaattcctccattttattcatgctcttgtctacttcattgcaaccagcctgtttcatttctacaatcaactttttttcatagatacataattcatgagccgaaataaaaaaaggaaaacaattgttttcctttttctaaattataatgtagcaaattatgctcttacttcttttcttgatttctcttacgatagccattaggagtctcacccacattcttataaaatgcagcataaaaagattggcgattagcaaaacctaccattgcactaatctcttccacattcttatccatatagcgtttatcaactaaaagatgcaaagcatctttaatacgatattcattcagcaaacaagaataattcattccgaagcgggaattcactacagctgacaaataacgagtatttgtctttaattctttcgccaagtcttttgctgaataattaggatctttgtactttttctgaacaactacaatgttcaaaatcttatcatacaattcatcggcaagttctgctctaatcagagatctgtaagcagcctttttctctttcttttctctcaggttatacggctttttcttaggagccgcttcctgggtttctgattttttttccacgtcgctcatcagttaatttttcttttaatttttcgttgtttggttagttatataaatgcaaacatctaattttggacaaatgtgggaaaagtttttttcatatgcaactttttttgcctaatttatttcttaaataatcacaacactttgttttttaagtggcaaaaaagtttatttgtccgatctacaataaccggcttctctttcaagtagtaatttccaaccaaatgagttacgaataaaagtatatcttatttattattatcaggcagagatcccgaccaaatctaaagattttactacctttgtagccgattacgttttaaaataataaacagatatgttccaaactctaaaaaattacttcggatacgatagtttccgtcctttacagcaagatattattcaaaatatattagctcaaaaggatactttggtattaatgcctacaggaggagggaaatccatctgttatcaattaccggctttactgatggaaggtacggccattgtcgtttcacctcttatttctttaatgaaagaccaggtggaaagtttacaagcaaacggaattgcagcacgggcactgaacagcagcaataatgaaacagaaaatataaacctacgtcgcgaatgtcttcaaggaaaaatcaaattgctttatatttcacctgaacgattacttatagaaacaaatttcctgttgaaagatatccaaatatctttatttgccattgatgaagctcattgcatctcacaatggggacatgatttccggcctgaatatacccaattaaaggtactacgtaatcagtttcccaaagtaccgattgtagcattaactgctacagctgacaaaataacccgaaaagacattgcacaacaattggccttgaaagatcctaaaatattcatatcttcctttgatcgtcccaatctgagtttggaagtaaaaagaggctaccaacaaaaggataaggcacggactatccttgaatttatagaaaaacacaaaaatgaatgtggtatcatttattgcatgagccgcagcaaaacagaaagtgtggccgcaatgctgatgaaacaaggtatccgtgcaaccgtttatcatgcaggattaagcagtgatatgcgtgataaagcacaaaatgatttcataaacgatcgtgtacaggtagtgtgtgccactattgctttcgggatgggaattgataaatccaatgtacgctgggttattcattataaccttcctaaaagcatagaaagtttctatcaagaaataggacgtgccggacgtgatggtatggaaagtgatactttgctgttctattcactgggagacttggttatgctttccaaattcgctacagaaagcagccagcaggaaattaacttagagaaattacaccgaatgcaacaatatgctgaatcggatatctgtcggaggcgtattctgctgaactattttggtgagacaatggaccatgattgcggcaactgtgatgtgtgccgtaatccccccgagcgctttgacggaacaatcattgtacaaaaagctttaagtgcaatagcccgaactaaccaacaaataggcacccacatgttaatagacatattgaaagggtcagcgaaccaagaactgattgacaaaggttatgacaaactgaaaacatatgctgcaggaagagatattcctgcacgcgactggcaagattatctgctgcaaatgctgaatctaggctatttcgaaatagcctataatgaaaacaatcacctcaaaataactgaaagcgggcaaaaagtattgttcggcaaagaacccgccatgctggtagtcatcaaacgggaagaattcatacctgctaaggaaaaacgtaaaaagaaagccaaggaagaggtactctttcccactccggttacttttggtaatgaaaacaaggacttgttcgaggagttacgtgtactgcgtaaaaaactggcagaccagcaagctatacctgcctatattgttctatccgacaagactttgcacctgatcgccacccaacaacctacaactatagaagcattcggcaacatcaatggtatcggcgaatataagaaagaaaaatacggaaaagattttatagagttgataaaaaaggtattgcaggaatgaaaataccttttttaaaagctatttccctcatataccaacaataggaacagataaattctgttcctattgtaaaagcacgatgattgtctgacaataatcctgttcgcatttttacttactcgctttcagcttatcctgcaactccggtcggggcactcccaactctattgctttttcaaaagcaacatacgcttctcttttctttttctgacttaaataaatctcaccacacatcacataaatttccgcatcgtccggtgccagtttggcggcctcctccaaatccaataaagccagatcaggcgtattcatttctacagccaatgtagcacgagctttcaaataagagacatctctgggattatcggaaaccaatctgttgaaatcttctaaagattcacgatacttcaactccttctgatttaaaagtgccctgcccaaacgtgcagtattatttcccggttcctcctgtaataaagtgttataatctattctcgctcctttataatccctacgttgcatataaatataagcccggaaaagtaatgcttccttatttttcttgtctatatcgatcacattacaataatccacataagccctgtcaaacaaatttttctccaaatagagtgaagcacgattgagtaatgtaacaacagaatatggagtaatattcaaggataacgtgtacgagtcaatagcatcatctattttccccaatctccgctggaccgttcctagattagtaaacaataaagcattacgcatattggcaggatccatcttcaatgcctgtctgaacaaaatttctgattttgtcaaactgtctttttttgccgcatccaacgcactggttatcagttcatcgtaagtttgcgcctgcaactgcatacatgcacatagcaacataagataacatacgatctgtttcatccgattttctatattaattaattccggttgcaaaggtagaggaatctttaacgatattcctttagtttaattaaaaaaagcataaggtaggtttctcgttttaaagggtattccgtatatttggcatacaattttaaaagaataaagaacatgaaagtagaaaaagcgatattcgccgccggatgcttctggggcgtacaacatcagttcgaacgtattccgggtgtactaaacactacagtcggttatacaggtggtccggaagccaaccccgcatatactcaggtaaaagcccacatgacacaccatgtagaagctatttttgtagattatgacgccgacatggtttcttatgtggatttgtgcaaacttttttttgaaatacatgatccctcacaaaccgatggaataggtcccgaccttgggccgcaatatcggagtatgattttctacatggatggaaaacaaaaatccgaagctgaagaggtcatcgaactgcttcgctcgaaaggtcatagagtcaataccagattacgccctgccgagaaattttgggaagcagaaggctatcatcagcactattacgataaaatgggaggagaaccttactgtcatatacgcgtaaaaaaattctaaattaaacaacagagatgtgttcaaataatagcacacctctgttattcataattatccgaaacctttcatcatttcatcaatgcctccagatacatataaaattcggggtcctcgccaactacctgtttagcaattttcccttcaggatcaatcacatatttagtgggataaccacttactccatacatcaccgccacatccggttcacctatattgcgtacattaatccacggcaattgatgctcagctactgcttttttccatttatcctctgtatcattgcagtcaatccctacaaattctatttttcccttgtatttttcatatgcctttttcatttcgggaattccttttatgcaccatccacaccagcttccccagaaatcaagcactacatatttacctctcagagaagataagtcaaaattctttccatccaaatccttcaaagtaaattctggagcgagattacctggtttcattgcttcttttgctttatcgcgagccagttctttctcatatccttctctcattctctgatataaaggagccatcattccttcctttacccgatcagtcaaaacattaaaagcatcccccaactgatcccttgacaactgtgacattacatatactgatacatctttatccggattctgcctaacatagtcactttttatttttaaaatatttccataccattcttttgctggggcataaactttacggatagaatctccgggtattccttttttctccatatccatacagactacgttcaatgaatctattttatgactatatgttttacagtcctccaccacttcattataatcgtcataaaaggaacctccctccaatttatattcatccaatgaacctgaaatttttataggctggccaggcaacaacaaaaaacttacagctttcatcgatatggcaggtatactgccatcctcattgggtttcactgacggtttaccataaatataaacctgtttcaatacactattacctaaattaaaggcaaaacttccattttgcatggcaaccgtatctgtcctacgactatcacgatcatttacaggaaaagattgtaccaataatgtatcactctcgataccagtcagcgtaccgctgatttccggtcggctcaaaggctggcaggcaatcataaaaccagctcctaccaaagcataaactaaattcttcatttaaatgtctttcaattattatctttgttttatttgcagcatcaaatatactttttcttatccaataaaaataaagaatcagaagtaaaatgccattcacttctgattccccgtaaaagacctataaatttctatgctttcttgatataatccacaatccaagcacccacttccctggtaccatacttggccccaccttcaacctgaatttccggagtacgcacattttcatccaaagaagcatctacagccttacgaatcaaggcgccttcctccttaaggtcaaaatactcaaacagcatggctaccgataggatttgagccaatggattggctatattcaatcctttagcctgtggccatgaaccgtgaataggttcgaataccggagtgctttcacccgtagaagcagaaggaagcaatcccatagagccgctgataacagagccttcatctgtcagaatatcaccaaatgtattctcagtcaccattacatcaaagaaacaaggatcctgaagcatcttcatggcagcattatccacaaacatatagtctgtagtcacttccggatactgaggagccatctcttgtgcaatctgtctccacagacgtgaagatgccaacacattggctttatcaactacagtaagatgcttacggcgcttcatagcatattcaaaagccacttttaagatacgctcaatctccggacgagtgtacatattggtatcgtatgccttatcattatcctgatatttttctccgaaatacatacctccggtcaattcacggatacagataaaatctgcattttccaccagttcagcccgtaacggagatttatgaaccagacatttaaaagtctgcacaggacgaatattagcaaacaaacccaattttttacgcatagcaagcaaaccttgttccggacgaacttttgctgtgggatcattatcaaatttaggatcacctacagcagaaaacaacactgcatccgcattcttacaagcctgaaaagtcatttcaggaaacggatcacctactttatcgatcgcatccgcaccacagatcgcatattcataacttactttatgaccaaatttctcgcaaacagcattcatcacatcaacgccttgcactgaaatctccggtccgataccgtcaccggctaaaactgcaattttaaaatccatttttttagtgattaatggttagcggtcagtgattaatagttggcggttaatgaaatctgacaacactgttcattaaccactaaccattaatcactaaccattattattcatattcattttctattatattcagcattttcatggtagccttaatagcagcctccgtctggtcagcatccagcccacgagtacgaaatactttttcttcaaaactccaagttattactgtttgtacaaatgcatctgtacggcccccaggaggaatacttaccgcatagttggtcaacatagggaatttacgccccagtgtcactttataaattttacgcaatgcacgcacaaaagcatcatactgaccgtcgccgctggaattctcctcaaactcttttccattaatctctattttcacagtagccatcggcttcagtccatgcgccagtgtcacaatataacttttcaattttacactttcgcttaccaccccatgcttcagcacatcggaaacaatataaggcaaatcctcctgagtaaccagttccttcttgtcacccaattcgataatacgttccgttaccttacgcatggattcttcatctaaatcaagacccaaatcctccagatttttacgaatattggctttgccactagtcttgcccaacgcatactcacgtttacgcccgaatcgttccggcagcaaatcattgcaataaagattattcttgttatcaccgtcggcatgaacgccggccacttgcgtaaacacattctcacccacaatcggcttgttggcaggaataacaatacctgaataagattccaccactcggctcacatcattcagacggctttcgtcaatattggtcaaagcattaaaatgatccttcagaatagcttgaacactggcaagtggtgcatttcctgcacgttcccctaatccattgatagtagtatgaagccctttaaccccactcagcacagcagcaagtacattactcacagccaagtcataatcattatgcgcatggaaatcaaaatgggtatgaggataacgttttttcatcttccgcataaattctatcacttgcaaaggattcaagatacctaatgtatcgggtaacatatatcgcttgatgctagtatccttcaatccgtccatcaactggaatacatagtcagaagagtctttcataccgttactccaatcttccagatatacattaacggcaatatccagttcatcagcataacgcaccacattcacaatatcttcaatatgttcttcaggcattttcttcaactgctgtgtacaatgtttcaacgaacctttacacaataagtttattaccctgcatcctgtacgttgtatccagtctacagaagtacggccatccacaaatccgagcacctccactttgtgaagcaaattccggcgggcagcccagtcacatatcattttaacggcttcaaattcgccatccgatacacgggccgaggcaacctctaccctgtctacctttaaatcttccaatagcaatcgagcaatcatcaatttttcatggggtacaaaagatactccgctggtttgttcaccatcgcggagtgttgtgtccatgatttctattttgacgctttttcccatgcttctatcttgtctttgttggtcagcaaaaagtcgatatcatccaacccgttcatcaaacaatgtttcttatatgcattgatttcaaaatgttcgcttttacctgtagccttgttggttatagtctgttcaggcaaatttacttccacctctatttttggatctgcatgaattgaatcaaaaagttccttcaagaatccttcactcaccaccaccggaagtacaaaattatttaattcattattcttatgaatatcagcaaagaagctggacacaactacccggaaaccatatccggcgatagcccatgcagcatgttcacggctggaaccagaaccgaaattctttcccgccacaaggatttgtccaccgtaagtaggattattcaatacaaaatccttgttaagagaaccatctggattgtaacgccagtcacggaacagattatcaccaaagaatttctcttcacgagttgtcgcctttaagaaacgggccggaataatttggtctgtgtccacattctctaaaggaaggggtacgcaagtgcttgttatgatattgaatttctgtttcattgtcttcgcatttttaaattagttctctaggatctgttattacaccggtcactgccgcagcagcagctaccagcggactggcaagcaacgtgcgagcacctggtccctggcgtccttcaaaattacggttactagtagataccgaatattttccggccggaatcttatcatcattcatagccagacaagcagaacatcccggttgacggatagaaaatcctgcttcctccaaaattttgtccaaaccttcttcacgaatctgtgcatctaccatccatgatcctggaaccagccatgcaatcacatgatctgctttctttttccctctcactaaagaggtaaaggcacggaaatcctcaattcgtccgttagtgcaagcacccaaaaatacataatcaattttcttacctagcaagtattctcccggctgaaagcccatatagtccaaagactttttaaaagaagcacttttatcatctaccggaatatgttcagtgattcccatacccattcctggattcgttccgtatgtaatcatcggctgaatatctgctgcatcaaaacgaacctctttatcaaatacagcatcatcatcactctttaatgttttccaatgagacaccgctttatcccaatccgcacccttcggagcatgttccctgccttttatatattcaaaagtcacttcatcaggagcaaccatgccaccacgtgcccccatttcaatactcagattacataaagtcagacgcccttccatactcaagttacggacagctgaaccggcatattccacgaagtatccagtagcaccactggttgtcatcttagacatcatataaagagccatgtcttttgccgtcactcctttacccagttcgccatcaatagtgatacgcatggttttcggacgagattgtaagatacattgtgaagccaacaccatttctacttcactggttccaataccgaaagcaacagctcccatcgcaccatgggtagaagtatgcgagtcaccacaaacaattgtcatccccggcaaagtcagccctctttccggacctactacatgaataataccatttcttttatccatcataccgaaatgagccaaaccgaaatctttggcattctttgccaaagtatccacctgcgttttagaaaccggatcctcaatcggtttgtcctggtcatgtgtcggagtattgtgatccggcatacaatatacatgatccggacgaaagactttcaccccgcgtgcgcgcagtcccgcaaaagcctgcggactagttacttcatgacaataaagcctgtctatataaagctgagtaggtccgtcctcaaccttttgtaccacatgggcatcccaaatcttatcaaataatgtgttagccattttacgtattattatcttttaaacttgttgatacaatcaatatatgcttctactgatgcagcgataatatctgtattcgctccgaaaccatagtacatctgtccgtcatattccacctgcatgtgtactttacccatatcatcactacctttactgatagcctggatcgtaaattccttcaacaccatgtggcggtcaataatttttttcaaagccttgatagcagcatctaccggtccatttccactggcagcagcttcaaagtgctctcctgcaatattcagccctaaacttgccaccgaacgaactcccactccgcttgttacctgcaagtaatccagtttaatatggttattaacacttctatcggcacctgccaataccagaatatcatcatctgtgatatctttcttcttatcagccagttttaagaaatcctcatataccttatccaatttgtcctgctccagttcgactcccaaaacatgaagacgatgttttaacgcagcacgtccgctacgagcagtcaaaacaatagcattatcatcaatgcccacatccttcgggtcaataatttcgtatgtttgtacgttcttcaaaacaccatcttgatggataccggatgaatgtgcaaaagcattgcgtcccacaattgccttgttcggctgaaccggcatattcatcaaacttgacaccatacggctagtcggataaatcttctgagtattgatatttgtctgaatattaatatcattatggcatttgacaatcattgccacctcttccaaggaagtattaccagcacgttctccaataccattgatagtcacttctacctgacgtgctccatttaacacaccactaatcgtattagcagtagccatacccaaatcattatgacaatgagtagaaataatagccttatcaataccatctacatgatctaccaaatatttaattttcgccccatactcttcaggcaagcaataacctgtagtatcaggtatattcactactgtcgctcccgctttaataacagcttctaccacacgagccaaatattcattatccgtacgtcctgcgtcttccgcataaaattccacatcatctacatagcgacgtgcatatttcacagcagccaccgcacgttcaataatttcttcacgagtagaattgaatttatatttgatatgagaatctgaagttccaatgccagtatgaatacgtttgtgcttggcaaacttcaatgcgtcagcagctacatcgatatctttttcaactgcacgagtcagcgcgcaaatggttggccaagtaacagccttagaaatttcaattactgaattgaagtcccccggacttgaaataggaaatcctgcctcaatcacatccactcccaaagcctccaactgcttagccacctgaatcttttccactgtattcaactgacatcccggaacctgttcgccatcacgaagagtggtatcaaaaataaataatctgtcactcataaatttcaattttatacattattacattcataaaaaaaacctttcacacaaggaagtgagaaaggctttcgtatatcattattcacacatacttttatgcacaacactcacttcctgctgactttgccagtagaataataatgccgcatagcaaaatatgtataaatccttggttcattgtttatctcttattttatctaaaacgttgcaaaggtagagattattttctaaacacaaaataaaaatgaaagttttttcataatataaactacgattttttatttattctatttttagagtaacagtttataggaagatatacatctacaagtatctctatagaagtgtatctccaaagttatagatcactttagatatagaggcccaattgaattgacacaaattaaactcactttatgacatagacatgaacattgcccgctacagggcaaaacttccggggttgcttcccgccggagaaggagcatggcggagccagccgggcaggcccggggaaacagagccagccacacgtggatgtaaattcacacgtggatacaaaaaaagcctccggaacttcttcaagtccggaggcttcaatcaaaaacggcagctacctactctcccact

SEQ ID NO: 14462 - DNA, 30002 bp, Unknown
  gut microbiota DNA sequence
ggcatcggaaatgaggagccagtcagaagacctgccattcatcaaaggccgtttctactcgtggggttagggaagcggtacgaaaagatacaataattcataccaacagcatctcatgcaaataattaaaaggaatggggcaacagaatcctacgacagagaaaaaatagccgttgccatacggaaaagctttgccagtacccaaaaagaaataacagatgaagctgtctacaccatagtagacgaagtggaactatttctgcatcaaaacgaagcaaatcgtagtgtagaacgcattcaggacgaagtggaacgtagtttgatggaacatggcttttatgcagaagccaaaaactatatactttaccgttggcaacgcacagaaagaagaaaagctcttagccaaatcattactggaaccggtgatgatactatatcaaatatactaaaagagatacaaaaagacttctccgggaaggaatatagtctaacccttctcgcagagaaattcacaagtttctgtaaaccggatatgacacccggggaacggttggcggcacttgtcaaagcggctgtagaactgacgacacaagaaactcccgattgggaattcattgcggcgcgtctgctgaatttccgattaacaaaaaaactggccgagcaggcggaagctgccggcatcttttcattttatgataaattacgttacctcaccgatgagggtttgtatggtaattatatcttagcctcctatactccacaagagatagaaacggcagctggcttcatgtgtcctgaacgtgacaagcttttcaattattcaggactggatctgcttgccaagcgttatctgatccgtacccgttcacacgagcctatagaatctgtgcaggaaatgtatttagggattgcccttcatctcgctatgcccgaaaaacaggacagactgcaatgggtaaaaaagttctatgatatattaagtcgtttggaagtcacaatggccacccctaccctggcaaatgcccgaaaaccttatcaccagttatccagttgcttcattgatacagtgcccgatagtctggaaggcatttaccgcagtttagacaattttgcgatggtaagcaaatttggaggaggaatgggaatgtattttggcaaagttcgtgccgcaggtggaaacatacgcggattcaaaggtgtggccggaggtgtaatccgatggatgaaactggtgaatgacactgctgtagccgttgaccagttaggtatgcgtcagggagccgtagccgtctatctggatgtatggcacaaagacttgcctgagtttctgcaactccggaccaataatggagatgaccggatgaaagcgcacgacatcttccctgccgtatgctatccggacttattctggcgtatggcgaaacaggatttaaaccagcaatggtatttattctgtcccaatgaaataatgaccgtcaaaggatactgtctggaagactactacggaaaggaatgggaacagaaatacatggattgcgtaaatgactcccgactctccaagcgctgtatgagcatcaaagatatcgtcagactggtactacgttcggctgtagaaacaggtactccctttacattcaatcgtgacaccgtgaaccgtgccaatcccaatgcacaccgggggatcatttattgctccaatctttgcacggaaatagcacaaaacatgtcctccattgaaacagtctctacagagatatgtacggaagatggtgatacagtggtagtcaaaactatccggcccggagactttgtggtatgtaatcttgccagcctttcattaggacatttgcccttggaagatgaaaaacaaatgaaagaaaaggtggcaactttagtacgggcattggataatgtgattgaactgaacttttatccgattcctttcgctcagattaccaatcatcgctaccgcagtatcggcttgggagtcagcggttatcatcatgctcttgctgttcgcggtattcgttgggaaagcgaggaacatctcaattttatggataaagttttcgaacgtatcaactatgctgctatagcagcaagtagcgaactggcaaaagaaaaaggatcctatcattattttgaaggtagcgactggcagaccggagtttattttataaaacggggctacaattcgccagaatggaaagcattggctgtaaaagtttccacacaaggaatgagaaatgcctatcttcttgccattgcccccaccagcagcaccagtatcattgccggaaccactgccggaacagatccggtaatgaaacgtttcttcttggaagaaaagaaaggagccatgctgccacgtgttgcaccggcattgtccgataagacctattggatatataaaagtgcttatctgatagatcagacatggagtatccgtgccgcagggatccggcagttacatatagaccaggcgcaaagtctgaatctatacattaccaatgaatttaccctgagacaagtattaaacctgtatttgctggcatgggaatgtggcgtaaaaacaatatattatgtccgtagcaaatcgttggaagtagaagaatgtgaaagctgtgcctcctgatcttttcgtaaacactccagtactgaattgtcatgctaaaacattccttgtaggggcgcaagtattgcgcccctacaaggaatgaataacaaatttatttttaatatacagccttgagttagcagtaaaacaagaagacagaatataaaacaacaataaatcatgaatacaataaaattaaaaaagaatgcccttttcaatcctgagggagataccgacctccggcacagaagaatgattggaggaaacaccaccaatttgaatgatttcaataatatgcgctataaatgggttagtgactggtatcgtcaggctatgaataatttttggattcccgaagaaatcaatctcacccaagataccaaggattatcctcacctggaccaagcagaacgcaccgcctatgataaaatcctgagttttttagtgttccttgattctttacaaagcaataatctgcccaccatcagcgaatacatcacagccaatgaagttaatctatgcctccatatccaagcctttcaggaatgtgtacacagccaaagctacagttacatgctggattctatctgtagccccgaaaagcgtaacgagatcctttaccaatggaaaacagacgaacacctgctgaaaagaaatacttttataggcaattgctataacgaattccaggaaagtcaggatggattcacattgatgaaaacccttatcgccaattatatattggaaggaatctatttctatagcggattcatgtttttctataacttgagccgtaatggaaaaatgtcaggttccgcacaagaaatccgatatatcaatcgagatgaaaacacgcatctgtggttattccgcaacattattctggaattaaagaaagaagaaccggatttattcactcccgataaagtaaaaatatatgaatacatgatgcgtgagggggtcaagcaggaaatagaatggggacaatatgtgataggagacaatatacagggactcaaccggaaaatgatagaagattatattcaatatttaggcaatctccgttggagtagtttaggttttggccctctgtacgaagaaaaccataaagagccggaaagcatgcactgggtatctcaatattctaatgccaatatggtaaagactgatttttttgaagcaaagagtacggcttatgccaaaagtacagctttggaagatgacttataacccatttacaaaatatattttgctccgcatcttaaacccattaagatacggagcaataaatggcctgacagaaacatttccattaaagactatcaataaacagctgccgccacctctttcacattctccaccgcacccactgtataaaaatgtattcccggaactccatatgctatcagttcccggcattgattgacacaccactctatgcctaatgcacgcgcttctttatcatccttgcattttattgcttccacgaccagttcctgtggtaaatccacattgaacgttttgggaataacgctaagctgtgatagtttggaaaaaggtttgatacccggtacgataggaacattaatcccctcttttcttgcacgctccacgaaggcaacgtatttttggttatcataaaacatttgtgtcactacataatcggctccggcttccactttcttttttaaccaatataaatcttgttctatattaggagattcctcatgcttctccggataacctgccacaccataacgaaaaggagttaaaggagcctgaataggtgttccatcaataaattttccttcattaaaagcattaatctgctcttccaactccaaagcatgggcataaccgtttttctcgggaacaaaagaagattcatcttttgccttgtctccccggagtaccaacagattagtaatacctaaaaattgcaaatcaagcaatatatattccgtgtcttcacgtgaaaacccactgcacaaaatatgcggcacaacagtgatatcatatttattatgtatagccgcagccaccgccaccgtacccggacgccgccgataacgattacgttcatataaaccaccccccaactcgcgatacacatattcgctgcgatgagtggtaatgttgacataaagaggatcaaattcccgtaatgtatctattgtagcatatagtttttcaattccagtacctttcaacggtggaagaacctcgaaagaaaatgctgttttcttttccttatttatcaactcagcaatacccatcttttttgacctttttacttattaattccgataaatccatatagcggatagttatataggagatttatctttatattaatcacatttcagatttatttctccacaaagataggaatagcagattttacatccaataaagcattccaatttagataattattctaaataaagtgtatcaaaagaattattatctaaaataacctgttcgaaagccctataataggttatttattctatgacgcaaattgccgggagaggagcgctatccgtcctctcccggcaatgatatatacaaattaaaaactcaatttcactccggcaaagtaagaacgtggcatacccggcccataaatataaccggaatcacgttttgccccccggtcaaaatcactttgatacgcattaaaaatattatgtactccggcatttacttgcatggttatgcctttatacaaattgaagtcataaccggctttcagattcaattcaaagaaatcaggtgtattcactgcaatgtccttatcaataaaaccagctttatgctctaccatcatactaccggtataagtaccggacaatgcaatagtcatcggtacgaaaggattgtatgacaaagtgaaatatccataagtatccggagtacggaacatttttttctccatcggcaccgtttcatcatcactccatgcacgtgcctgcttgtattcagccttctgcatggtaacgccggcctgcaattgaagtaaggaacgataagcaatctttccttccaaagtcaaaccatacactttggctcccttctcgttataccgttcattgataataataccgtcacgctcccctatctggcgtaaggcaaatacatcggaaagcaaagtataaaaaccttctataagcaagtttccttggaaatctccccaacgatgatacaaatctcccgatatgctcagactttgtgatttttcttctgtcaagtcttttgccagttcaatcatagacactgtcccacctacattttctatatgtaaatcttcatcaaaagcctgaggcgcacggaatccgaaagaataactggcacgcagattcatattctcagtcggattgtaacgaagattagcacgcggactaaagatcacatgatccaccatattatgtttgtccaaacgtcctccaagtaaaaaactccattgcttattcttccattcattttggaaaaatgcactggctatacggacttcttgtttggtataacggttatatccccacatatcatccgtcaagttatcctggttatattccaaacctccggtaaaatcggcaggcataaaaaagcatttatcaaaactatagatatactgcgatcctgtgacccaggtaaaatccgtagtcgcgccatacgcattcacatcttgtcctccaccataataactgtcgcgtcctgtatgctgtgcagaggcatatacactcagccgctgtttctcatcaggagagaaataatcaaatttcgctcccccgctattgatagtatgctgcaattgttcggctatatccgcttcatggggaggacggttcaacttattcccgccacgacggaactcactgagatgatgatattcaaaagtcagttttgaatacgtgcttgttttaataaaagaacgaaaacctactgtctgatttttcagttttggcaattcggtatatccatctccgtcactgtcataaccgcttctttctctgttctgtccaaaaatatacaatcctgctttatgattatcagtcactaatgaagcgttcagtgtcgtattattgtcccaagaagaagtacctcctatacctgtcagggtatgtgtcaattgtcctgaattccgtacaggctccttagtgataatattaatggttcccgcaatggctgaagagccgaacaatgccgaacctcctccgcgcatcacttctacacgctcaatcatattggcaggtatctgttccaatccatatacaccggccaaagcactgaatataggacgcgagtcgatcaatatctgcgtataagggccatccaacccattgatacgtacttgttggaaaccacagttctgacaattattttccacacgcactccgggttggaaattcagcccttgcgacaatgtagaggaatttgtattttcaaacactttcacatccattacgtttaccaaagtaggtgccatacggcgggtggtctcactacgattggcagacaccactactccatccaacgctatcagatcctcttctatctcgaagttctcctccaaagttttcccttttcttaaagttactttccggctgactgtcttataaccgacagcacttacctccatggtaaattctccttcaggcagatttttaagaaaatagtgtccactggcgtcagtcatagtccctatggtagttcctttcagcgatacactgataaaagagaggtgttctttcgtactcttatctaatacatgtcctataatatttgcatcagacttattcaattcattggcgtgcacagccagtgacgagagtaaaaagcatactactcccatcaagaaaaaaatgtatttcttcatgtgttcttgttctgtttatttatgaataaaaggatagcggtcagaagaacgaatccgtatgcacataatggcaacggaaaacattctactaacgtgaaaattctttatttaataaacaacaggaggcgcacgcaaataaatgccgcaacaagcttttgccggtttaatgtgttctacaatcggagtagccagcaagcatagcaatactaataagattgatgcggaaaatggtgtgagcaaactatcggaagcagcgaaagaagagaggaagaaaattgtttccaattccacctccgtatgttgatgctcccctttaaacggatgcgaatgtacgatgattaccccatttaccacatgcgagtgagtaaaaagggtgatccctcccaaataggcaataaatatcagcggaaggaagagctttagaatatgaatcaaatatttcttcatcgtaacggggacaaagatagaactatttccaatagcagtcaatacctattaatagtagttatggatttaaaaccggaaacaagcctctcatcctgccaaagaaaatgcccattcgtccttagttgtcccttccttatatattaagaagcctataaatcagtatcaaacatcacaaaaatgtttcttttattttcagaatcccaaaagattttaaaataaaaccctacctttgcatcagatttggtgatgtaagtactttccgtatttgcataaaagggaattcggttatagaatccgaagcagtgcccgctactgtgaagcccgtccaatgaaaagcaactctcgccatgccactgtttcctttgtaagaaatgggaaggcgcttttcagggtgaagccaggaaacctgccaagtctgaacatagataattcacgctttcccggggccaggaaagctaattattaattcttaaattatttcgatgaaaaagaaatgtttactgacagccttattcggcagcatggtggtgtgtgcatccgcccagatatcgttaagtggaaaagtagtggatgcccgtacaggaaagccggtggaaggcgctaacgtacgtttggaacaaactacaataggatgtgctaccaatcctaaaggagaatttttgttgaaagacatcaaagaggggacgtataccctgcgtaccagttgcctgaattatgctcctgttactcagaaagtcagtcaaagtcaaaaagaaatggtgataaggctgaaaggtaccactttcaacatggatcaggtagtggtaaccggaaccggaactcaccacaagctgaaagacagccctgtacccgtagaggtcatttcccaacgtgacctgcaaaatgccaatccatccagtttccaggatgctttggtgaaactggttccctctatctcggtgcaaaccaccgctatgggaacaaccctatacgtaaacggactgcctgataaatacctcctcgtattaattaacggtaaaaaagtagccggagatatttcggggtctatagattacgaccggatcaatatggatgccgtaaaacgtattgaagtattaaaaggagcatcttccgccctttatggcagtgacgccatcgcaggagtaatcaatatcattaccgatgatcctaaatctgcattgaatgtatcttccaatacccgtgtaagttctcacggacgaatttcagaatcagtcaacgcagacgccaatgatggaaaattatccgcacacttgaactataattaccgcacttcggatggatggcaactgaatccgtatgaggaaagcaagggagaactggtggaaaccacaaagaaaccggtctataaaaatcattcgcataatgtgagccaaaccttgagctacgcagccacagagcgtttaagtcttcatttaaacggtaatctttttatcagcgaaaacgaccgtaccggagcttacgattacaacaaccggcatcagtcctatacagtgggtggaacagccaaatatctgttggctaagcgggcttcatatatagaagggaatataagcaccaccaatttccgttctttttatgactatataaatgatgcaaaaacgcataaaaccggtgatgaagtcctcagtaaagaccagacttacaccaatgccaatctaaaaggtgtattcaagactcacgagaacaatacactttttaccggactggactatgtattcgaaggcttggagccgactgaaaccagcaagatgctgaataatgaataccaaagtgtttatacactggcagcatacgtacaggacgaagtaaaactactggatgcaatcagcgtagtggcaggtatacggtatgcctataatgaaaagtttaaaagccagttcacgcccaaactatccttgatgtaccaatattcaggactgaatgtacgtgcatcctacgctgccggattccgttcacctaccttgcaacaaatgtatgccgtttctgaaagccgtggacaaatcactgtcggagaccctggcctggacccggaaaagagcaatttctataatttgaatatagaatacaatcatcgcttgttctccattgccgcttccatttatcagaatgacctgaaagacaagatcgaagcggaagatataggaacaacacccgaagatattgaaaacggtatcactcgcagacgccagtaccgcaatatagaaaaggcacgtgtgaaaggctttgacataggtttttcagtccgtcccttcacaggcttcatgttcggagcaaactatatttacacggacgggcgcaaccgtacggaagacatccgtttggaaagaacagtacgtcactcgggtaatttcaatgccagttggcgaaaaacatggaatgattatacattcaatattgcaatcaacggacgctatcaaggtacacgctggtctaaaacttacggtgacgcccccgcccaccagctttgggatatcaacacacgccattcattcaatttaaaatctgttgctctggaacccgccgtcggagttgaaaacattttcaattacacagatgaccgtccttataacagtaattatgcaactctgacaccgggacgctctttctatgtcagtctgctggttcgtttcaagcaataaaactatttttagcatggcttctaaaaccagacttgtctatctgctcataacaactttctgcctggcaggttgcagctataaaagccgcaacccagtgagtgaaaacgggctatcttccgcagataccatacaaacagccttggccccccgttatgccaaaggcttcaaaataactgttcgtccggatggagtaaagcttctgtccatctcggagccgaacaataaccatgcaatacccgaacttttcgccttagttcctaaaggaacaaaagccgagatacccgatggctataccgttattccgactccgacagacagagtaatctgcatgaccacgccgcaactggcaggttttaccggtctgaatgcttatgacaaagtggtagcgacaagtaccacccgccggatgcagaataaggaatggcttgcccgattaaaagacggacgggtgaaaaagataggaatggaaggaaactttgatacggaaattatcattgcatcccaacccgatatcattttcgtatctcccaaccgccggggagggtatgaagtgatgaaagagctgaacatccctctggtcccctattgggcattcaaggaaacatcaccattggggctgtccgaatggatcaaggtagcaggtatgtttatcggtaaagaggaagaggcatgccaattatttgcacaaatggaacaacgctataacctattgaaagccaaagtttccaatgtaaaacagcgtcccagtgtattcagtggagaaatgagaagaggtacctggtatgtacccggaggacaaagtttctatgcccgcttgttcgccgacgcaggggccgattactttatgaaggataatcctgaaacaggaggtgtactcatggattttgaaaccgtatacgccaaaggatataatgccggctactggagagtgatgaatggttataaaggagagttctcttatgaagcattaaaagcttccaatccacaatatgctgattttcgggcttttaaagaaaagaaagttatttattgcaatctggaatggatacctttgtatgagaatcttcccctctcacccgatgttcttctgagtgacatgataaaagcttttcacccggaactacttcccgattatcatcctgtgttttattcgcttctggaaaaagaataagtattccagttctcatacttatggtaacaaacagttttaatccggcttatctatttcactattacaaaaatggctgaagtcttagacttcagccattccgtaaaacggttatcctaatataccggcaatatcctccgccatctgcttgtcagtcaacctgttggctttcatcagctcatccagattatagcggtctgcaaattctttacgaagtccgtaattcagcactcgcatttcagaattaccataataacgcgctatcttctcgccgaatcctccatccagcaccccgtcttccaacgttacgacaatacgatgccccactttcaactcttccagcatcggttcgtcaagccctgttatgtaacggggattaatcaaagtagcctcaacacccgactcttcccggagcttattcttcaaagcctgtcccaaatcatagaaagcacccaatgcaagaatagcgacagtttctcccctggctgtcattttgtagcggtttaactcgctataatccgtgtcaaactcttccttacgatgcaccactgccgctcccggcacacggatagcaacgggatattccgtctggcggacagcccattccaacatagcaaaatactcttcggaacacgtaggagccagataaaccatattcgggatgttgctgataagcggaatatcgaagaaacccagatgagtcacatcgttcattccagctactgtccccataaacacagtgatcaccgccggatttccattgatacacaaatcctgagacaactggtcatagcaacgctggacaaaagtactgtaaaccccgtacaccggacgtccgccaccggcagcgatacccgatgccaatgccacggcatgttcctcggcaatacctacatccacaaactgacgccctgcctgtttccggcgttcaggagtaaaacctatcacagtaggagtacccgagctgatggcaacaaccgtgtggtcctccttcatcttctccaacaaaaacttcccggtcaggctatggtaatcctccataccgctgcaatccaccttcggcttacccgtttccagatcgaaaggcatctcccaatgaaattcctcccggtcggcttctgccggagcgtatccctttcctttctgtgtgtgaatatgaaccactgtgggacgtgatgtatctttcaccttggcaaaagccgcaaccaaagacggaatatcattcccctctcccacataaagataatccaaccccagagaacggaagaaattacaggacgaccgtccctccgtgtcgcgcagttctttcaggttctgatagagcccgccgtggttttcggcaatggacatttcattatcattaaccactataataaggttggtccccatttctcccgcattgctcagaccttcataagcttctccgccgctgagcgagccatcccctatcacggcaatgatattctcgtgtccgcctttcagatctctggctttggcaagaccgcaagccagactgacagaggtggaagtatggccgatagtgaaaaaatcgtgcccgctttcccggggattggtgtatccggacaccacatcataatcctccggattcaggaaagcatccttacgcccggtcagcatcttatgtgtataactttgatgggatacatcatataccatcttatccgtcggtgaattgaatacatagtgcaatgctattgtagcctccaccattcccagattaggtcccacatgccctccgtgagcacttaacttggtcaataatgcattgcggacttcaccggccaactgtcttaactgttccgcagaaaaccgttttatgtcttgcggagaatttacttgttcaatatacatcgttctacctatttaaatgatttcatctgttgtcttacttcattccgatgcgaacaaagccgctttcatttcacaatgcaaagataagccagaccccattcattctttgtagataaattacagatagaattaccatttttacagaaaggaactgtatcacaaaaacatggtattgcaacccggttatcaattctgcgagagccggtaatcactgggggcgacacctgttattttcttgaaaagcacactgaagcactgcacattaggatagcctaacttccgtgccacagcagcaggcgtatgaccgtcctgcaacaacatgtgcctggctatatccagccgcttcagttgaaaatattcctccaaagtcttgccggtttcaaatctcagcagatcattgaagtaagcgacagacaaatcaagctctcccgccatatagccggatgtgggcaacttgccgccttgcaatcttccggatgcgatatattccacaaacaaacgttccatgttttccaaaagagccttgttcttattctcacgggtaataaactgacgttcataataccgggtgcaataatccaacagaagttctatatgccgggaaagaataatactgctatgagtatcaatgggatgatgcaactcatcctctatattcgagaggcaacacgtcactttctctgtctcacgctgtgaaagatgcagcgcttcttccttgcgataatggaaaaaggtataatttttaatatgattcttcagtgaggtgcggaacaacaggtcaggatgaaatgccaaaagatatcctttatccggcaacgtattctccttactcatacgaaagatctcgccgggagtgagaaacaccatggtagcattggagtaatcataatatttccgtccgcagcagcaacaaccgctcggacaatcctcaatcagcaagacagcatagaattcaaatttcaccgcatcctcttccaatgaaggattctccagattgatgatgctcacctgcggatgcaatgtcttgcaacccagacagcgattacattcatatacagtcctcaagtccaacatagtctctttcattgcttgttaaaacaggatactataaaggaaggttttgtgtacgatattcattcggtgtacagcccacacgcttcttgaacaaccggcagaaatgctgcggatattgaaatcccagtgaataagctaccctgctgacggtttctctcctgtcggacatccgttctttcgccagttctatcactttttcctgaatatattcctgtggggtcttgccggtttccttcttgaacatatccccgaagtagttggatgaaaggcacagtttgtcagcaaagtatttcacggtaggcaatccgtcacgctcggcaagttcgccctcaaaataatcgtcaagcaacccttcaaagcgtgtcaacacatcacggttcgaatgactgcgggtggcgaactgacgttcataaaaacgcatacagtaattaagaagcagttctatatagtttaccagcaaggtcttactatgcttgtccaccccccgttccagttccatacggataatcttcaggcaatctgtcataatattgcgctcatcttccgaaaggtgcagcgcctcgctcacttcatacgaaaagaaagtatatttctttattgtttttccaagcgtagtcccccgtaacaaatccggatgaaaaagaattccaagcacattcaactgcacacggtcggtggtcaatgtggtttccgttgtttgtcccggagcaaaacatactacggttccttcctgatagtcataactccgacgcccgtacttgatatcacaagctttctccaatttcagataaagtgcataaacaccatagttccagtgcacatagtccatctgccgggtagccttgttcaaatcaatgacactgaccaacggattcagtgtttcaagtccgtatagactgttatattggtccacactgtctaaatttaatattttatccatcattctaacttgtttaatgcctgctaaaatatagctttttcagttatttgaataatacggttacaaaaataggaggttatccggacaaggttataaccccaattacggattattttaccttagttactgaatcttatcccatccgggaataaaaagaagagccggaatgttcctgccggactacccctccatattatatggcagaatctgtaattaaggttaggatacccgtaatttatctacaaagaacccaagcaaatatacctaaatttgcaacatcataaaatattaaaacgtatatttgaaccaaataacatcaatcgtatgaaaagactcggattatttatgacggtaatcatgatactgtgtattaccgtaaacgcacagaaacagagcaacagaacattagtagcttacttctcggcaacaggtacaacagagaaagccgccaaacaggtagcggaggtgacaggcggagccctctacgaaatacaacctgcaaagaaatatacctccgccgacctggactggcacaacaaatcctcgcgcagcagtgtggaaatggcagacgccctgtcacgtcccgcattgcgttcccagcccaaaaacttggcaacctatgataccatctatatcggtttccccatttggtggaacctggctccaagaatcatcaacagttttatagaaaaaggtgatttcacaggcaagatcctcattccattcgctacctcgggtggaagccgcatttctaacgccgaacaagaattaaagaaagcctatcccaacctgaactggcagaaaggcaggctgatgaacggtgctaccaaagaagagattaaacaatggactaaaaaataaatagtatgagaaagaatttaggagcaaaaccttttacctatccgcaaccggtatttatcatcgccgcatacgatgaaaacggtattcccaatgccatgaatgcggcttggggcggtatcagtgaaatgaatgaaatcagtatttgtatcagtgaaggtcacaagacaacggccaacattctgaaacgcaaagcattcacagtgagcatggcagaagccgggcaaatcatcgcttgcgattatgtaggcattgtttcgggcaacaaggttccggacaaattcgcccgtgcgggattccatgccacccggtcggagtttgtggatgccccgctgattgatgaattatccgtagctgtggaatgcaagctgaaggattacaatcccgaaacctgtatcctgcgcggcgaaatagtcaatgtaagtgtagatgaacgtgcactggataagaatggaaaagtggatgcctccaaagttattcccgtcatcttcgacccgttcaataatgattatctgaaagtaggagaaaaagtgggtaatgctttctcggatggcaaggccttaaaataacggaatccgatatgatacaaacagcggaggcagttttttccatacaggacaaactccggcaaaccgattcctaagctctcacatctttgtgactaagcctttttgaacgtatgatttctatctcccaagcttgcggagttaaatccatagcctttggagttatctccataagctttggagttaactccaaaggctatggagatagaaatcataggtttaaaaaggcttaagtgcaggaataaaaaggcttaaccatccccatagtgccccccaatgattccgccaacatttcttcttcaaacttatctatcagcaaatctctattatttttagttcctgtttaaattttcatcggcaatatcctctgctttgccggcttcccgattacggcacattctgaatgatgccttattcattattaagcctgataaaaaaagatttctataattatagcaagaaaagacttgtttctcccgttcaaataagtaactttgtacggttaagtttggctcctcatgccagctatcactttcagtccgtctatgtaaagcctgaaagcaagatgaaggaactactgtcaggacagcgtattgtcattcagaggattatattgactgaaagcactgaaggaaacttttaaattagatttccggagaggaataattatataataaaaaatgaaaaaggcccaattaatcgtagccggcattggtcccggctcacctgaagatatgactcccgctgtaatacaagcagtaaaaaacagcgatgtagtaatcggctataaatactatttccagtttatcaagccctacctggaaccgggcaccgaatgtatagacaccggaatgaaacgtgaaaaagcacgtgccgaacaggctttcgagctggcggaacaaggaaagactgtatgcgttatcagctcgggagatgccggaatttatggcatggctccgctggtttacgaaatgaaacgcgagcgtggcagccgggtagaaatagaagtattgccgggtatcagtgcttttcagaaagcggcttccctgttaggagcacccatcggtcacgatttctgtgtgatttctctctccgacctcatgacgccatgggaccggattgaaaaacgcatccatgcagccgcaacggcagatttcgtaacggcagtctataatcccaaaagcgaagggcggtattggcaactctacagattaaaagaaatttttctgaaagagcgtgaagccgaaaccccggtaggctttgtgcgtcaggccggacgtaaggaagaaactgtgacaatcaccactttgcaagaattcgatcccgaacaggtggatatgtttacagtggtattgattggcaactcccagtcttattatcgggaagggaaattaatcactccgcgtggttattaccgggaaaagaccaccgatgcgacaggaatcggtcaggaaattatgataaacagtttccgtactattgagaaagaattgaaaaataaaaatattccttcggatcacaaatgggcgttactgcatgccatccataccacagccgatttcgagatggaaaacatattgcatgtagatcctcttgccgtagaatgtctgtataaaatattgaatgaaggaaaagtacgtacaattattacggatgtgacgatggctgccgcgggcatccgtaaaggtgctttggaacggatgggcatcggggtgaaatgctatctgggtgacgaacgcgcggcagcattggcaaaagaaaaaggaatcacccgtacacaggccggtatacgtatggcagcagaggaacatccggaagctttatatgtattcggtaatgcccctacagcattgatggaactgtgtgacctgatacggaaagaaaaagcgcatccatgcggtatcatcgctgccccggtgggctttgtgcacgtttgcgaaagcaaacacatggtgaaacctttcagccacatccccaaactgatagtagaaggacgcaaagggggaagcaatctggcagcgactctggtaaatgccatccttacttttgatgatgcggaacaactgaaaccgggaagagatgtataagtccatgcaaacattctatataataggtataagcgatgaccggaatcaatttctttctcctgaaatccggaacttggtttctcaagggaaagtcttctcaggaggaaaacgtcatcatgaattggtacacgcttatttgccggaagatgccgtatggatagacatcaccgtcccgctggatgcggtattctcccgttacgaggaacatcccgaaataattgttttcgcttcaggcgacccgttgtttttcggcttcgccaataccgtcatgagaaaactcccgtcggcaaagattatcttattccccaccttcaactcgctgcaaatgctggcacaccgtatattgctcccctatcaggagatgcagaccttgtcgctgaccggacgtccttgggatgcattcgactctgctttaatcagaggagataaactgataggcgtgttgaccgaccgggaaaagacacctgccaccattgccgcccggatgctggagtatggatatgacaactaccgcatgaccgtgggggaagcattaggcaatggcgaggaagaatctgtacgtacattctctttagaggaagcctcccaatctgctttccgctttcccaattgcctgatactgcaaagaaacaaggtgcatccccgtccgttcggaattcccgaaagtgaatttcatttgttgaacggacgcaacaaaatgattaccaaaatgcctgtccgcttgcttactctcagtatgctgacattaagggaaaagaaatcattctgggacatcggtttctgcaccggttccgtttccatagaagccaaactccaatttccggagctgaaagtgacagcattcgaacagcgtacggaaggtaaagagttaatggaacgcaacagtcgtaaattcggcacgcccggcattacaaccgtcatgggtgattttctggaaacggaactcggcgggcttcccgcccccgatgccgtatttataggtggtcatggaggaaaaatgatagagattctacaaaaaatcaaagaagtgctgttgcctgacggagtcattgtattcaattcggtttcggaagagagcaaggccctgttcacaaaaggtataacacaaatcaacaagaaggtaacacagtgtacccgtattgctgtggatacctttaatccgatagagataatgagagcggaataaatgatttaaaacagataacaaatgaaagcaatcatactgatatcagaagccagcctgccgttggcaaaaacactacaaagagagttgccggatacccttatttataccaaaaacgaatgcgaaggctgtatttccatcacatcctgccatcggttcatagaggagcatttcaatgacttcgacagcatcatctttattggtgccatgggaatctgtgtacgcagcattgcaggatgcataaaaaacaaatataaagatccggcagtggtctgtgtggacagtacagggcgctttgtcatttcagtactttccgggcatgtggggggagccaatgaactgacccgccatattgccgccattacaggaggagaagctgtgattaccacccaaagtgacaatgccgggttatgggcactggatacgctagctgaaaaatatgactggaaaataactgttcctcatgcagaaatgaacagactggtcacactttttgtcaaccgggaaccaacggtgctgctgctcgatataaaggataaaggtacggagtatctggaacgcacacttcccgcacacgtaaaagtgttctatcatttcgaagacataccccaatcggaattcaagttgattattgctgttacaccttatatatatagtgcggagattcccatgctctgcttccatcccgctgtcctccacttgggaataggttgccggaaacaatgcgatccttcgggcattgcggaatacatagaagccgtgatgcacagacaaggtttgtgtccgttctctctcgcctccctcaataccatcgaactgaaaaaagacgagcctctgctggaaatcctccaccggcgatgggccgatacggaaacccatatttatcctgcggaagaactgaaagatatcacagtcccccatccgtctgaaaaagcattcgaagtgacaggcgtctatggagtggccgaaagcacggccttgaaaagcagcggtgaaggaacacttgtattggaaaaacaaaagggcatgctgacagaaggaaatcacttcacttttgccatagccgtcagtgcgacagccatgcgtggcggacatatagagatcgtgggtgcaggtcccggtgatcccgaactgatttcggtacgcggaaaacgaatgttggagaaagcggaccttgttctgtatgccggaagtcttgttccccgcgaattgaccttttatgctaaagaaggagcgactgtacgcagttccgccggtatggatttggaggaacagttcgccttgatgaaaaagttttatgataaaggattgtttattgtacgcttgcacacgggagacccttgcatttatggagccatccaggaacaaatggctttcttcgaccgctacaagatgagttatcatatcactccggggatctcctcgttccaagcggctgcggcagcattgaggtcacagtttaccatccccgaaaaagtacaaagtataatcctcacccgtggggaaggccgtactccgatgcccgaaaaagaacaattacataaattggcgcaatcgcaaagtacaatgtgcatttatttaagtgcgggcattgtggaacaggtacaggaagagctgatgcaggcataccctcccgaaactccggttgccgcctgttataagctgacttggaaagaagaaaagatttatcgcggagagttgaaggatttggctaagatagtacgtgacaataacctgacgctgactaccttattggtagtaggcgaagcaatagacaaccggaaaggtctgtcccgactctatgcgcacgagttcaaacacttgttcagaaagtaaaaaaagaatcattcacatccagcctatgatactgattttaggaggaaccaccgaaggacgcaccgccgtgaaagttgccgatgaagccggaaagccctacttctactctaccaaaggagaatggcaggagatacaatgcaagcacggcatccgtatcaccggaggaatgaacacggagaaaatggaaagtttctgccgccaaaatgacatccgtttattggtggatgctgcccacccgtttgcctcccaactccaccggactgtggatgaaacaagccggacactacatcttcctgtcatacgttttgaaaggaagtatcctccacgcaccgaaaacatcatctggtgtgaagactatacagatgccatttaccggttagagaaagcaggaaccgatcatctgctggcactgaccggagtacagaccatcgggaagttacgcccttattgggagaaacatacctgttggttccgcgtactggaacgggaaacttccatcacattagcccaagaacaaggcttcccgaaagaaaatctggtattctatcatgccggagaatccgaagctcttttattagagacactacatccacaagccattctgaccaaggaaagcggagaatccggaggattttcggagaaagtgaaagcggcacaggctgcaaaaatcccggtctttgctataaaacgcccttcccttccccggcatttcatgatcgttaccggtgaatatggattgagaaaacagatagaaaagaacatccctgctttttacccgttgagaagcggctataccacaggggcctgcgctactgcagctgcaaaagcagcattgacggctctgattttaggggaagaacagaaaatgatatccttccgccttcccgatgacgaggaaatgaccttaccggtatcccatacagaaatagaaaagaacagtgccacctgcaccgttgttaaagatgcgggagatgatccggatgtcactcacggcgcatccattgtggtaacggtaagttttagcaatcacccggacatccgtttcctgcaaggtgaaggagtgggacgagtcacccttccggggctgggattggaaatcggggaacccgccatcaatcgcatcccccgacaaatgataatgaaagaattatcggcgctttatgataaagggctggatattaccatttccgttcccggaggaaaagagttggcacaacgtactttcaatcctaaactaggaattgtggatggcatttccataattggaacttcgggcattgtccgtcctttttcttcagaagcttttgtcgaggctatccgcagggaagtggaggtttgtgtggctgtgggctcatccagactcatcattaattcgggagcaaaaagcgaacgttttgtgaagaaggagtatccggggttacctgctcaggcttttgtacattatggaaattttatcggggagacactcaagatagctgccaagcttaaggttccattggttactttaggcattatgataggcaaagcggtgaaactggccgaaggaaatctggacacacatagtaagaaagtagtgatgaataaagaattcctaaaacaagtggcaatggaagccggatgctctccggatgttgaaagcatgatagaaaggttgacattagcccgtgaattatggacattgctgtctgaagaagactgcggaaagttctttccgtgtttgttggaacattgttttgcacattgcgtccccttgttgcccgaaggaaaattaacaatcctcttgattgatgaagaagggaatattcctttcaggatacaataactgattatttaaacgctgctaaacggaagctaatatagcagtgacttgttctaacaattcctctatggtatctacctttatcgtcctcccggctaccgggtggataatatatccattggtagtcatatctcccgtttcaatataaaaatcggactcaacacgccggcttgccagaataccattccgctgcaaagctttccgtaccatcgcatacttattcccatgtcccaccagacggacttctttttcaaactcattgtcaatgcggaacagtccggtttccatatcaaaaacaatacccttacgagagaaaaaattactcaggcatccgtctatggaaagatcttcaggagttcctatagtcactccattggctttatccatcagccaaatcttatcagcaatctgcaaagctaactctaaatcatgggtggaaagaaaaatcgtcttgttggtagaacgtgacaaatgatgaagcaattgcataatctccactttactggggaaatcaagaaaagcagtcggctcatccagaaaaatcaccggggtttcctgtgccaacgcctttgcgatcattactttctgacgctcaccgtcactcaaagtatgtaccatccggtatttcaaatcctcaatccttaccaacgcaatggcatcgtttactgttttcttgtcctccttgcttaaatttccccagaaaccggtataaggactgcgccccatacccaccagttcttctacggtcatgttccgcaggctgcatttttcggtcaataccactccgataactgtcgccaactgtttatcggtgtaatccgtcagtttctttcccattatttctatctctcctcctacagccggctgaaaggcagacaaagtacgcaataaagtagatttccctactccattcgcacccaaaagacaagtcagttccccactgcggatagtagcatcaatgtccttcgctacaatcttggtcccccccttaccggggtaaccggtagtcagtttccgaatatgtatagtttcttgattcatcattactcattcatttcattgcgacgtttattgaataaaaccgacatcactaccggagcgcctaccaaagccgtcaccgaatttaccggcaatgcaccttcgaaaccgggcatacgggcaatcaaattacataccaatgccaatgacgcacctgccagtaaagaagcaggcatcagaatacgatgatcggatgtgcggaacattcccctgcaaagatgcggaacggccagccccagaaaaataatcggaccgcaatatgcggtaacaatagctaccaatactcccgaacaagtaatgacaagcagacgggcacgttttatattcaatccgagattccgtgcgtatgcatctcccagcaacaaaagattcaatgttttgacaagcaggaaggaaagtggcaacaataccaccatgatacatataaataaagtcatctgatctcccgatacacgggcaaaacttcccagcccccaaatgacatatgcacgaatatcctcctccacactgaaaaatttcagcacaccgatcaccgcattggctatataaccaatcatcacaccgataatcaacaaagtaacattgccccttactttttgggaaacgaaaacaataagtgccataatggaaagtgaacctgcaatagctgctatggtaagggctatttcccccataaagcctagcttgctcaaagcaacgccacccaaactacccgaaagaagcaccacaaaagcaactcccatactggctcccgaactgatgcccagtaccgacggaccggccaaaggattgcgaaaaacagtctgcatctgtaaaccgctgacagagagccccgcccccgccaccaatgcggtaagcgcctgtggtacccgtgatttccaaataatattttgccagataacagactcattccctgttccccaaaggatattccacacagcacgaagcggtatggaaacagaacctaataccagattcaggaagaaaaacagaaaaatagaagccataattaacagcatataaaatgcaacaggtcgtttcatatactatttttctatttaagcaattcataatatcccggttggtggccggacaaaagctgcggatgaaagatttgaatcaaatctgccaaaacaacttccggttctgtaggcatactctcataaaaaggtttttcacgcatgttacaataaatcacccctttctctttgtatgctttaaaatcaacataacgggcatcttcttctttcaacgtgttataagaaaattttccttgatagctattcacaatacgccaataatcggcaccggccgcttggctgtagattgtttcaaaatcgagggtgacccctccagaccgttcatcgtctttcaaaaaataatcggcaccggcatctttaaacaattgtgcgagaaaactcctccctcctacagcataccaattgccgccccgcaattccccactgaatactaccgggcgttttgtcacccggccggtcagttccttcagctcgttatatcttttcttaatagcggcaaactgctcattagctttatcttcttttcccaataacaagcccacaaactttatccattcagcctgtcccaaaggagtcatttccttatatcccaaatgcggcatcaaaggaatgcctacctctttcaaagcatcgtatccccctcgtttaaaaggagagatcaaaatcaaatccgggtttacactcataatcacctcattatcgaaattcccttcaatacctatcttatgaatgcttccttctttcaaacgatcatttattttcttgttaaacaaatggcgtgtactggtgatacccaccactgcatccagctcttccaacttgataaaattggaaagttgcagggaagtcatgcagataacgcttcgtatgggagtttcaataactgtataatccgcaggtatgttttccgcttccacacctcttggcaccaaagcataatgaaaagactgactttctttattctgagggtcctgaatgtcaagcagacaagcctgatccgtataagttattttaaacccttgggcatattccggaataatcttcacaatagaagaatctgtcaatgtcttatgttccaaattcccggaaccctgtttgtgcttactttggcaggctgtaacagtcaataataacaagagccccgaagccaatattagttttttcatgttcttttctgtttttcagccaacaaaggtaatcaattctcttgctttatacagaatttttcagcacttttgcgtgcttaaaaactgtaaatacccacaaaagatgagtcatccgatctattttgtttctttaggacccggtgatgccgaactgattacattaaaatcattgcatgctttacaacaagcagacataatatattgtccatcaacggttcgggaaccagataaaattttgtcacgtgccgccaccctgttacataagctagacatcaaaggagatatacacctattctcactcccgatgagcaaagacaggacaaaagcaatcaaagtctatcggcaacttttcgaaaaaatgaggctggaacaaaaagcaggaaaacggttggcggtagcagtagaaggcgatgcgggaatttacgcctccgttcactatgtactggatctcctcgaagaaaatggaatccccgtagagcaacttcccggtattccttcattcatcgctgcggaagctgccgcaaaactacatctcatcagccaaaaagaaagactggtcattattccgggcaatattacttcggatgaactggacatgtatcttagccatcatcatgtgccggttatcatgaaattatctcaatgtgcggatatagtacaggattacatggagtcccacccccaatacagttatcattattttgaaaatatatcgacagccgaagaatatcattcttcccatcaggcggaactgaaaagaagagtatttccttatttttccctaatgatcatctttaacgaacagatacggaaggacaatagttcaaaatagcgttcagaataccttcaatatttacatcatctttcttgataactaaaaaattgtggtacattccttctttccggtaacggatcacaatcgacttgagtttaccagactttgtgtactccttttctatctctgtgatgttttgcaaaggaaaaacatgctgaggcttcatccctcttatagctaaggcaaaagaatcaggagtaatagtataaacagacaataaccttacccccattatcagcagagaaggagtcaagaccagcaaagatgcatatcttccatgcgctataaaaaggcatgtacacgccaccaacataatagcaataaccgtccaaacccataaaggatagctgggtctgaattcttgtttctccataggccacatctattttgtatagttacaaaaatagggagattcagtttaataacccaaatctccctcaaggaatttataaactatttctaacaattaatctagagaataccctttactgtttccagcatacccttttcttgaatagagtcaagatcagctttcacagctgcggtcaaacccggaatgttgttcaagttctcaccccaaatagattctgcagccaacacgccttccgccactttctgagtgcagcctgtagcccaaagttctttcagcagattcatgatttcaggagcatcgttcggaacaatctcagcaccgtcagcacgaacaccacctttataataagtgatgatagccgccagtcccaataccaagcctttaggcaactcacccttacgttccagataaactttcaaacccgggaggtcgcgagtctcatatttaggaaatgaattcagcatgatagaagtcacctggtgatcaacaaacggattgttgaaacgctccaaaacatcttccgcaaacttcttcaattcttctttcggcaggttcagggtttccatcaactcatcgaacataactttatgaatgtatttacctaccacttcatgctcgcaagcctcgcgcacaatgttgattccagacagataagctaccggagacagcactgtgtgaggaccgttcaacaaagtaacttttctttcgtgataaggagcttcagacggaacaaacaatacattcaaaccagccttgtcggcagggaattccttggcgatctcctgcggagcttcaattacccacaaatggaagatttctgcctgtaccaccagattgtcatcatactgcaatttttctttaatagcagcgatatctttgcgggggaatcccggtacaatacggtctaccaaagtagcgtagacaccacaagcttcctcaaaccattgcttgaagtcttcacccaggttccacaattcaatatattgatagatggtttctttcagtttatgaccgttcaggaaaatcaattcgcaagggaagattattaaacctttgctcttatcgccattgaacgttttataacggtgatacaacaactgagtcagtttgcccggatatgatgaagcaggggcatcatccagcttgcaggcaggatcaaaagcgataccggcctctgtcgtattagagataacaaaacgcatttccggctgttccgccaatttcataaattcatcattctgagaataaggattcaaagcacggctgatcacatcaatttttgtcaggctgtttaccacctgtcccttatccaaaccttgcaagtttacatgatacagacaatcttgtgcgttcaacatgtcaaccatgcctttttcaataggttgaaccaccaccacactgctgttgaaatcagttttttcgttcatgttgtaaataatccaatccacaaacgcacgaagaaagttaccctcaccaaattgaatgattctttcgggacgttgagtctttgctgctgtctccttgtttaatgctttcatatttttaat

SEQ ID NO: 14463 - DNA, 36173 bp, Unknown
  gut microbiota DNA sequence
ggttgcgttcggtgttcactttgaaggaagcctctgtttcttccctcaagggagatttgtaccaaaggttgataccctgctgtttgacgggtgaataccccaggctgtgcaggtagtcagccagattgatttgttttgcagtctcgatgttcataaggaaatcgtttttagtgagtgctttgattatttctctttttgcccgcaactcttaaaagtatgcggtcagtacaatcacttcactaaactcctaatatatagacccccggaataaagtgaagtgatttgtctgtttctgaaatcacttcactaaattgtcgtatatataggatacgggaataaagtgaagcgattttcgggattgtcggctaatagtggtaatcgggcttgaaggaatacttcctgccgttttcctgcactatcatccgtttgttgcgcagcatggtgataagcgccactgcattctggtgattcagtctaaccccttctgccagataagtcctgattaaggtgtcttccagctccttgtagccgtattcctctttcagtgcaaaagcggcttccagtgcggcacggtgctgcggttctgaaatatccttgtaagggtcaaacttttccaccgagggtcttcccggcttccttgcttccggcttgtagccttccgcaagttcgggcagggctctgtcgttgatgcagaatgcaaaaggctcgaaatccatcgcccggatgtgcatggcggaaacatggctgatgtcgctgttccccttgtccttttccaccagcaggactgtttccgccttgttgttcagttccgtaccaatgtgccctcttgcgttctcatcccccttgttctgatgcagtatcgtatggatatgaatctgcctgtcgtccgtccactgcatcagcttggatatgatgcgggtggattcaccggggctgttgatgtcgtacaccatatcccggatgccgtctatgatgaccagcccaatatccggtgagtggtagatagcctgttctacaatgctgatgcgctgttccgggatgtattttctcaaagcgagaaactccagataaccgctgtccctgtcatcgggcaatcctgccatccgcaggatccgcttcatcactttcaggcagtggtaggggctttgctccgtatctatataaagcactttccgcttttcctcgggcagttcagccgcatatcgtaacacggtaccgttcttcaatgcagcggctacgatagccgatacattgaaggttttcttgctcttggctttgccgatggatgcgctgaaattgcccagcgtcccgatgacagagccgtgtactttcagaatttcgggggctttttcgtagcatcttgacagacttagccgggattcctgccagaggataacggcttgttcgggtgatatttcttttatatagtccataatcacctcctttatctgcgtcctccggttttcttgccagccagttccagcgccagttccgcatccacgataatcttgcgtccaatctgggtaatggctttgtctatctttccgcttttcttgatgcggttggctgtgggcaggctgcacccgaaaagcttggctatgccgagtatgccgtacacgtactttctttccgtgtcggtggtcggctgcggttgcgcctctgcctgtaccgaagcgtgtctgcttagaaaaaggaactcttcgcctgtcatctgccagacgggtttcactaacagttctttgaggttgttcatcgtccgtatgattacttgtttgacaatagccctgcgcacaggctgtttcttctgttctcgaacgatgcaaaattaggtagggttttgagtggtaagtatgtggatgatagatatggattgttctgttatatcgctgaatatcaagaaataaaaataccactcaaaaattattttgagtggtataagtggtcatgtcgtaaaatatattggaatatcacgggttatcggaatattccgtccatttccttggcgaacttttggttgggaatactgggtaaatcggaaacgggttccctgtacttggacttgtaatagtcttcatcaatatccaggtgtttcaggatggcttccttccatttgtccttatcctgccccggcaactgctccctcatcagggaaatcagatagcatacccgtatcttttcccttggctttattttcagtacgcactggcagggatgcagattcatgcaggcatagaaatccggtgcggtaatgtcttcaaactgttcccctgcacaaacttcatgaattagggaaatcagcttcatgctgaaatattcaggcaatccggcagtcgtagctgtagtcgatgcggttgtagtttcagcttccggctggctgtctgtacggctctgcctgtctgcttcgttcggttggctttcttcgtccggtacatatttggtcaggatgcccatgaagtgtacgctaagcaggtagatgtcgtcgcaacggtttttcatgtattgccgggcttctttccagagaagggtttgctgctcataaagatgctccagttgggctttctccctttcatattcagccttgcaacgctcatattctctttccgccagcttttcttcttcgggtgtatgctctcggtagccaatggaatcatagcggttgttggcttcgttcatcggtttgcgcagcctgtttaccacttccatctcttccttgatggtttccttgtagcggtctgcgtattggtagcatacacgtatgatcacttcgtcatggagaaggcggtaagattcataaagccgtatgtattctttgacttcctttttcagacttttcagcagcagggtacatggttctggcggtgtatgcagcaccagttcaaggatagcttgctcaaaagcctttatatcgctccatttcgagtagaaatcaacgatgaatttctgcttttcaaaagagaaagtatggcttacaatccaatctttgcagattctgttcagctccccgtattgaggaatgagggttgttatcgttttctgcatggcatactcttattattggggatccttgtcaaggaaagaagccagttcttcttccacttcttctacgctgggcaacgctgatttcaatttctcgggaatcgccttgctcaattggtaatcgctgatgccgatgggctggtcatagccggaaagggcatactgggcaaccacttcgtcctttcctctgcacaacaaaagaccgatggtcttgttgtcgtgttctcctctcaacttatcatccaccacgttgatgtaaaagttgagttgtccggcatattccggcttgaaaggagtggctttcaattctatgacaatatatgcgtgcaacggaatggaatatagaatcaggtcggcaaagaaatcgctgtttccgacttggaagtgcttctgccgggcaacgaaggcaaaaccgttgcccatttccaacaggtagcgggtaacgtgtttcaccagctgttcttcaatatccctttcgtctgctttttctttggctcctgccaaatcaaagatgtacgggtctttgagtaggtaattggcaaggtcgctttgtggagccggaagtgtggtcgtgaaattgtttaccttgttgttgctgatttgtcggctatacaaatcactgtcaatttgcattttcaatacattgctgctccatcccatttccacagactgcttcatgtaccagtagcttagacctaaaggtagcgaactgtcaagtatagtcatttggcttgtccagtttattttggctataggagaggtcaagaaaacttcttctatttccctgattcccatcctgtaaatggcagacacggtttttcccacatcttcaaattgcgcaggaacttcctgcgtaattgctaatgattgacaatcaatcgattgtatttgcgcagtaagttcctgcgtaaattgcttgtcattcagttttaatacttcattggtcacactctgtatggttgggacagacaggcttgcatctgtttctatgaaactttgcaacgctcttaaaggatatgcttttgcaaactggcacatataggtaaggttacgttccgaatagcctttcttttcagggtaatgcagtcggatagcctttgccaactgcttgatgattttgcttccccatccgtgcagctgctggtgataaaggatgtaattgcctatcttccagtaatggaacagcatttgtgcattggctgcaacaatcagccttacttgtgcctgttctatttccgaaccgaccgcttgtatgaatgcatcaaaattcgttttctctatgttggattccttgttgctcatattgtgatgataatttctacaaatatagtcattgataactatctatgaaactgtttgatacttttatagttgattaaacttgttcatggcatttgccttaatatcatccgctatgtcaatgtagggtttcatagctttgtagtcgctgtgtcccgtccatttcatgaccacctgtgccgggattccgagagccagcgcattgcagatgaatgtccttcttcctgcatgggtactgagcaaagcgtatttgggtgtgacttcatcaatacgttcatttcccttgtagtaggtttcccgtacaggctcgttgatttctgccagttcgcccagctctttcaggtaatcgttcatcttctggttgctgatgacgggcagagccatgtaattctcgaaatggatgtccttgtatttgtccagtatggctttgctgtatttgttcagttcaatcgtcaggctgtcggcagtcttgactgtggttatttcgatgtggtcggacttcacatcgcttcttttcagattgcgaacatccgaataccgcaaactcgtaaagcagcagaacaggaaaacatcacgcacacgttccaggtattgcttatccttgggtatctggtagtctttcagcttgttcagttcatcccaagtcaggaagattacttttttcgaggtggttttcagtttcggtttgaatgtatcgtatgcaatgttctgatgatgtcctttcttgaagctccagcgcaggaaccatttgaggaatcccatttgcttgccgatggtgctgtttctcatatccttggtatcacgcaggaagttgacgtattcgttcaatccaaactcgtcgaaatagttgaacattgcatcctccttgaactctttgaggtggttcctcactgctgcaaatttttcataggtggatgccgtccagttattctggttaccgcactcttttacaaactcatcgaatacctcccaaaagctgacaggggcttcttccggctgttcttcgctggtgtctttcattctcatgttgaaagcttccttcaactgttgggtcgttggcatgacctcctgcacctcaaattccttgaaaatattctggatttcggcatagtatttcagcaagtccgtattgatttcggctgcactctgctttagcttgttggtacatccgttctttacccgctgcttgtctgcatcccatttggctacgtcaatccggtagcccgttgtaaactcgatgcgttggctggcaaagatgacacgcatacggatgggtacgttctctacgattggcacaccgttctttttccggctctccaatgcaaaaatgatgttgcgcttgatattcataattgggtgcgtttgaaattctacacccaaatatacacccaattattgagatagcaaaagacatttagaaacatttagttttactctatgttgtaatttgcacttgattatcagttgtttgcggttttatgagattctgtgaaagtataagttcgagagcctgtctctccgcgaaagtagaaaagttaaagttgtagattcttgaatttgaacgattcaagaatttttctttttctagtattttccttcatcttttcaaggagcttatgttaaattggaatccggtaatttgatttatgaagacaatttcgatatatgattcgttgcttgttttagggcgtggaataggacaagtcatgtttcagaataatgcgttgtccggtttgttaatgttggtcggaatttttctgaactcgtggcagttgggagtattagcggtaggcggtaatataataagcacgttggcggcttgtatctcaggttatggacgtgacgatataaagaatggactgtatggttttaacggcacattgataggtatagcagtcggagttttcatgcagctgtctttgtggtctttgctgctcatggcggtagcttcatgtttttctacttggatagtacggcttttcagccggcagcattcacttcccggatttactgctcctttcattttttctgtgtggatattattgggaatctgtacttggataacgccggatttattgctggtttccgaaacggtatctgatactgtgcgggaggttgattacgttcaggctttttgtttaggtattggtcaggtcatgtttcaagaaaatttattgaccggactgttctttttggctggtattggggttaattcatggactggaactttttatactgcgctggggacacttcttcctgttctttttgctgtattttgggggatagatccggaaatgttgaatatgggattgatgggctataatggtgtattgtgtgctttggctttaggaggcaaaacttggaaaagctttgtatgggctttatgttcagtcttgctgtccgttgtattgcagtttgcagggatcaagttgggaattactactctgactgcaccttttgtactatctgtatggatgataatgataatgcagaaagtggtgaatacaaaaggtgaataatagacagtatccgtagttcaggcagattgattttataatggatgtaaaacaatctaattgggatattattatggatctaaattgattgacgcaaaggctggaaaagtatagcttacgctcaatgaatcatttatgaagggttcctttcaagatccttcatgacaacacattgaaaaacaatatattgtgtaattatgaaggatttgaaggattttccggtatctttttatatttataggttttatgataactccaatcccagtgcttcttttaatttcagcagattcgggtttttcttgctcatcatctggaaacgttccacatggctgtaagcacggatgttctcggtaggggcactgacacgtaccgtcatggtgattttccggttgtgcagacgttcgcgtaagtgattctgaaccgatggtatcaattgtaccatatatttttccaccatatcattgtctactgtcacttcaaaagtcgtgtcattcaacaaatgcggatgcatgttcatcattcgtgcggagttagccttctcttccttgggcagggcggctgcaaattcacgccagtaatagtccagatctttttcattgaaaatataatcttcgtatgtggcatcgttttggacagcggtgcttgccgcttttgcttcttgcttttccgcagcttgctgttcgtgcaaaggacgacgcagggatataccgagtgagcccgccttgaacaccgggatttttttctcttctctggtctgaggcagcgggcttggacggcttgcgttcatactgccggctgtacttgtaccctgtggttgaggaacggcggttgctgcggtctgtgcagcggcagctttagcctgaggctgtggctgcgtggcggctgtggaagccgcttgctgcgtaaataggggttttaatatcttcttagggccacgcccaccacttacatcatcggcgtcgggcagagtgagttgggcgcattgaatcagtgtcagttctaccagcagacgtttgtttttgcttgcacgatagttcaggtcacaatcattgcatagcttcatggcacggtacaggaatttctggtcacatttttgtgcttgttctttatagcggtcgcggataccggcgcctacttccagcaattgcagggtggaagggtccttgctcaccagcaaatcccggaaatgagaggatagtccggtgatgaaatggctgccgtcaaatccttttttcaatacgtcgttaaaaagcagcatggattcgggaactttgttttcaagcaacaaatcggtcagcttgaaataatattcgtaatccaagacattcaggttttcaatcacacttttgtaagtgatgttcccacctgtgaagctgactacttggtcgaagatggaaagagcgtcgcgcataccaccgtcggctttctgtgcgatgacagtcagggcttcgggttcggcgttgatatgttccagtttggcaacgtattgcagatggtcgatagtgtctttgatgccgatgcggttgaagtcataaatctggcaacggctcagaatagtcggcagtatcttatgcttttccgttgtggcaaggatgaagatggcatgatgaggcggttcttccaatgttttcagaaaagcattgaaggcggcttgcgacaacatgtggacctcatcaatgatatataccttgtacttgccgatttgtggcgggatacgtacctgctcaatcagcgaacggatatcttctaccgagttgttgctggcggcatccagctcatgtatgttgtaagaacgctgttcgttgaatgccagacaggactcacactgattgcaggcttcgccttcggcagtgggggtctggcagttgatggttttggcaaagatacgtgcacacgttgtttttcccactccacgcggtccgcagaacaggtaggcatgtgccagcttgccggtggcaatagcattttttaaggtgatggtcaacgcgcgttgccccacaaccgattcgaatgtagcgggacgatattttcgtgccgatacgatataattttccataagcggagttcttttttctaatatgagttctgcaaaagtacataaattatccgtttttatgggtaggattgcttgaaatatttctatctttgcaaaaatcaaaaaagggattctttgtatgagcaaattgctgactatttggaactacatccggcgccataagtatatgattacggtgctgatctttattgtagttattggttttctggatgagaacagcttgattcagcgggtaaagcatcgcagtgagatcagcgcgctgaatagtgagatagagaaatacagaaagcaatatgaggaagatacggagaaactgaaggaactgaccacgaatcctgaggctttggagaaaatagcacgcgagaagtatttgatgaagaagcctgacgaggatatttttgtgtttgaagaatgagtaaatcttataatataatttcgatggcaggggcagtcctgctgctggcaggtgcggtgttgcaaatcacccggtgggagcttgcgccttatctgtatacgctgggtgctgtgatgttcggctatgtgcaggtgatggggaatcgttatgatggaaggaattttatcatcaagcgtttgcgtagacagcagattttcggggctgtcgcactggtctttacaggagtattgatgtttaccatgaaacgtaacgaatggattgtttgtctttccattgccgctgtcctggaactttatacggctttccgtattccgcaggagttggagaaggagaaacgttaaggaatctgtgtcatttttttgtccgcgtttatcagaggcttatcttgtgaaaaataggagaacgcggacaacacttgttacatgttgtccgcgttctaaaaaatagttgtccggtattgttattccacaatggtcatttcatctaccaagtgtttcgctcctgcaaacttatcaataataaataaggtatagcggatatccacacaggctgcacgttgtaactggggattataagcaatgtcaccggtcagtccttcgtagttgcggtcaaagccggtaccgatcaattctcctttattattgaaaacgggggaaccggaattacctcctgtattatctgttcctgtaacaaaacagaggggcatttcaccattcttcatggcatagcgtccgaagtctttcttgttatacaggtcctttagtttggccggaaccacgaattcgtagttgttcggatcctctttttccatcactcctttcagcgtggtgtaatagttgtattccacaccgtctttggggctgtatgaacctactttaccgtaagtgagacgtaacgtggagttggcatccggataaataggagtaccttcatgctgtttcagcttcatcatgccctccacccaagttttatgggccagattataagcgtcggtttcagctttcatggctgcatcggtatctgcataaccttggtctactgatttggcatattgcaccatcaggtcattttccaatgtcttggcatccggttttgccacaaagctgttgaaggcctcacggcttcggaagatggatgtatcaaaacaagcatcgacaaaggcgtcaatgtttcctttaaattctttgtctattactttaaagatactgatgcgctgtccggccggaattaattctgcgtaagttttcagcaaagctttggaaactttgcggtctacttcgggattataatctttattgaaaaatttatcagcctgtttgctcagtttgcttaatgcatgatccagcgggctgatttctttagtggcgtgaggtactttatatccttctttcaatgcttgcaggactttatctgtagaaggaattttatagaattccgttcccagtttgcaaacttcataaatggcttgctgatgatatacggcatcatggcgtttgctcacgatttcccggatagcgtcgaaggctttctgataggcgtctgtacccatttcacgtccataagccagaagcttttcctgttgtttctttttagtatcaagtactttcaggtgaaccagcccttcgttcataccgatggcatttttccagtagttggctgatgaagcgtatttactggcgtactggatgcgtactttatcacttttcagcatttcttccagcagattattcaaacgtacggtgcggatggtcttacgcatgaagttggtagtctgcatacgttcttccacttcgtctgaaatcatgtatcgccagttgcgtccggggaatcccattacgaaagtgaagtctccctctttgattcctcccaggttgatggtcagatgttttttcaccttcaaaggtacattgctttcgttatagtcagccggtttaccgtcgggtgttgcataaatgcggaacatggagaaatcgccacagtgacggggccacatccagttatcggtgtcagctccgaactttccgatggaagaaggaggagcgcctaccatgcggacatctttatagatggtctttacaaacaagtaatagcggttggctccgtagaaaggctttagttccaaagcggtgaacggagtgatttctatcttttcttgttcggcaaaacgtttggctactttgctcagataggagggggacaggtagttcagtccttccggatcctcatctttggccagttgtttctttacgtaaggagtgacgtccagaattttgtctatgaaggtgacagtcagccccttgcagggaagttcttctttgcggctcatagcccagaagccgtcagtcagatagtcgtgttctactgaactgtgttgttggatatagctgtaaccgcaatgatgattggtcagcacaagaccttcagcagaaatgatttcaccggtacaaccgcctccgaaatgcactacggcatctttcagactgatgctgtccggacaatatactttatcaatgctgatatccagtcccatatcatacatggtggccgcattctgttctttcagatcagtcagcatccacatcccctcgtcggcatggccggcaagggttgtgagggtaaatagcgagagtaatagtgtctttttcattattcaacaatagtcatttcgtcaatcaggtgtttgcatccgcccaatttgtcgatgatgaataatacataacgtatgtccactgcgatacaacgctgcaggttgttgtcgaaattaatgtcaccactcagtgattcccagttaccgtcaaaagcggcgccgatgagctcaccgttaccattgatgacaggagaacctgaattaccgccggtaatatcattggtagtcaggaagcaagcaggcatatcaccgttaggtaatgcataacgtccgaaatcttttgcttcatacaattccttcagtttggcgggaacaacaaattccggattggtcggatcttctttttccatgacacctttcagtgtggtgtagtatttataatgtactccgtctttagggttatatgacttcacattaccgtatgtcaggcggatagtgaaatttgcatccggggctttgggttccggtgaatacatttcacacaggccgcgtacataagttttatgtaataagtccatgcctttcatagattcggccagttcgtttcccagcttgttcatcaagtcatatttagcccgtacatatgctgtcatcggatctttttctatggctttcacggtaggtttcttgatgaatttattgaaattcgcttcgttggagaagatggaattgtcataacaatggtctacgtatgcatcataattccctttgaaatccttctggatggtggtgtagaaggcaggtaaggcatcggcaggaaccatttcggcatacaggggcaacagagctttggccactttgcggtctacttcatggtcgtagtccttgttatgtacatcggcatatacttttttcagcgtttcaatatttttattaatcgcttctttatctttatttttgattgcttctttcagcttgtccagaatcagataaggagtgccgaattctatacctccttgaaagacttcacggaaacaggtgtagttataaagaataggattactcttttcgatggcggcatcaatttcgctgactactttttcataatcggtgttgcctttggctttagcaaatgctgcgaacttggcttcctgttctgcttttgtttccaataccttattgtcgataatggctttattcataccgatagagtttttccaatagttgctggaacctgcatatttgctggcgtattggatacgtactttgtcactggcagccatttctttcttcagtacatcctgacgcacaccacgtatgcggatacggggttcgttggtggaatgcatccgttgtttcacttcactttgagttagatagcggttggtgcttccggggaatcccataatcatggcatagtcaccctcgttaatacctttcagggagatagccaggtgctttttggctttcagaggaacattgttttcattatattctgccggttcgccgttggcatccgcataaatgcggaagacggagaagtcgcaagtatgacggggccacatccagttgtctgtttcaccaccgaatttaccgatggatgaaggtggagcggcaaccatgcgtacgtcgctgtaggttttcagataaatcagatagaatttattgcctgcatagaaaggcagagcttgtgcgctgatacctgctttcccgttcaggtcactggctttcagttcctcgtcggccagttttttcaggaagtcgtattcaaaggtttcctcttcttttacttcgcctgattttactttattgtttactttatctgtgacatcaacaatgcgttctacaaatttgaacttcaatcccggagtcggcagctcttctttgcggctttttgcccaaaaaccatcagtcagatagtcatgttctaccgagctatgttgctgtatcgctccgtagccacagtggtggttggtcaggatcagtccgtccggtgagatgatttcaccggtacatcctcctccgaaaatgcctactgcatcttttaatgaaacgcggttcgggttataaatgtcgtctgcttccagcagtaagccttgtgctttcatgcggtctgccaaatgctgctcttgcatcagttgcaacagccacataccttcgtctgccttcgacggcaagaatgctacacacatcaatgcgagcaataaaagtttgaattttttcatgttgtgtactaattgttatttctttatccttatatcggttacaaaaatagaaaaaaagagggaactttgcactataaattgccttctcggtaataatcttctatttagttttaaattttaataaaatgtttttgtcactaaattatagattgtacctttgtatgcgaaaaatagtaatggggcgtagataagcatgaataaactttttttctctgtggtatctttattggcttttacttcatgtgccagtgagtataagatagaaggtagttcttctgtttctcgtctggatgggaaaatgctatttgtaaaagttcctagtggagaccggatgctgagtattgattcggcagaggtgattcatggaatgttcaagatggaaggtataaccgattctacttcaatggcatccttgtatatggatgatgagagtatcatgccttttgtcattgaaaaaggaaaaatatccatcagtatcgacaatgcccgtattgtggttaccggaactccgttgaatgatcgtctgtatgattttgtgggaaaaaagacttctttggacgacagagcgtacgagctggagcgtcaggagagccgtatgattatggatggaaaagcgccggatgaaattcaacgtgagataacgagagaacgtgagaaactggctgctgaaatgaatgcattggctaaggagtttatccagaagaattatgataatgtattgggaccgggtgttttcattatgttgtgcagcaattttccttatcctgtcatgactcccttgattgaggaaattatagaggaggctcctgaccgatttaaaaacaactccttggtaaaggagtatgtgacggtagcccgttcgaatatggaaaaattaaaagctccccattaatgaggagccttttttatctgtcttggtctggattgtctatctttccttgatatttttcaggtaagtctttctcaatttccctgtaagcctcttccatggtcgctttgatgttttccattccctggctttgcggataaatgggcttgtgtacgactaatgtcataggatgccaggatataaaaccgccggtacggggaagaatattaaaggagccgataatagtgagtggtactacgggaagttgcaaatcatccgccagttggaaagcgcctttcttaaaatatcccatgtgcccggtaaaagtacgtgcaccttcgggaaataccactagagaagttccattctgtagtacgtgacgggcatgttctatggtttctattactttcttgggaccggatttatcaacgaatatatgtccggcagcttcacaggctttgccgacgaaaggcattttgcgcagactttttttcatcatccatttaaagtttcgtcccagaaaaccataaataaggaagatatcgaaagatccttgatgattggctacaaacacgtaggatgtttttttaagtacttccggatgtcctactaccttgacaggaataagtaatacatagcagaaaagctgtgaccatatctttcccggataatatccccaaaaatgcggatcgcctatccatgaaccaataatggtaactattgctgtaagtatggttaataccagcaaaatgggaagtgctatgaatagttggtataaaatatatagtactttcatttgtctgaattttagttgtacaaagatagaaaaactattttatattttatgtaacgtgattacagtaatttccggccatgctccaaggcgcataggaaacatcagatagcctaaaccgatattgacaaacaaggattgttttccttcctggtataaaccgttgtgttcgggatatacgaatttagcaggagagaagccaaacaggctgaattgcatttcatgggtgtgtcctgaaagcattagctgtacatcactttccggcaagacttctctgtgccaatgagtggggtcatggctcattaatattttatacattccttccgttccttttaatgctttctgcagatctccatgattgggaaatgggggatttccgctgttctctacacctgccaaggctatactgtctccatgatgatgtagaatgacatgatcgttattgagcatcttccatcccattgcagcctgtttggatttcaagctgtttagattggcttcttgagcttcttctgtttcccattttatataaggagaatagtcatggttgcctaaaacggaatacactccgtcttttccttttatctgttctagaatagggataaattcgtccaattccgttgccacgttattgaccaagtcacctgtaaaaagtaccaagtcggcatgttgtgcattaatgaggtttacagctttctgtaaggcagcactgttgccggtccagctaccggaatggatatcagatatttgtacaatgcggtagccgtcaaaaccgctaggaagttcatcggaactgatggttacctccctgatttgaaaatgttgttttccttcggttgctccatatactacatatactaaagaggctaaagccaatcctcccgctacatatcctccatacagttttttgccggagatgatatataggagcttcataaacaggataacaatgacgaaaagtgccttgggtacggagaagcaaagaaaaatcaataagaaattgctaagtcgctgcatggaatccggacgtggctcgtgtatagaaaagactaatgtcattcccaataaaagaaacagactgggaagccaataggcccaatgtgtccatttttgggaaacacggcgtatatatgctttgtatatatacatatcgggcaatatcagtagcacaagaaaaaacagaaataattttatcagcatcataatttattcgttttttatagattggcggcgagaaactttttagtttcttctatactcatgccccggcgggcggcgtaatctgccaattggtcttcacctatttttccgatggagaaatagcgggaggccggatgagcaaacatgagtccgcatacagaggcatggggcttcatcataccattctcggtcaatgaaattcctatttgcttcatatccagcaactcgtctaataagaaattgatggactggtcgggtaaggagggataacccacagcgggacgtatcccttgatatttttcattatgcaggtcttttacgcttagattttcatcaggtgcatacccccaaagttttttgcgtacatcttcgtgtagcttttctgcagtagcttccgccagcctgtcggatagcgtttgtactaacatacgtttatagtcatcttctgcataaagttgttccatctctgcatctaccgtggtggcaaatgctccgattttatctgtaatccccgaggacagaggacgtacaaaatcactcagacatagaaatgggtcatcttttttcaattttgcggcttgttggcgcaaaagcgggaaacgcttgccattcagcagtaaatcatctccatccgcattagcatccatgatgttgaccactccatgagtttgatacactgcgtccagctggttcaacatccggtttgcctctttgaaaagctgcatggcttcactggctttcggacgatcttcttccgtaaaactagtgagccacatggcacggcatgaatcacacccatgtatgtccgcgatggcggcaaatttgggctggaacccccatgcgtggaaaaaataaatccaattaatatattcgctgacttcgtgaatcttgtaatctacaatcatcttttaaatcttaattcttgtccgcgatggctttcatctactttgttgtcactgtaaaccaagtcaccattgacgaatgttttttctactcgtgaatgaaatttttgtccttccatcggactccatccgcatttgcttaaaacgcaatcggctgttacagtccattcatgatccggatttactagtaccaagtcagcttgataaccggggcggaggtaaccgcgtctttcaatattatataattcggccggtgcatggcacattttttgaaccaattgttccatgcttaatacgccttcgcgtactaattccatgatggcgaccaatgagaactgtatcatcggcatacccgatacggctttcaatgccccaccttccttttctttcagcaaatgaggggcatggtctgtacctattacatctatgcggttggtggataatgctttgcgcaaagcattccggtcttctaaagttttgatggacggattgcacttgatatgtcctttcaatgcctcataatctttgtcatagaagtatagatgtgacacgcaagcttccgcagtaatctttttttcactcaggggtttgtcttcaaacaaatccagttcttgtgcggtgctgatgtgcaggatgtgcaggcgggcattgttttcttttgccagccggatggctaatgaggaagaatatacacatgcttccgcactacgtatctgtgggtggtattttatatcaggatcttctccatatttttctttgaaggctgttgtattggcgctgattatagattgttcctcacaatgtgctgcaatcagtatccctgcattggcaaatacttttctaagtacttccatgcggtctaccaacatatttcccgtgctggctcccataaataatttaacaccgcatacccggtttttatctagtgtggggagtacatccgcattcgtattggttgctccgaaatagaatgaatagtttacgatgcttttggttgccgcatccgcaaacttggcattcaaagcttccaaggttgtagtttgcggagtggtgttgggcatgtccataaaactggtgactccacctgccgccgccgctgtgctttcagtatgtatgtcggctttgtgagtcagtcccggatcacggaagtgtacatgatcgtctattactcccggtattagataatagcctttcgcatctattatttctccacaaggctgggcgggaactgtttcttctgccagcacttcagctatgacttcattttcaatcactatcgaaccgtgaaagatcttgccttcattcacaatccgtgcattctttatccatgtacgtttcatactgttttcttttgtgggtatttgcggaaccagctacccagttttaattgaatgactcctagtacagcttcgccgaagatacttccgttcatttttgaagtacctaattcgcgattgacaaaaatcacaggaacttcggctatcttgaatccgcacttgtaagcagtgaacttcatctcaatctggaatgcataccccttaaaacggatgccgtccagaccgattgtttccaagacttcacggcgatagcatttaaatccggcggtagtatcatgtatgggtaatccggtgataatccgtacatatttggaggcgaagtaagacatcagcacacgccccatcggccagttcactacattcacaccactgacatagcgtgaaccgatagctacatcatagccttcaacggcacatttgttatacagccttggcaggtcattcggattatgactgaagtcggcatccatttcaaatacaaaatcatattgatgttctatcgcccatttgaatccggcaatgtaagcagtacccagccctaatttacctttacgctcaaccatgaaaagacggtcggggaattctgtttgcagtttacggacaatagttgccgtgccgtctggtgagttatcttcaataatcaatatgtggaagaatttttccagtccgaatacagcccggataatgttctctatattttccttttcgttataggtgggtataataataatactatcggatttctccatacattttttgtattagctgaataaatatcatacaaaagtaactattatattaacactcccgtcagaatttaattttattaattaaaaaaagaggattacccctgcctggcgcacggataatccccctatttaacagaatagtttagaaatctttagaatgccacaccaaggcggaaaccgaaattgtttaatttatccatatcatagttaaatacggttcccttgttagtagagtagctgtagaatgctgccagatggaagccgatactgtttgtccaagggtagatattcacaccgacttctggtgatacatagaaaccccaagtgttgtcttttacttcgtaaatgtaaaagtcactggacattttggtatagttggcacccagcttcaatccgatataaggttggcatgcaccgtcactgaagcgatagtgtgttgcgaaaccgaaaggcaactgaaatacggaatgttgctggtcggttgtcagggctgccgaattgctgattggtaatgtctgacgtgaaatatactcattgttggtatgataattgatgaaggcaccgattgacaaatccggtagtacataatatccaccttcgaagttcataccccaaccgcttgctttgtttgcaaagttattgctgataggagcgttgaactgccagtctacattgaaataggtaaacggagttacctgtgcttttgccggcagggcaaaggctatggcgatagcggctaccgccatcagtctgagagtaaaatattttatagttttcatatttcctttttattttaaatgaatacttgtttcacttacgtttattttttcagataaggactctgagtgaatgcttggttgatggcagtagttgtacggtttacattcaaactgccacttccgcccagcaacccgctgatgtatgcattccagacaacagttaatttctctttttgtccttccggagcattttttaaattaatcatgtcggccagcaatgaaccagtgctatagctgtaagtgataggatagggatagtaccatccacctccccaattgccgccccagtatccgggataccaataaccggggtaatagccccaccaaggaccgtcattgtagtagccatggaaatagtaagtacttgctacataactcacctgtagaccgaggtcggcgtcgtctttatcaactgcggtgtagccggcagcgttcatcttagtcttgaatgcattgatgatggtctgtgcattctcgtccttccagtattcagggtctttcttgtcaccgatgatcaggatgctgtcagggatataataagtactgaaatcattgaatttagtactagtgtcatgactggtgaataccagatactcattgtccaatttgtccatgtccgggtctttctcgcaagataccaaggcaaagaccgccagtaggataggaattaattttttcatgtcaagtttttgtttaagttaatactaattgttttcgtctagtttctctcatacaacggccagcttatgtttttgttcactaacagtctgttctttagtgaatttttttgctgccgggttaattagagtttcttttttaaagtgtaatttagtttagaaacagctttcttgaagtccttgccaatcattgtcagtgcactgtcaccctctgccaaaaagtttgtcttttcgtgtcccggagtagcggaaactaattgataaacgatagcggtgctgtcattaggaattccaataatagttacaactgtaccactgtcggtaaatgcctggttaccatcttttgttcctaaataagtggtcgtcagattgtacgttcccagtgagtcttggcctgcctcctgaagcgtcagttgatagttgattccttcggcatcggcagctggcagaataccttcatagctatatgtttgtaactcacccagtgtgctgtcgttcacagcgaaaatagagtcactttcactttcggctattatttcagcacttttgtttcctttagagccacaggaaacaatcatggcagccaaagctgctgcaataaatacttttttcattgttaagtcaggtttttaatggttatttgggtacataacatctgttatgcccgttttgtttttaataagttctcttttcagaaaaaaacaagaccatgtttaaaatgcattaaacatggtctttaataaatggggcgttgtatctggataagtcagactaccgtagccgtatgccgttcatacttcttcgaatcagtgagttatagataatttttccttttgatacttgttcttctgcttgtggcaggtcgggcatacttcctgtcgtaatataagctatggtgttcttcaataaatactcttgggtgtctcccagtgggtagagaggggagatgaggttacgttcgctcaatgtgaaatcgggggtgatgccatttacatagttggcttgtcctgccgagttgagaacgtatgccactaccggccataaaataaagttgtaacgctcatcttggtatggttccatggctacatttttgccaacagtcgtttcacctattaccactacattttctgtgcctatatatggacggagacaatttatgacagcttctgaagccgatgcagtaaatttgcttgttagtacataaagcttgcttaaattcaagttttcagaagcaagtcctgtgttgagggggaaatcaactttttgcgggtcactgatattattatacaaagttgtgcaaaatactttccctagatctactgcgggtgccagataacttcctaaatctgtggcacaactcagataaccaccgggattgtatcgtaagtccagaataaaagcatcgggtgactgccctttgaaccgggcgaatatctgtttcatttgttccctgtattctgtatctgttgcctggttattggggcctgtactgaattcattgtagaccatataggctatttttcttccggatacttcatatatggtatctatatagaacggattcaattctacgggtcgtgatgctgctactttgactgtatctgttgcaatccagctggaattaccttcctcatcaaaaaccaagctttctctggcgaaagttgtattgccaccttccatcagatatccgtaattattgttggttagctcttctttgccaatggctgatatccagttccctcgttccaatccggcttctgaggctggtgaattgggcagtacgaataaaatacgggcaaatacgtgtgatgagattccggtgggatcggtcattaattcaaaatcaaatccgtaagtagaagtacgttgcaggtaggaacgggccgcatcggaagtttcttttgtttctatatacgaatacgggtctccttttccgttttgtgccttggtataaaccaatttttgcaggaagttttccggttcggcaaaatagtccgtttcctttattgccggaatactgtcataccacaaataatgctctttcattatttgctctatccataaattctctccaactaatgcatagtattccccactgcggtcttcgccacatgaagccattataaataaagtggttagaagaaaaaaagtgctccgtatatgcttcataatctaattcctttttcgatctgcaaagctagggattttattttaaaatagggataaggtttggaataaataatccaaaaaacctttatataaaaaagagatccgccggttaggtcaagcagacttcacggcggacgttcttaattttttagttcttttcagatttccatttgtcagcatattcattcagaattctgcggatactgagtccgattttgatataatctttctcgttcaggttagcaagtgatacacgtacactccattcgggtccgtcgaatccgccaccattcaatacgaccagtcctgtttcattggcaagacggaatactacgtccaatggattataagttgtctgcagatgttgtacgaattcatctccgtaaaattttttggcccataccagcatgtctatctctgaataataaccagcccttagtggatcgtcggggagaatgaaccctgtgttgtcccataatgctttcagacgggtatggattaaattaagcatggcatgacgatacgtgttttctttgtccagcaatgaaaaagaagcaaagagtgacatctgcatttgttgtggcaaggacagtcctgctgtatggttcaaggctacttgacggctatctgctaccatacggtcaatgaatttaatgttttctacttgcatgctcaagctgccatagcgtttggctagttcgctttttcgtttgcggggcagattagcaatcattctgtcgaatacatttttctcatgtaaggcaattacagcaaggcgccaaccggtcgctccaaaatatttggagaaagagtagacacaaattgtgttctgtggcaaatcagccatcaggctgcggaatccagggacaaaagtaccatatacatcatctgttataatcatcagattgggattccagcgtgttactacgtctttcagggcatctacacattctttgcttaactgataactgggtggattacttggattgacaataaacaaggctttgtatttcgtgtctcgcagtttattgatatcttccactttgtattgccaggtatgaagcccttcttcatttagagtatttgcaggaatattgagcacatcataatcgtaacgtgtcaattcgggtatctcaatatagggtgtaaagataggaaccatcaatgctacactatctcctttgtgtagcaggaaattttcttccagcgagtcaaatacatagcacatccctgctgttccgccttcggtggcgaataaatcgaatttgccttgcgggggttgcccgttgcacatttcctgattcaggtaatcctgtactaaaatttctgtatatttcaagatgcggtcaggcatggggtattggtcgcctacaatactttcggtccattcgtgtactagctcgtccggatcggctgcatgttccatcagcatataattataggtacgtttcaatagatctgtccccgcatttccttcatgctttttcaggtattcctcaaaacgttgggctatgcctgttttttgaggaataccggcaatgccttcgggcatgtccatgacccggcgacactcttcaatgccaaaaccgcccaaggcaaagaatgcttcacgagcctccgttgcaatccagttgggattacctctgcctgcattcagcatgacgtgtgccattttcttcacactttcatctgccatttcaatcaaacggttttttaattcgaaagggctgatcttttccaaattcttgtccattcgggcaacgctgcttttattacttaaatattccataatgtatgagtttagtttttttagttgattaataatacaatgattactccccagatgatgagtagtgtatttcctacggcgtaggtcacggtgtatcctaaagaaggcgtttcgctgcctactgcttcttgtatggcacccaatgcagcagtggtagtacgggctcctgccgtgcatcccaaagagagggcgggatggaacttgaatacatatctggctagaatcagccctaataataaaggcaaggaagtagccaacgcacctatgataaataacataggacctacttcttttagtccctgtacaaagctgggtcctgcagaaatgccgactacggcgatgaatatattcaagcctacattattcagcacccataaagaggattccggtatttgtccgaaggtagggcgtttgctgcgccaccagccaaatactaatccggttatcagggcccctccactagtgctcaggctaataggtactccgccgatatggattgcaagtgccccgatgatacctcctagtaaaatgccgagtcctacaaatgtcatatctgtggcattggtggggcggtctatatatcctagttcttttgcagcagattccacctcttttttcagaccgaccaattccagagtatctccacagtcgatagtggtttgtgcgaaaacagggatatcaatacctgcccgtttgatacggcgtatactgactccatgcataaagctttgacggcgtatgaagtccaatttttggttgaaatatggctttttgtgtatcatgacagggagtacttccacagggaaatcaagcagttggggatcgacgatttcttctccaatccagtcttcctcaccaatggcgaattctcttcttccgctcagtaccacttcgtctcctttttgtaataattgtccgggaataatatcattgacaatggaagatccatgtcgcattctttcaacaaacaatcttttcccttgtgaaataaaataggattctagctggtcaacggtcttgccgttgccaaaccaatcgttctctatgcggtaagcgcgaaaaactaccggacggcgtgcttgttcaaatccgggctcgtctgcttcgctggtacccattcgggtttctagctctttgcaggcggctttcactttttctaatcctcccaacattttaggacctaaagaagagaggacccaggcagagcctgccgtaccgaaaatgtaagttacagcgtatgccacgggaatgatattaatcatatcacttttttgggaagaggctatgttgagtccgtttatggtatcttccgctacccctatgacggcagagatagtttgtgctccggccagtaacccggctgtttcaccggcattatatcccattaaggtagctaataaccaagtgataaccaaacaacctacgcacatgagtacggcgaatcctacttgaggtaaaccatcttttttcagtccgcgaaagaattgtggtcccactttgtatccgatggcaaaaaggaataaaagaaaaaacacggatttcaccggttcttctattgtaatgttaagctgtcccactaatacccctactagcaatacactggtgacgattcccaaactgaattgttttattctcatttttccaatccagaagcctgcggcgattgtcagaaaaatcgccagttctgaatgttgtctcaaaagatgtataatccattccatatttcacttcttattataattgctgtttaaaaacagcgtgagggtaaagaagttgagttaaaaagctccaaattgtgcttagttctaatattttttattttatttgcatagagatgatgcttgacttatgaaaatgaagttgtttgtaaaatatatttctttattaattctcttgtttgttgttggaggatgtaaagaaaaaatggctgacatgtatgtgactaaggtcaccgatttgacaggagaggaagaacaagttttgaaattggaatatgatcgtgatggtaaaattataaagtatggagataccccggtaaggtatgagggcgaccaaatcacaatcggacagatggattgtttgaataccggcaataagctttgcaatgttacgtttcaaataggaaaaggcaaggcgagggaaagtagggcccgttgtatattgaaggtagaagaggaggtttatgaagttgataaacagactgtctatgattataaaggagatactatttttatcaattctgattatcgtgctacttccgattatcgtttcttgagaaaagtgcaaggaaaatatgtttttgatcaattgggacggttgaaggaagtaatgactgtttttactgaagcaaatgatagtgtgtctagttgtcatacttattataattatgataataacattaactatcaggcgaatttgaatttacaggcttatgtgattgattatgatggggtggatagtttcttctattttttattgaatcttgggcagttgaggaatagaacagccttacctaatgatatcggatattgtatgaatcatggtttaagcacttataatgtgcatgccaattatcgtctggatgatgagaatccggtcaggatagaagttttatataattataccaaacttctatcccgaatagatttatcttataatcctttaaattaattcatcgggaagtataaacaagtctacttcattggcgccttgctttatcaaatctttcttatctatttggtaaaggcggacaaactcgtcatgactgccgcatagttcctgggctttgcgataatattctattgatttttctgtttcattcaggatataatacacatgtcctgcattcatccagtcttccataatgggcttggactcggacatcagcaggtcgtaatatttcttggcttgttgatggttgccggtaatgaaggaacaccatccgatggcgcgtcgggcattctgtggctttttatccagatactccactttgaagaaataagccagtgcttcatcgtatcgttccagtgccattaagcattgtcctatttgtagcgtcagattcagattgtcaggctgtacttgttccaccttattataatattccaaagcttgttggtagtttccttcttttctataacattgtgccaaatggcggttattccatgcgttatcagggatcagcagatctgattgcaggtaataatctatcgcttttttataggaaccgattttctgataaatgaaacctgctttctgccataattcagcatttttacgattgtataattcaattgatttatcatagagaatcccggcttctgtcaggtcgtcgtgtgtgaataggtaatctgccagcttgttgatataatctttgtgcaacaaggcttgagacaatgtttctttattccataagtctagagtgtcctcaaaaatgtcatgtatttcatgtcttcttgaccataatttgaagaaacggtagaggtcatgaatatattgccggctcacgaattcagcgcgagcttttgattgtgacatttcttttaaacgttctttcagttcttcagaagcctcatgttgtccgttcaattgttgctgcatgagatttctttggctttccggcatttgtaacatggtaaaacaaaaagagtatttgtcggaattgcagaatacatccgagttcatcaaaatgttgagcagagagattttttgttcgtcatttccgagagataatttggcgatatcctgatattgggggtcaaaaggatagaaccagtgagaaattttgcggaaaaacgggaattgtttcagctgtgaaaaggtactcatatacacatccgccccggacatttgcagttcacctaattcgcgcaatttatcggtaatgcctgaacggtcaatccattcttcccattccggattatgatcttcggcatcttcatccagtccttccaaattaagtttgggatttttcatcatttcgggaatgatttcttcacgcattttcttgtctatctttcgggtttcacgggaagattgcaataattgaatctggatatgatgcaggtttttgatgaactcggtattttcattcagttcatttatgcgcgacacggcttcagggtattgaaggatacgcttttcataatagtagcatgttagtgcgatccctgcaatagcccgctgattcagcatggtatcctgatgggtataggcgttcaatagaaacatgaacttgcggatgtcgaatatttgcagcaggctcatggtgacggcgctgaccattatggaaaggtcgttgacttggatcaatagtgagttgaacaaaatttgcgcttcagcatattccgattcactccaccgggtggatacccatattttttcaaataattcgtctacggctgtttcgtgacgttttctcatggcatccatttcttcatttcttttggcctcggtggtatatatcaatggggctgtagccatatcttctgtatatgcctccaattgcatttgtaattcggcatagctgtggggagggctttggacaaaagtgcgcattgtgtcataataggctccataattttgtgttgcctgtacggctatatggatacggtcggtcagttcgtatgccgtgcgcaacattttatggtatatttctaccttattgggatctttcatcccttttgaagtatattgcagcatcaggtcgtatgacgtttgcagggcttctagctcattctttaattgccagtcggaagtatgtgtggcatatcctgtcatttggaataatgcttcttttaaccgatattggtctaatagttttatgatttcttcgcgcatattttaaagttctatttgtatgtcttttataaacaaatgccggcagacttcggttctcgatttatttcaaccaagttgcccgtttccatatatattccatcggaccgtgagagtgatgattcatccaccagcggcagaaagagaattgcaagatgaagaaaactattcctgccaggcagctggctgtgataccaaactgattgtgcaatgcaaatccccagttgtagtataacatagaacctactatactttgagtgatataattggtaaggctcatctttccgtatggcgttattttcattaatccgtcgtgtaagtttgtcttgtaaaaagcgaagacgacaccggataccagaatcagcataaatgcaaaattggaaagcgaggtgatgattagtgaaagaggggtcagaatggatttatttgtgataaagtctggtagcatattgcccaacccatataaagggaaaaatgagacgagtgagcctgcaagtaccttgttccataccttcaagtgctctttcaaaaaaagtcccttgcgccctatcagcataccgagcaggaagagggcggctgtttggaatacccgtccgtgatcccaggcccaggcaaggcttgccaactgtccttcccataaattgacacggatggtttccagaaaattaccattgctttgcactgcaaaagttgcattccagaagctgcgggtggggatggccggagtaacaaattccggatcgaagcaggcacgtattacataataaagcggcaatggctggattaatagcagacatgccaatgcaaatatccatttgtctttcagccggcaagtcagtggcaggatgaaacctactaaagaataaaggaccagcacttccgctgtgaaaaaactggcattgatattacctatcaggaaaagaagaattaaccgccaacaaaaacgtagacggaaatcattgccccgtaggcgttggttgtcatcttgaataaaaaagctaaaaccgaaaagtaaagcgaatatggcgtatgcttttccgccgaacatgaagaataacccgctccaaatggctttgtccgagaagttcagccacgcactttgtccggctgtatcgggaaatgagtagaaattaaaatgttcgatagagtgcaggatgatgattcccatcactgccagtccgcgtagcacatcagctacatctacacgtgcgtgtcctttcaattttgtgtttattgcttttgtttccatggggttatatattagcgtacaaaaataggaaaatcttgaatagttggcaaaaaaaggaggaagtaatcagatatttctttaattttgtccccatcttaaaaaaagatatggatatttcggaattgcaacgtatttatgctggtcatcctaacactaagggactggctgcgttattggaagattcctcagtgaggactattttcctgggaggattatatgcttctgcggcagctttatttgtttcctcctttcttagagagaataaacagacatttgtatttgtactgggtgacttggaggaagcgggttacttttatcatgacctgacacaggtgaacggtgatgagcatattttgttctttccatcctcgtatcgtcgggctgttaaatatgggcagaaagatgcagccaatgagatcctgcgtacggaagtgttgagccgtttacagaaaggcgatccgctatgtgtggtgacttatcctgaagcgttggcggagaaagtggtatcacaaaaggtactgatggacaagacgttaaaacttggtgtgggtgagcatgtggacacagagtttatcacggaagtgctgtccggttacggattcgagcatgtagattatgtttatgaaccggggcaatatgctgtacgcggtagtattattgacgtcttctcttttgcttccgagtatccttaccgtattgacttttttggtgacgaggtagacagcatccgtacttttgaagtggaaaaccagctttcgaaagagaagaaacagagcattgccatcgtgcccgagctgacgaatgccgccgacaagagcggggtgtctttctttgaattcattcctcgggaaacagttctggcaatgaaagattttctttgggtacgtgaaagaatacaggtagtacgggaggaggcactctctcctcaggcgcttgccgcatacgagggagagaagacggaactgatgaatttggaactgaagctgatagacggggcggaatttacagtacgggctttggaattcaaacggattgaatttggtaacaaacctacaggaactccacaggctacgttggctttcgatacgacagtccagcctatttttcataagaattttgatttggtaagcacttcattcactgattatcagaaacgaggttacaccttatatatatgtaccgatagtgagaagcaggcaaagcgtctgaaagatatctttgaggagcgtggtgatcatatcacgttcattccggtcaacaagactttacatgagggctttacagataatgtattgaaaagctgcttttttacagaccatcagatttttgaccgtttccataaatacaatcttcgtagcgacaaggcgcgtagcggtaaggtggcgttgaccttaaaagagttgagccagtttgagccgggtgactttgtggtacatatagatcatggtgtaggtcgttttggcggtttggtacgcattccgaatggaaataccactcaggaagtgattaaacttacttatcagaatgaggatgtggtatttgtttccattcattccctgcataaaatatccaagtataaagggaaggagggagaaactccccgcctgaacaaattgggaaccggtgcgtgggaaaaaatgaaagagcgtaccaagagtaaaatcaaagatatagctcgtgatctgatcaaactgtattcgcaacgtaaacaggaaaaaggattttcgtatagtcccgacagttttatgcaacatgaattagaggcaagctttatctatgaggatacccccgatcagttgaaggcgacccaagatgccaaagccgatatggagagcgatcgccctatggaccgtttagtgtgtggtgatgtgggattcggaaagaccgaagtagcgattcgtgccgctttcaaagctgtgacagataacaaacaggtggctgtgctggttcccactacggttttagcttatcagcactttcagacttttagcgaacggttgaaagattttccatgtaaggtggattatttgagccgcgcccgcagtacgaaagatgtttccagaatagtgaaagaactggcggatggaaaaataaatattttgatcggtacacataaaatcatcggtaaaagcgttaagttcaaagatttaggattgctgatcattgatgaggaacagaagttcggagtaagtgtgaaagagaagttgcgtcagatgaaagtgaatgtggatacacttactatgaccgctacccccatcccccgtactttgcagttctcgttaatgggcgcccgtgatctttctgttattcagactccgcctcccaaccgttatcccattcagacagaggtgcatacctttaatgaagatatcataacggaagcgatcaattttgaaatgagccgtaacggacaggtattctttgtcaataaccgcatacagaatctggtagaattggaagccatgatcaagcggaatatacccgattgccgtgtctgcataggtcatggacagatggagcccgaaaagctggaaaagattattttcgactttgtgaactatgattatgatgtgctgctggcaaccaccattatcgagagtggcattgacataccgaatgccaatacgattatcatcaaccaggcgcagaattttggcttgagtgatttgcaccagatgcgtggacgtgtgggaagaagcaataaaaaagcattctgttatttgttggcgcctccgttgacttcactgactcctgaggcaaagcgtcgtcttcaagccattgaaaatttcagtgatctgggcagcggtattcatatagccatgcaggatttggatatccgtggagcaggaaatatgctgggggcggagcagagtggtttcattgccgatttgggctatgaaacttatcagaagatattggctgaagcggtgaaggaattgaaagaggatgagtttgccgatctttacgcagaggagttgcaggcagcgggagaagagaaaatcagtggcgagaactttgtggatgaatgtcaggtggaaagtgatttggaattgcttttccctaatgagtatatccccagcagcagcgaacgtatgttgctttatcgtgaactggacggattggaattggataaggacctgctcgctttcaaggcacggttggaggaccgtttcggaaaggttcctcccgaagggctggaacttctgcgtatcgtacctttgcgcagattggctaaacggttgggggtggaaaaagtattcttgaaagccggacgaatgactttgttctttatcagtaatcaggaaagtccttattatcaaagtgcggcttttggcaaggtgattgattacatgagcaagaatccgcgttactgcaatttgcgtgagcagaacggcaagcgtagtatggtagtcaagaatgtggaaacggtagagactgcggtaggtattctgcaggagatagtgagtttgtgataaaagatgtctgtattggcggaaaccggcattgccgtagagtaagcaggatatgttaacgtaaaattgaatattaactaaataaacagctgatttttaattaattgtttaacggaattgaatttggggtgttttatattaaaaaataatataagacgttcctttttcttttaacttatctatattttaactatcttacttccagtttaaaagcggacactgagatttttactcacatattgtctaattaaaaaacacttgttatggaagtgaaaaaaacacgaagagccgaccttgaaaagggcaagtcccgttggctgttcatgggtctcattgtgacgctgtcgtttatgtttgtttcgttcgaatggactgaacgtaatgtaacttacacgatcagtgatctagtcagtgacccggatttctttgaagaattagttcctgtaacctacaatcaggataaacctctgcccccaccgccacctccggttgccgtcaacccggatgagctcaacatagtggatgataactcgacggaaatagaaggcgatattgccgcttcggaccctacggacgctcctgttattatacccattcctgttgaagtacccgaggaagtagtggatgaaaatgtggaatttgtggtggtggaagagatgccgatgtttcgtgatggtactgctgatttgatgaagtatttgagtgaaaacatcaaatatcctactgtcagtgccgagcagggagttcaaggtaaggttgtggtacagtttattgtgggtgttcatggcgagattctgaatccggtagtggtgaagagcgtggatccgtatctggacaaggaagcaatccgcgtgatcagttccatgccaaaatggaagcccggcaagcaaagaggaaaagcagtgagggtgaaatacactgttcctgtagtcttcagactgcaaaattaagatttaattagtatggatggaggaagcgtaatctcgggagaggacgcttcctctttttttatctcaaattatcctaagcataaagagatatatacgtttgctaatgtattactttattaaaatatacttatttataagctgtgaataggtacaacctaaattgcatcatgaaaatctaaatatggaaaattagttgcaataacaagcctatgatataataggctgacaatcaaaagattttcatttttactgtttaataaaacttggg

SEQ ID NO: 14464 - DNA, 17128 bp, Unknown
  gut microbiota DNA sequence
aacaaaaaatttttaagtgcaatcctgttcggagccttgatggtttcttcaacaggaacgtttgtatcttgtaaagactatgatgacgacatcgatcgtatcgacaaggagttgaccgatttgaagtcacagattgcagctttacaaagcaaaatcgatgctggtaagtacatcaccagcgtagataagacagacaagggtcttacctttactttaaatgatggctccagctatgaggttaccaatggagtcgatggcgaaaaaggagagaaaggtgacggcaataagttgactattgataaggatggtcaatggctgattgatgatgaacccacaggatggtattgtgccaaaaaaggagaaactgctactgtaattgttcctgaagtgggtgcagacggctattggtattttgtcaacaaagagacaggcaaacttgaaaaatctacttataaagctgctcctgttagtgctgtcgaagcggatggtatctgtacattgactgttgttaatccggatggaactaccactgtagttaaattgcctactactgctgcttccattacagaaatcgaatttgttggttatacagatgcaaatggtgatttccatgcattctctgctgctggtcaaaatatggccgacaataaatatattatgtcatactctcctttctatgcaacacaggattactcttggaagtggacagatgctgatgaaactcagaaagtagaagggaagattgctgctaaaactgctattgtagctttagaaggaagatctttggtggtgcgtgtagctcctttgtctgctgatgcttctaagctttctttcagcttggttaattctaagttggcagaagctcctattacattgggtgaagtgaaggcttatgaaggtttggttactagagcggaatcctccaatggtttgtggactattgctttagatagcaaagaattgtcaggtttggacgatgcaacagcattggataagaactttgtttcaaataatgccagcattgcatttgctttgagaacaagtaactttatttcaaactataacttgacctttaagaaagatcaacttgcatctgttgtatcttctttaaatgataaggaattggaaaatgacgaaaatggaagtgcagaagcagcttttgtaacagttgcacaaggtgccacaaacactttcacttttgataatccgacatctgtttacaagagtcaaattattgtagatgaattcaacaaacaaaactggggtgttaaaatcgaaggtaacacattcaaagtaacagaatactatgataaggctactattcctgcattccctgtttatttctattatgaagtattgaaacaagatcctgttaacacttctaagactattgctgagtctgtaaagaaaatcgtttatgttcgtcttgaaagaagtatttctgacggtgttgttttggatactaagaatcatatcatcaatgcagttgcaaccaacgataacttctctgctgcaatgaagccgttctttgatagtatgagtgcggaagaactgactaactggaaggaattcgttaagaatgcagatgtgaaggtatatcaagtaggaactaatgctgatggtagtgataaggatataacagcccaaattggttctatggttaaattctatgaatctaacggtactacggaagtcacttctgctgataaatatagtaagattgctactatcaaagttgatttgaacaacaactggcctactgacttggcatttgacaagaactactatatagaagttaaattctacgatgcagcagctgtgaatggtgaggtgaaaggtgatgtacttaattctgttaagttgccattcactgtaaatattccttctatcaacgatatttttgttcaacagacaggtgtgtttgtaaatggggtggctaatgcttacatggatgcaacagctggtaatgcagatcttgctttgaattatgctcttaagagtgcatttaatagcttgaaggctaagatgggtacttctacattccaattggcaatggatgataaagatgctaataagattggtggcaagaaacattcagctttggctaagtttgtgcttgctgctactggagatcaacaagaaagcgatcttataacagaagtttcatctactaatattgatagagtaaatattcagttgattgatgctgttaaaaacggtacaccgcaaaatggttataaacaagaattaattgtcaatgtaaaaaatgctaagttcgtaggtaaatacgcttatggtacttcagatgatgttgactatacatttaagattaagataatgagtccattgtacgaaggtgtagttaaagctgttggtggtaaagtagaagttcctgcaactagtgctagcggttatgaagtaaacgattctcatgttaaaggttatacttataacgaccaagtttatagcatcttctgcgatgtagcaggtaaatatgactggacacgtaaagagttgaaggacgtagagttcacatctttggatgaaaatatctttacttgtgaagctaagggtaaaacagctggtgcggctgataacaagggtaactttaaagccggttatgttgtagtgaccccgaagaatttggcagaaactgcatctgctaagatgaaagttacagttgttgatgcttggggtttgaaaaagtcttctgatattgatgttactgtaaaagtaggtaagtaagatacaacttaataaataaaaagagagcggtcattactgatcgctctctttttagtaataatttatttttgtcaattctacttctttaagctaataaaatactgtatattataataactaaagtatattctattgatatgataaaagtagtaaatatttatatatcttatctcttaaaaaactgataaaagatttctccccaaatgtcattccatagaaagttatcctacatattctctaatgtgtattagtatctttataccattgtagttttgtatattcctcatttaagtcattaagttctctctgcatgataaaagtggtcatacctgaaaatgctgtgatagggaatgttccttcttccgtagcataaaatggagtatttcttttgtaaaccacacattggctgatacactcttgaagtgcattgtatgtgttttcatctgataatgattgataacattgagcgaaatcaaaaaaatagaatggggcttttaaaactccatcataattttgaaggttaccgaccgggaggaaagaaccagatatttctgtattgatctgtcgtatcaaattcgctaaatttgataatccagcagtttttattatgctaatggtagcagaacgtttatcgccttccatcaaattccaataatgaaaataattttctgcaaatctttgcaaatcagcagcttcttcaagcagacaggaaatactgccggcatagataggagtgaatcccggagatactactggggcagaggaagccatgatatatgctgctttatttcttaattcataagccacctcaatacctgccatattacatgcttcaaagattatgaattcaaataaatggtccgggagggccatagcaaaatctgttatttccatttcattatcattatcgatgatgatagaccgcgagccattaaccaatgtatgtggaggaagccagccactgccatgggaaaacacgattaaaccgtagcttttagcaggataaagccgagttacgtcgtttataactcgtttaagtacttggggggaggctgagttttcttggtcataggtatgtatggtaatatagcctttctcactttttccatcaatttccatcaatcgtggagagtccttaaatggtgtatcctgatacactattatttttccatctgttccgtcttgccatccatttttaatttgaacaagtttgtcataggtttccgcatcaagattattatctcctcccagataaaccaatagtgtccgtgcaggtaaaacaacaggggtgtcattttctttatgacagctacatactaataacagaaaacagacagcatatatatacttcatacacaatataattggataaatgattataaaaactaaaagaggggaacattttgcccccctctttttaaataaacaatgagcgtattaattacttgtcattgtgcttcttaacttggatttggatagttccaacagaatgtccaagaccattcttccaagtatggtcgcagataccgccccacttgtgatttacacaaacttctacatcaatagtaaatggttgagcaatatcttcaccattgttgatccatgtgatagtctgcttagcattatcaagtttgatcttcttcatgttttcagcatccagttcacttccgtcagcaaagtatgccttagaaaccttgaagttaacagttgtattaacattgaatacattatggtcaactaccagtttctttgaccaaccagcttgatcacctgtctgaaccaaagtattattcttagccatatctttgtgatcatagataacatggttgttattgaattgtgcctgagcaccttcagaccacagataatctgacaagaagaatgcatccttcaatgatactgtattttcagcttcttggtacttgtcatacaaaggacctgcttcgtaagcgtggaataccatcggagttacaaatgcaacttcaaattcatcgataaccactgtagaacgtccattttcaggagcaggagcaccagtataattagtagtatggttatcttcagcccaaggagtattgtttatcatattgatagtattgcaagagaagttattgtaagcttctttagcatacttgtgatgagcattggcttccttgttgcaagtaccatacaatccgtcaatatcttcattgaagcttactacggcacgcattttgatcttcttcaaatccttagcgtcagcagcattgatccaagcacgtcctgcgtctgtcggatccaaagcgatataccacttgttgtcttcaccttgatacaaacggataccggaatcgtgaccgtcacctatcttagatgcgttattatgctggtcaaccaattcgaatgacaaggtagctctagcccaatccttatcatgagtctgacccttataaggattatagttgatcaaatcgaactcgtcattcaatactgcaaccatttcataagttttaggagcatcaaagttatcgtatctaccgtgagcaatgaagtaagaatcatctacccagttcaacttagtcttttcaggagcaactacattcggatacttcacattgatagtataagtaacatggatgtcaggtaatcccttatgatcagcatttggcgtgtatgtacccttaacagtgtaaacgtcgtgatcgtcatgacgagagaatgctgtattcttcactgtaacgaatagctgattgtattctttagtttcaaagttcggatctaatgaatagtctttattatcttttccatcccatgcatatacagcgtgttgtttagcctcatctgctgttgcaaattcaggaacgaaaacataagtcttacggaattcgtctttactcaactgtacatcttcatggttgaatatcttatccatatccatgtcaagaacttgattgatatgtttcagagtaacatcttttgtttctgtaatattaatttcaggaacaactgtcttgcgtacaatgtgaatcttgatgattgctgttttaactacattaccattgtcttcacccggtgctaccagtttcacacgaacaataggagttctgtctatagcagctgtgtggctggcatcagtttctgcgccccaaatcgggtccggagtttgttttactgtagcaacaccatctttggtaacatccaaataacgttttgtctggttaacgccatcataatagaagtcaaccggttcaaacaccaatgaatagtcatcaaaaccattctccatcaaaggatactgagcttcttgggctctacccatacgtttgtcaaagaatgaagttacgatgtccttcaaattttttgaatgtccatcacctgtatagttcaattctacaacaatacgttctgcatcatctttagattcagcatctcctttatataactggttttcagcattggcttcgaacttagctttatctgcttgataagccttcaatttagcctcttcagtaccggtcggattcaaggtgttaagataatattcatctttgatgaattctctataatttaccttgttaggagcaattgcatttttaatctgagcaggagcgttagtttggtcaaatgcatcagctactttaaccaaatgtacgtttttctgcaaaattacttcatgcttggcgggaacaaaatcagaatgaacgatttggtcattgttcttaattctcaatgaatatactgttctttcgtccagattagattgttcagcaaaagcccagtcctttacacggaagtttaacataccatgtccttctttataagattcaacggtaatttttccatcagtgtacagtttttgtccagcgttgaacaattcccaattcttgttattcgtattgtagttccatatttcagcagtatcacgaacaaatcctaccacttccatatctttgaatgatacgctgttaggatttacctgatacttcacgtctgctttacctgagtaaacgatcttaaatgtattaaagttaccttcactccaatctgcacctgtaatctctgttttacctgccacactatcagtaacgatggtagggaaatggattctggcagcttcaccttcagaaaggaaagtagggataaacttaactccgctaactacagaagtagctttaggcatactgatagtctttttagtgccattagcgtaagtaataactaattcataagctgactcaccttcttctactgatactacataatcatcagcagaagtacccggagtacctggtttgcctggttcaccttgttctccttttgcaccattgtataatttaatggtctctccatcactgaatttgatttcataaccaccattaccatcagtgaacggagtacagctttcgacatatttgcctgagcctactttgtcttcaagggccttgattgcatctttcacattggatatttcttgatccaagcggtcgatgtcgtcatcgtaatccttacaagatacaaatgttcctgttgaagtgaccataagggctccaaacaggattgcacttaaaaattttttgttcataatagaaaaactttaaatttataaatttaaaaactcaaaatgttattgttataaaaggactttaaatctttttctgcgtttggatggtgctttatatagaaactgcaagggagatgcgccgaccactttatgaaatgcggcataaaaaacgctttgggatgcaaacccacacttcctaaaaagagaactggttgaatacgtaccctctagtaataaggactttgcatactcaacacgatatttattaagaagctgcttgaagttgcatccgaagtagttgttcaccgcattactcaggtaggtcgtattcgtgccggatacaaaaaaatatgtataacattgacaaacaatgatatagcaaattcagaagaagaagtatatcttattgcagaatagatagattctaaatacttttcaaagtatcctttaaaggacagaatgccaatatatatggacagaaacaggcgattatccattaataggaaacggaaaaacttgtcataagcagaaaaaacaaatcctttatttgctttgtttgtcatttactaatatctttgttttatcattcattctagaaccgcaacaaaatatgaaataccctattggaatacagagttttgaccaaatccgtgaagatggctatgtatatgtggataagaccggtttgatttacaacttggtaacacaaggcaagacttatttcttgagccgtccacgccgttttggcaaaagcctgctggtaagtacccttgcctgttatttccagggacgcaaagatttgtttgccggactggaaatcgacggattggaaaaggactggtatgagtatcctatcttccgtatagactttaatggaggactgtatacacaacccggaattctggaggctaccattgaaggctatttagggaactgggaagatatttatggcaagaatcccaattatacaaccataggaacccgtttcattgaaatacttcgccgggcttatgaacagacagggcggcgtgcggtggttctgattgatgaatatgacaaacctattttggatgtattagatacggaagcttgtttttatgatgattatggaaagcaagttctgttggagaaccataaccgggaaatattgaaatccttttattctacctttaaaggagccgatcaatacttgagattcgtattgttgaccggagtaacaaagttttcccaagtaagtgttttcagtggatttaaccagcctaaggatatcagtatggatgaacggtacgaagccttgtgcggtatcacccagaatgagctggaagcatttttcgaagaacccaccatacagttggctgctaaatatcagtacacagtgaaagaaatgaaggaacttctcagacggcaatatgacggatatcattttggagagaggatgaccgacatttacaatccgttcagcattcttaatgcttttgacagtatggcaattcgtgattactggttctctacaggtactcccacctatttggttcgtctgctgcaacacagccgcgagcagataaacgaacttgccggacgttattatgttccctctttgtttgtggattataaggctgatgtggaacagcctctacccatgatttatcagagcggatatctcactattaaagaatataatagacgtatgggaacttatctgctcgattttcccaataatgaggtgcgtaaagggttcttgtccgtattggcagcacattatttgaaacccggaggtggagaggtcaacagttggattatcgatgctgtcacttgccttgagcaagggaacacctccgctttttgtgattctctgaccgcctttcttgcaagcatcccgtatgactctcacacttccttgaaggaattggatatgactgagaaacatttccaatacactttttatctgattctccgtttgataggagtttattgccgtgcaatccattgtgagaatcgccagagcttcggacgagtggactgcatattggaaatggacgaatatgtttacattttcgaattcaagatggacggaacagcagaggaggctttacagcaaatagcagagaaaggctatgcccgatcttatttgaccgataaccgtaaaatagtctgtatcggggtgaatttttcttcccttacacgtactgtagaagaatggaaggagataatttacaggtaagatttagtcatagtcagcctaaagcgttaaacaaaagattgccttccactattttttatgggaatataccggtaagaatgttcatgctgttgccggcataacacatttaattttcatctttttatcattttatttttctttttgctaagaatgaattattttcgcagccgaacacaagtttaatttcttaccgacaataagcagacatgctttaatcctcgaccaattcaacttgtcctcattttaattttaacggataagctgatgttttgtccctcactattataaaataaaagaatgaaaagatcattgtatgtatcgctattgacgttcatgtgcttctctgcctgccaaggtagtgaggaattagagcaactacaagaaaaagagtacacggtatccattatggcaagaatcgggaaaacagtttccggagcacgctatttgcaagataatgaaaatgccatcgctagttttagtaaagccgatgatataggtgtttttatggacaatgacagtgctgtccgctggatattcgatggaacttcctggactacagaaaagagtgtcttttggaaagataaaaaccaggaacatactttttacgcatattatccccactccggttccaaagccgaaagtaaggaaaatataaaaatgccttctctcgacagccagaacgggacttgggaaaatattgaccaatatgactttctagtagcatccaggaagctttcctacgataccgaccttggcaatgtggccttttcgggcgattattcatttaagcacgttttgtcactattaaagataaacataaagggtgaaggagatatggcacaggccgttattgacaaaatcagacttgaaggaaatgggttgatgactcaaggatactactcctttgaaacgaacagcatcaccatcagcgaaactcccaaggaaaccttccagattactccgtcacacaccatgaacaatcaggatgcttctttttattttatcctgaacgggggcgagaatgacggaaacattgatccgaaagccgtgaaaaaccattctgttaatctcaccattgaatatacccgtaacaacaaatattacataacacgacgagacgacctgtctccgggcttattgtccggatgtatccataaatacaatattgtagtaaaagacggaaatgtaattataacgggaggaagtatttcgggttggactccgggaaatgaagaagaggatatagttataaatggagaagaaataaacccacaaacaaataatatgttatgaattatagattaaccgaattaaaggtgcttctgtttctattgctgctgcctgctgtttcttgccaacgcccgatgtacgatgaagaagacgatgaagacggagtctcgcaaacaaatcttcctctaaagatatctgccagatctagtggagagtccccaattaattatccggcctatatctatgcgtttgcagaggacggcagctgttctgccagtctgaaaatgacagataacgcccagattgaaatgaagttacctcctgcccgatatactattgttgcaatagccggtttgggagaggaatatatcgttccgaaagatcctagccttgatgatgtaattgttatgaaagaaaataacagaagctcacgcgcgctaatgatgggcacttcaactgtgacaattgccaataagaaaaatgtatctgtttctgtaaccctctattatgctgtatctttagtcaatatcagtttggaagatataccggcaaacgttaaaaaggtgagtttgcagatttcgcctttatattcttccctgtcgtttacaagggagtattccggcaaagacaagagtacggaaattatttgtgagtctgagccgggtggaatttggagtgcaaagcctttttatatttttccggggagcggctctcagactgttttttccataaccttggaagataatagtcagacaaagacgtttggatacactttcaaaggaaagccggaagcgaacgtgccattgaatatcgggggtagctattcgggtgatgtcacggtagggggcagtttgatatcaggtgaatggaaggctccggtagacatcaaattcaattttggcggtgctgatgaaggtaatggcggtagtgagccgcctcccattaatccggatctttccgggctacccgaaattggcggtatctggaacggcggtattgtagctggcatagagaatgcaagttccacaggggcggatattttgttgatgagtctggatgagtggagtggattcgcttccgatgtgcggaatatcatacaggaggaggaagcagacggatggcatcttccgactgaagaggaggcaaaagtattgcataagacgttcagcggatcatcactggatgaactgaatgaaaccatagagggattaagaaacggagacccgttattggatattgagaaacggtatgtatatgatcataacggaagcatatatgcattcggatttaaaacctcatccaaatttttacaggcggggagtacggtgaaatacaaaatacgtttggtatgcagcgctcattatgatgccggatgacccattcatatactagaaaagggcattcacacttcttgacaatatatgcttgagagtgtgaatgcgtctaatcgacttccataccgggaatctcatttccatagataaattctcaattaattgaaagttaacattctaccacccggtatacatttcctttggtggtatgtacccgttcgcccagctggggcaggatacggctcaggctgtaagcggtcatccctctcatgatcgaaggatgggctgccttcatacgttcaaacagctgggtggcggagaggctaagcacttcctgcggattgtcctcttctgtagcaaagcgaaagcaaaggcggaacacctcttcttcgggtacatgcttgtagaatagggcattatgttgctgtatagtctgttcctcttctttattgaaccagcttcgttcaccggatagaagttctgttttaagctgggcgtacaattgcttatgctctacggacgtggtgcagtctatggcatgtttcagactgacgcaaagaaagcggcgtgagccggtgcggtctaccagcaaatcctcccggttgctggtgccgatgaacgaggcaatacggggaagcgatgaagcgctgtgtttgtaagccttgcggatattcagtgcggaggcttgcatcaagttcttcagcaaaggcattttggatgcacctagtttgtcgaattcatccaagttgattaatccgtaggcggccagcttggcttcggcggatgccggggaacttaggtcataactttccgtgtagtaggatttcagcgtatcgggcatcagcagacggcagaacgtacttttccccaatccctggcggctgctcaccagcaggggagccacactgttggcgcggttgttatccggattgagctgcatccattgagcggagagtcccagcatccaacggtggaaaccgttcacccataccgggtcgtcggacaccctgcgtgccaacgcggacacccggtccgtgccgtcccattcgggaagctgctcaaaataggcagtaaagggatggtattcactgatgcggcgtgaacgcacaaagcgttgaatgtccctgtcccaacagtctatgcccgtttcaatagcctccagacttagtgagttcatccatcgttcgtccactttggtgtaacgcagatgagtattgggaatgttgttttctacacttgccacttcagtttcttcagtaagcacattgaaccggaagcggtagcgggaggtgaggaaagcggtcacttcctgcatcagggtatgtgatttcgccttcttgccagtatcttctggggaggttggtcccgcttttttctgaacatcttttttcaagtgagcggaatccttctctgttttttcagttgagactatcggatgtatccgagaatcgtccatactccccggcaggttatccttaccgttttcagtgagaagaacctgtgagtcggccatctctcttactccgtcttcgtccgacacgatgtagtggtaactgcccgtgggagcattcccgtcggtgcgcggagtccagttcaatgccagaactacttggccctcgcggatatccagcgccagacgcacgccgggtatagtccggcaaagcggcatcagcccgttgagagcggatacgagatcacgacgcggtgttccgtcaataggaacagggcttgacaggaatttgcttccgaagaagactgttttgagagtagcgaatacattcatgagttacttttttaagtttggcaaactacaaatatacaacataaaaaggcgtttgtcaagagggggcggaaatatggcagatcttggtgcaaagttcaatgaaacttggtacaagatatggtgaaacttgatacaatatatacgtacaggcctacacattactaacgttacggttcatacgttactaatgttgaggcttgcacgttactaatgtttattgttgaataagccgacatgtttttaaaatataccttcaggttttaaatatacatcttcaggtttttaaaaaacaacaatacgtttaaaaaaaacgtcagcatgttccgtgtacaaagttgccgtgttctgcgtacaggcctatcatgttccgtgtgccagccaagcttgttcatcgcattacttccttgttaagccgatatgcttccttctccattcatcctgtcattttatttaagacatacagacgatcagctggttaaggttgaaattacttcctctcactcccgtttcagccgtatgtttgtacccttttacggaaaggtgtgaaagaacggtaggaaaggagaatgaaaaggcaatgacaggatgtcccttcatagccggaacgcctatcgacagggtgtttcgacggtagatgaaaggaagaaagaaacaactggcttttatcgctgagccattcaagattaagagaatctcagaatcccgacatgctaataaacagataatcatcaatgttttgagcctgatttatgatcggtatgaaagatttatatttttcagactatgtaacaataatcctcccagcctttccattctcaggatacattgttgcttcatacagatgaaaatgagattccggatagcttcttcttccagtttatcaggtccgataattcttttcagcttttttttcagataaattatatcacaattcttgctgctccaaataaacaaaagtatatttgcaaaaataaccatggttattataaccgttattatttttataaacatctaaatgttaacaatatatgaatttctttggcagagaaaaagaattagaaattctcagaagagaggaagaattgtccgcatcatcggcacggttcaccatagtcatgggcagacgccgcatcggcaaaaccagtctgataagacggaattttcaaggtaggcaatgcctttatatattggcgaaaaacgaggcggaagctaccttctgcagttctatacaaagacagatacagagagaacttggtatatccgtttatggctcggtacgttctatgcgtgatatttttgatattcttttttcgtatgccactcagaaccagctgaatctagtgatagatgaagtacaggagttcttttatgtacgcaagagtatttttgccgacatgcaagaattatgggataaatacaagtcggatatgaaaataaacttcattacttgcggctccatttattcactgatgaaagaactgtttgaggataaaaaatcggccatgtatggacggatgaccaagcgtctggacttgcagccgttcagcatagcaacacagaaacagattctaaggcattatcatcctgcttatactccggcggatttactttgtctttatatgctgaccggtggggtggcaaaatatatagaaacattgatggacgaaggtgctttcaagaaagaacgaatgcttacttgctttaccaatgaatacatgccttttcttacagaagggaatgatttgatcaatatggaatttagaaaagagggagccgtttattattctatcttgagcctgatagctgacgggaaaaatacatccggtgagatcgactcagttttaggtatcaccacaagtgcctatctgcgcaaccttgaaatcaattatacccttttgaagaagatgcgtcccatctttgcgtctgaacggagcaagggagttaagtacaagctgaatgacaattttctgcagttctggttccgctttatctatcctaaccttgatttggtggagaatcaccggtcggatttattattggatattgtaaagaaaggatatgatgtttattccggtttggtattggagcgatatttccaacaaaagttatgggaagaggagcgtttcacgattataggaaactggtgggattcaaaaggagaaaatgaaattgatatcgtagctgtaaaccgtattgaccgtacagcccggatagcagaggtaaagattaaccggaataaaatatctatgccggtcttgaaagaaaaatcccaaaaacttataggcgagttaaaaagatatcagatagaatatacaggctactcattggaggatatgtaagatacggaataaaggcattcacacccctattttatggtacgcctatcagctgggagatacacaatggattacaacatgacacgtttggaattgtatatcagttccatcgcttttttcaggaaccttccggaataagaaatcttaccctggggaagcttcatgccgctttccctttataacgacaggtacagttcaccaatgggcatttgttactgaaattcctcattgaccggctttttaataacccaaacctaattgccacaagggtatgacattcatttatccggcttcttcaatgtacaggctataatcttcaatattattacggctggcgctcaatatggcggcaatttcagattccaaagtatggttgataatctgttgcaatcgcacatcgaaatcatcttccaaaacgaaaggataataacctctctttaaataattagtaaaatataccaaggggcggaaatctttcggcaattcgactttgtgttgcaggatatctgataaagaataagtattgatggaaatacggtgaaacagttggagatatccctgaaagagaggctctgcatttgatacataacggtacggcggcttaaatcggccccccctttatctgcacactcttgctgtacatatatttgcttattttgcactattaaggtgcattttgaaataatagaaaacctttcctatcttcaataaatgtaattattcgtgcaaactgtcctccgttgataatatataaaaatttatttagaccttctatagataaccaatagacagagtagttttttatttggtagttacattgttgatttatagtgatataagtattcttttgttttcggcacgaatacgacctacctgagtaatgcggtgaacaactacttcggatgcaacttcaagcggttgataaattcctacagggtg

SEQ ID NO: 14465 - DNA, 4063 bp, Unknown
  gut microbiota DNA sequence
agcttgtcgcgcacgggcagtccggcgcggagcatatcctgctcctgcttggtgatttccgtcttgccgatgcgctccgggatgcgcaccctgtttgccgcgatgtccgtgatttcattcgtcttgcggtcgatgctgatgaaagagggggtgacttcacccgtttccttgtccacgaggtccacgaccctgccgaggttgcccgtttcgcgcaggcttttccgttcctcgtcggtgaacttgtgtcccttgtactcgtccagcttctgctccttgcggatgaagtgcggcacgaggctgatgttgccctcgccgtccttcttgaaggagaggcgggcgtccagctcgaacggttcgccgccgaaggtgggcttgaccttcaccaagtcggacttgccgtagttgagcatcttggtgaggtcgccggactgtttgaggtcgtcatacttcacgccccatttttcttccaactcctgccagttgaccttgctctcgtcgatgggctggtagccctgtctgccctgcgtctgttgcgggctttcctgttgctgttctttctgttgttccatgttctcctgtttttgaggttcttgtttttctgtctgttgtgccgccatttcttcctgcaccttctggtgataagggaaggtgtcaatcttgtgtggtgcaaggatgtgtttgttctggtacggatgctgaagcaggtctttcatcacgcccagcatggaatccacttggtctgccgcgatgcggtagaaaccgaagcggctgggttccttgcactgccggaagaagttggtgaagaagttgtccagcgcgtcgccgtgtcggtcgagttgcaggaaactctgcgcgttctccgctttcgcggggatgcgcttgggggagccgtccgcgttcagcccggctaccacgctgatctcgcccgtcttctcgtcacggaccaccagcacgtccttttcgtcttttttctttgccatctgaaaaagtttttaattggttatttatgaaagaaattatggatacgcgccttgtagaaggctatatcttcctttttgaactccttgacatggttggaaaggaatgtcagcacgtcttcctcgctgtaataggtcttcttcccaagtgtcttgtagggcaatgcgccgatgctgcggtagcgttggagcgtgcgcttgcttatctggagcagcatacacaagtcctgattgtcgaaaaggcggacgctttccgaaagcgtgggctgttgcccctccgccttcatggacagcagcagttcgtcctgacggtcgagccgttccatcaatttctgcatccagccctcgaagttgtttcgtgtgagcagttccatgacctatgtcctcctttctttcggtttgccgcccgtgcgcagcctgtggttgtggaaaagggtgtctattgtcacttcctcgttccttacggtattgtcctccagcagccgcagtatctcggaaagacggtagcggcagcttccgcgtaccaccacatactcgatgcggtggtcggtgcgcatacgctgcatggtgcgcttgctcacgttgagcatcttcgccgcctgcgccgtgtcaagcagcttgtcttcggtttcccgcttccgtttcttctcgtcccttgcctcgcggatgtaccctgcgatgtcggcaatctgcgccatcagctccctgtaggcggaactttccattgttatcacattcatattcagtccttttttcttgtttctgcggcaaagttcggcaataaacaaagggggctttaacaactcactacatgactcacgcaagatttttatggaagatggctccgtaacccggtcaaacggcgcaacaagcagcctttcagcgggaaacgatacgtcctatatgccgtgtcgttacctttgcggcaaattctaaatgacatgaatatggaaatagtatctatcgaaaaactgactttcgacgtgatgatggcacagatgggtgctttcgtggagaaagtcgccgccttgcagcgcaagggtgatgaaaggcggcttgcaaaatggctgaccggggaagaggtctgccgacagttgagaatcagcccccgcacgctggcgaaactgcgcgaccgtggcttcatcggccactcgcagatcggctaccgtttttattacaagccggaggacgtgaaaagggtcattccgctggtcggcacgatttaccccgcagaccgttaatcgagtgttcaccttaaaatccgatgcagaatgaacgaggagaacaatgtgatcacgatggacacggaagatgtgaccgtgctgttgcagaacgtgcagaaaaactcgaaatggctttccgcctttctggaaagttacagccctccgctggacgaggagcgttacctgacagacaaggaggtggcagaactgctccgcgtgagccgccgcaccttgcaggaatacaggaataaccgagtgcttccctttatccttttgggaggaaaggtgctttacccggaatcgggtctgcgcgaggtgttggaaacgaactaccgcagaccgatcagataggtcggtatgaaaaaaggaaacgggcgacaccattttgaagtgccgcccgtttccttgtcttatggggtgtatgtattcagcaatacccggcgtttccgcttggtatgagcatgacgtatgcctgccgcttctctttggagagagccttgcccaccagccatgtgcggaacaggtgggtgttgtaggtgttcagccggaaggcgacggggatgatgatttcaagcgcatacacatccgcgtgcagcccgttctcaagctgcatatagcggcacacctcgtagtcgttcagcacgtccgacttgcggacggctttgatggcggcgttcactgccggaacggttgtatggaatagtccggcgatttcggtggcggtcatccacacatcgttaccggttacgctgaccgacttttcctctatgatgataatatcgcgtttcatggcttctctttttagatggtgcaacctgcaaattcctcgacactgttcaaccttgcggcaaggttttccatgtcctgattgagcttctccttcgttatcttcgcgtagatttgcgttgtctttatgctcttgtgtccgagcatggaactgacggtttcaatgggtacgccgttggagagaaacaccgtcgtggctgcggtatgtcggctttgatgccaagtgatatgcttggttatgccgcatcttttagccacggcacggatgccgtacagacaggtcatgtaatgtggcacggggaatatcctgccgtcctcgcacagcccgcgatacttgtctatgatccgcttggcgatgtcaagcaggcggatgtttgacaccacgcccgttttctggcggttgatgtttatccactcgtgatcgtcgaagtaggtgcggatattctcttccgtgaggttgcgcatatccgcgaatgacaagccagtgaacgcgcagaacaggtagaggtcacggtatagttcctgtttggcgtttttcagcttcccgtccatcagcatacggatttcctctttggtcaggaaactgcgggtggtttcctccttcttgatttcgtactcgcggaacgggtcacgcgtcagccactcgttgttgatggcgatgaacaccatcgtccgaagcgggcagatatacagccagacagtgttggtgcagcagtgcttgtccgtgcgcaggaacatctcgaagtcggagatgaaagctggggtaagctctttcagagcgatgtccttcacatggtagcggatggtgaggaactcttgcaggtgcttgtaaacggtgcggtatttggcaagcgtgcctttggctttcatgcctgcctccacctgtttctcgtagtcctcgttgtgctggcggaacacctgcatcagcgtatggtagcggtgttccagtccgagaaaggcgttcttcactttctcagcggtgacataattgtcacgctccatgatttcctgatagtgcctgttgatgcgtacccgcatcttgtcaagcatacggttcgtttcgagtgccgccgtgct

SEQ ID NO: 14466 - DNA, 26140 bp, Unknown
  gut microbiota DNA sequence
agacacattataatattcgcacgcgcgtaaacaaaaacggaaaaaggaaaaaacgaatacgcaaacaaaagccggaaaaaacggaaaaagaaaaaaacggaaggcaaacttgcaaacttgcaaaacttgcagcacttccacacccacacacgtgcgcgtacattaataatgcaacaaaataatatgttccaaaattccactctatttctttattgtgatctgtgaatgacctgatctccctcctgttttcttgttcacgttttttctcttttgtgaaatatatgcgtcttgatgaggagattcctttaaaaggccattactacagccaatgccggctggagaacagcaggcggcaggtcttctgacaggacagtgcctcggaaacgggatgtcgtgccgtgtgtcttcatacagttcatgtgctccgaagggttagtaacgtgtgttccgtaaagttagtaacgtgtggccctatacgttactaacatacaggtctgcacgttagtaacgtgttccatttagattgatagcgcgttattctgcatgccgacagcttgttctccacggaattatgcaagctgtaccagcatgattggcggaaggctccggtctgtacagatacctgctgaaggttcggacagtcatccctttgccacctgtgtctgtccgattccggtttctgtcttccactttccttttttctccttatacggtcccacctctttccaccaaaaatcctgtcacatctctcccttttcccccgctccaccttctgtgtcccgtcatactttcctccatttcagctctcccctgcatcgtccgtttgtcctcctccaccgttgcttgtcataccctccttgtaccctctcatttttccacattataatgtacgcgcacgtgtgtgggtgtggaagtgctgcaagttttgcaagtttgcaagtttcatccccgctttatatcataaagggaactgaaaataaataatattctagcatttagtcaatgctccaataaactatataattttttattgctatatttgtcctcatcaaatcatcaaaatgaatataacttctactatcataacagcttcggacggaacacccctctccttatatgatgtatgccgatttctatccaagcaacaatggagacacatattaaaactattggaacaggaaggaatacatatagaaagaatagaagcttatgaatatccggaagcccgagacatcaaacatctatttatacgctttaaaaaagaaaaagaagacactcctttttatttactatctccagaaatattctctaaactaaccaacacgataatacaagaatattcttcaaatataaaataaaagaagttgtataaactattaaattagaatgagatgaaaaatatcaatggtcaaggcaatgaaattacaattattttaccacatgataaaaatagattgtgtatcctcccatcatgaacaattcaatcaaatcatcaatcgatccaacatcataattacaggaaacaacaatcatgtttccatgcatttcgattcagaagagaatgttgaaaaactactttttaatgaatattttctgttgattatcaaaggaaacagtaacacggttaattaagctggggcattggtatttggtgtaccgacacacatactataacaaatttaaagggaaaaccgattaatttgctcaaagtatagaaattggcaaatatgtatgggtaggaaaagatgtaaagattggtaaaaatacaaaaatacccgatgacagtattgtgggttggggaagtattgtaacaaaagtattccacgaaccgaatataatattagcaggcatccctgcaaaaattataaagagaggtataaattgggatcgtagatatatcaataaatacttactataatcgtattttagggtgtctgactagatatcttttcagacacccgattgataactattccgttagaactggaaataaataaacggctgaatatcactgctctttatctggataaccaaataaatcagtactaccaacaataatgcctttcccaataaaggtaattttacaactccacgacaacacgcatcctgccaactatcaggagcaaaatgtagcaaataccctattcccatcaaaacaaacactttccaataaccttctatcagctgcatgaatacctcgggatgaaaagctgtaaatatctgcttcagcataacaaccgaagcttcaaaagtcgtattacggaaaaatatccagcagaaacaaacaaaattgaaagtaataagaactgcaaaaaatttacgaatgcccttactagtggccgtcttaggcttatgcagcaagttacgccagaatttctgtgcagccagtgctattccatgaaatcctccccatatcacaaaattccaagatgcgccatgccacaaaccacctaacaacatagtaaggcacaaattaatataagtacgggccttccccttgcggtttccccccaatgagatataaagataatctcgcaaccatgtagaaagagagatatgccaacgatgccaaaaatcggttatactatcggctttataaggcgaattaaagttcataggaaaacggaagcccaacagcaaagcaagcccgatagccatatcactatatccggaaaagtcacaataaatctgtaaagcatacccatatacaccaaacaaattctcaaccccggaataaagagccggattatcaaaaatacgttccacaaaatttacactgatataatcggagattacagctttcttgaataatccgctgatgataaagaaaacaccggtaccaaacatctccgaggaaacaaacagcggttgcctgatttgaggaataaaatcgcgggcacgtacaataggacccgctaccagctgtggaaaaaaagacacataaaatgtataatccaacaacctgttcaaaggaaccaattcacgacggtaaacatctatggtataacttaaagactggaaagtgaagaacgatatccccaccggcaagaaaatatccaacggctggaatttaccattccacaaaggagccagcatctgataaaagaaattggtatacttgaaataacagagcaatcctaaatttattcccagacttgccagcagcaaaaacatccgtttccattgagtttcggtattcgccatacgccctgccagcaagaaatccgtcactgtcaccacccccagcaagaaaaaataaaaaccgctactcttataatagaaataataagaaaacagcgttacaaacaggatgcgtgccgtatcctttttctgcaataacatataaatcaggctaaagcccaaaaacagaaacaaaaacaagccgctgctaaaaatcatcggttgcttggcattataagtcaatacttcagccagtttactccaatccagttgccacatattcattatacgctttaatcagtgcctgatgtaataaattaccttgtaaacgatatccatcgggagtgaaatgaatgccatccgcacgaaacatgtggtgcttcgtccagttacgacaagcatctgtctttcctcctactatattatacatatcccaaactgccattttatgctcttgtgcatactcctttataatacgtgcagccgttacggttctcggattaatagtacgtgcacgacgacgtcccacatatgctccgggaggtgtagtaagtaaaaaaaacgcttcaggacaggcagctttcaacatacccaacagtctgcctatctgcattttgtgagcctgagccagataacggcggctatgtgcctcattggttccaaaagaaacaataatcagatcaggatgcaaagaagctattttttttattttttcatcgtcagagaaagtaacagaagtagctccattaatgccaagcatatgataaacaatacccggttcgcccgtctcatgtgccaacccttcggtacgatatgaaatggtatcaggataaacagcctcagcaccaaaatcatgttccagacaacgacgggttattaatggataaagatgcccccgcacatgagaatcacctatatggactatccgtaccggtcccgtcatatcattcagtttttgaaagaaaggagaaagcgaacggctctcatcttctatcacattatctaaagaatgagtaaaactcgccggaagtgaatcatgtactgttatcagccgcataccacgatgcatttcctttgtttcaccgggtatgcgaagcggctccaacggtcgggacaatgccggaatagcatcctgggcataaagacatggaaacagcaagaacaaaaacaataccattgctacaccggacagaccaagaaatctgttattcctcctcataggctttccgcttttcgtattgctctttgccatacatcaatgtttcaaataagatacctgccaaatgcctgcctcccttaaaattgatatgggtataatcaagattcgccattttttgcccgatcatatcgacaatgcttccttgacctcccattgcctcatacatattccaaaaagcgatatggctatcagccgcaatggactgttgataacggataagattcttgactccgggcatggtgcggagatctccattctcgtttttatattcacggtcacccacactgaccagtaaaatgctggtttcaggaaaagctgtcttcaaatgctctatcaccgtaagcatccctttcttatagccatcgtattttacgcctcgttccgtagccacattcaaaccatattggaccacaatcaaatcgtatggacgaagacgttggaaatcgcgaagcgtatgtaaaggaatactacgtaaatgaagcccactgctaccacgtacgctaaaattatccaaagatattccctgcttgccatccatagccactccatagaaagtagcagaatcagcatgttccacactccaccgtacttgtcctatccttcctctcaccgaaacagcctgcacacctcctgttcctacttcctcatgcaactctccttccgcagcattattcactttagaacggacagcggcaaaacctttatttaggaaataaaaagtagaaacctcacaggtatccagtcgggaagcatatttactctgtccttttaactgcacataagcaccttcacgagggaaaaaataatgtccggaaatatcttgctgtattttatcaaaaccaacagagtcattggatgaatgactgctccatcccccaaaagtatggcgtaccgtaggacggtaaccgctgatggaagaggttacaggaacatatcccactccgcacccaccaaattcttgttgaagcatttcgcgcaaatcggcagtaaaaatatcagcttctataaaagaatcaccgaagtaagcgatgcgtacagggcgtttcatggttttcactttggaaagtgcctcataaaaatgtttcattccccgcatggtggaatccgaataatcctcaatacaggtaatacccgttttacatgtatccacaaaaataggttttacaggaggaggaagaacaatggtgtcggaatcacatacttcttcttccacatccggacggatatcagccaacaggtccaccttgcgcaacggtttgcctcccaccgacatggggggaaggaaatacagccccattaacgctcctactacgataaaagtgagaagaaaagtagccggtatatagtttttcatattgctatatttgtaaattaaccgcaaaagtagtgattttttagacggagtacttcatgatagaggctaaaaaaagaaaaaagactgcgccagaaagagggcaacagtctttttctttaataatgaaaagacagattcaaatcgtcttttctatgttccacacaaaagcacgtaatcccaattgttcggtttccttatccattttatgcaaggcgtccaataacggatccactttggtgtcatctaccactgtcataatagccgagcacatactgggccacgcgtgactgccataatgcggttctccttttacagagccgcgcccctgcaactgctgccaataactgaatccacgacaattctggcgatccaacaatgccagaatacgttcgtaaaaagcttggtcgaaagtgatgaaaacagatttcattattccattttttattttaagttctgtcatccggtcccctattcatttcgattcggataacaaatatattaattattcttttttacctttagtcatctctgtcttatgcgcttgataatagtcattcagctcacgggcagctttcatcttcttacggttacgcttgatacctgtaccggcaaatgaacagtagagcaccggaaccaaaatcaaggtgagcacggtagatacagtcaaaccaccgattacggacacccctaaaggctgccacatttcagaaccttcccctcctcctatcgccatcggcaccatgcctagaatagtggtcaaagtggtcattaaaaccggacgtaaacgactacggcccgaaacaacgaccgaatgaataacagacatgccccgctcacgacataaggtaatgtaatcaataagcacgataccattcttcactacgataccaatcaacatgatacctcccaacaaactcatgacattcaatgtagtccccgttccatacaatgccatcaataccccactgaatgcaaacggaatagagaacataatgataaacggataggtcagagactcaaactgggcagccattacaataaataccaatataataatcaaaacagccaaagttcccagatcgctgaatgaatcctgctgatcctcataagaacccgccacctggatactgataccgctaggtaaatccatcttatcaataatagactcacctgccaccaccacactacctaaaggcgcacctgaaatcacagcggaaactgttacaatacgttcacggtctttacgttcaatagtaggaggagcggaacgctccaccaccgtaccgatatctttcacccgaatcgctttaccttcattagtataaatcagaatattctccaaactttcaatactggtacggaactggggagcataacgcaccttgatatcatattcgtcaccatcttcccgatagtaagaagataaagcaccattaacacggttacgcagatacaaagctgctgtagaaagattcaaaccatgtaaagccaatttttcacgatcaaaatccacttgatattccggctgataatcctgacggctgatattcacctcagatacaccgttcactttcaataaagcttctttcaattcagctgcagctttatctgtctctgtaaaatcatatccatagatttcaaaatcggcagtggcctgtccacccatgcctccactgctaccacccaggataacctgagctttatccaattcgggataggctttcagatcctcacgcataccatcgcagacttctgccaacgtaacagaacgttgatcgggattataaaggttgatattgaatgaaatgatatggctaccattatcctgaatagaagcccaagtattatctgcatcagcctgtcccacagtatagttacagatacgcatcaccccttcatatttcttcagccacttttcggtcaattcctgagccaatgcctgggcacgttctacgcgagctccgataggcaattgtaattgaacagaaatacgactgttgtcttgtgacggaaaaaactctgtaccaattcctttcgcacaaatcaggctcagcagaaagaacccgaaacaaccggcaataatagtcctgcggtgacgaacagcccagttcaaacgtttctgataccagttatccaacccgtccaacgcacgttctattggtttgtagaatgtgacaaaacacttgctttgttttttttgcaagcgaagcatctgcgcacacatcatcggagtaaatgacagcgccgagatagtagaaatagtcataataacacacatcatccagcccaactgacggaacaaaactcccgacataccactgaccatcgtcaacgggaagaataccgcaatcatagtcaatgtggatgcgataacagaaattgccacctcatttgttccatggatagccgcctgtttcggctcggagccacgctcgatatgggtcgtcacgttttccaaaacaacaatagcatcatccaccacattaccaatcgcaatagaaaggcacgacaaagaaataatattcagcgatcccccatccgtgatggccaaataaataaaagaggcaatcaatgacatggggatagtgatacagataatcactgtagcacgccaacgacctaagaaaacaaataccaccaaaaccacaaacagaatggcatacataatagtttccgtcaaactgtcgatggtattcaaaatattatctgaagtattcacaataacccccagtttcacgtcactgggtagtgacttctgcaacttaggcaactggtccattactttctgggaaatgttcacagagtttgcacccgattgtttctgtacaacaatcatagctccttgcaccccgttattataggtttcctgagcacgttcttctacagaatcgactaccgttgccacgtcacgcaaatacaccgaagcaccattgcgtgtacccactacgatattctccatttctttcgggtccttgaattccccttccacacgcaaggaataggtattactgcccacatcgaaagttccgcccggagtattcttattttcagccccgacaatggagctgatggtctcaatcgtcaaatcatacgcttccagtttgttgggatcacaataaatattcacctcacgttttggcgcaccggcaatggacaccgttcccacgccgggaacacgagccaatggatttactacattatcatccaatatcttatatagagccggctgactttcttctgcctgaacggacaacagcaggataggaatcatatccgtactgaacttaaagataatcggagtattgacttcatcgggaagttgtgaactcaccatatccaatttatcacgcacatcattagtcaacacatcaatatcatagccatattcgaattccaaagtgataactgatatattttctgaagacttggatgtaatatgtttcaaattactaaccgagttcaacgtattttccaacggacgggttacgttgttctctatatcggaagcactggcaccctgataagatgtcataaccataatggtattggtatcaatatctggatacaagtctaccggaagtttcgacaatgagaacagaccaaagattgctacggccaaaaagcatagcgaggtcataatcggttttttaaccgctccttcgtatagactcatgtttgttaaattaaaaattgaaaattaagaactaaaaaatcatatataggtaaataaatatagagtattatcaactaactctcaatttttaatttactgccacttccacaccatcggccaaacgggtctgaccggcgaccaccacctgcgaattatcctccaccccggaaatcaattcatattcggttcccatccgacgtcccaattctactttattataggaaaccttaccgtctttgtagacatatacataacgatcgcccgaaccggcacgtttcacaatagcctgatcaggaactaccacatgccgcaatgtaccaaaactcacagtcacacggccaaacattcccggacgtatacgctgatgggtattagccaattttacctctacaggaaaagtatgagtagtagcatcaatagtaggataaaccaaactaacttttccttcgaattcctcatcaccatacacatcaaatttcacctttacggtcatacctttagttactttcgggaaataaggttcggatacattaatcaacagtttaaccggagtgatctgttctatgaccaacacaggagtggaggcggaagaatataagtcaccgttatcaaaattacgcgctgtaaccactccattaataggacttaataactgcgtattctccaacaaattattataggaagtacgacgtacatctaaagttgttttcgctgcatcccattcagatttggaagctccacccactttgtacagttcatccatacgtctgaattccgtttcttcattttctaactgcaatttcatttgtttcagatttgccgcatccatctgtactaatttctgtcccttggatacatgatctcccacttcaacaaaaatacggtctatacgcccgggagaggtcggagctatattatttttcgcttccgcttcaacagtagcagtatattcctctatctgatctacatcgcgggaagttacggaagcaagccgcactaccggtttgtcctccatagcggtatcagcagcttccttactctccgttccacctgaacatgcactcagcatagttaccaccagcaaagctgcgaattgaaaatattttctcatactgttatctttatgttaatgtgttattgttccgttacttcatcaatgcctaagactaagtccaaatcagctttagctaccagatagtcatagatggactggttataagtcagttgggcctccgttaaagctacttccgaactattcaattccaagatagttccttttcctacctcatatcttttttcggcaatagtacgccccttctccgcctgaaatacagcttctttattacttaccacctgttccgtactagcagccatattatccaagtaactggtagcttgcatagtgagctgccgctctgtattgatacggttctcttccagttgcttcatctggatacgggtctgtttcaattgagtaaaattacttcctttgaataaaggaatacttagattcagaccgatagtagaatagggcctccaatcgtattccttgaacttgaaattatcattcattgaagtatacatatattggaaactagcagaaagggtcggcataaaattggtatactgcaacttcagcgtctgctttaattgcaatgcattcagttccaattgtttcaacgtactgttatttatcaaattgtctgggcgaggcattgcctgacgagtaaacatagacatttcgtaatccttcaggttgccttcaaccgctacctttacatcagactccattcccatcaagaccttcaactgcagatttgccaaattcactccgttacgggcagacaccacggtaggtttcaagctgcgcatctgcacatccgcactaatcttatcatattcactgacagttccctgttcatatttagctttcaccacattataattatcttcactctgcttataacttttaagcagcacttcataactgtcttgtgccaaaagcaactgaaaaaaggctttggttacttgatttaccatatccagacgtgaagcacgtgatttctctacagccaagttcacatccgtacttgtcaaacttatacttttgtaaagagccggagcaaagacaggcagactgacagacagaccaccactataagtattatctgtaccgacttcaatcacctctcccatcatggcaaatgactgcttttttatggctcgtgaataactgcccaccaaactggcttctgggaaaagaccggcataagcttcccggcgggcttctttctttaacaggatttcctgaccggcgactttaatggtgggattgtcgctcaatgctatccggactgcgtcctgtaaggtaatcctcaatgtgtcttgtgcttgtgcactttgtattgctacataaagcagcaaaaacaaggttaacgtaggtttgcaataaaatttcattaactattactctttatttagtgacttatttagtttctaaccatacttattatgttcgtttccttttaaattcaataaaaaatcatccacaatcttcaaccccttttcagtggaaatgccacgcatatgcataaatacaactgtttcataaatttcaccaagcgaataggacttgcatatttccgaatgcaataacaagtccatctgctcacataccatggcgcgtacaatattataatttacatcatttctaaaaatgccttgttccactcctttgcgataaaattccatagccgaatctaaattctccttccggctttcatcaatgtaacgcattaccttgggatatttctcaatatcctcaaagaatttcctgtttgtattctgaaaatcctgagcacttctttgaaaaaacttcaagaggacttccaaaacattttctgctttggaagccacttgagtcatatattcctgcatctcctcccgatgtagtttcataacatcaagtaataaatcctctttgtcatggaacaattcataaagcgtgcgtttagatatagataatccggtagcaatatcatccattctcactgttttgacacctttctgtgcaaatgctttcgctgccgccaaaacaatgtgttccttcactaccgttttatccgttctttttttcctgacgctgttcattcttaacataaagggaaacaaagatacacttattttataatacccaacttagaatttctgacaaactctatcaaatgtgcaatttcaggactaaacggaacctgttcttcaatacgacgcaatgcatcctctgtagatgtattcactttatacaatatacggaaagcatgcgctatatgtttaataaccgtttccgagaaaccttcatgttgcaacacggtggtattgatgctataaaaagccgtaggctcatgggcagctacacaataaggaggaatatccttggtaaaacgacacccaccctgtacggcagcataagcccccaagcgagtctttccctgcatcaatacattggaagtaagaatagcataatcctcgactacacaacaacctgacacctgcgaaccgttaccaataatacagttgttaccgatggtcacatcatgtgagatacgtgctccctgcataataaagttaccgcttcctaccacagtctcatctccggcgaaagtagcgcgaataattaccgcattctcacggattgtattattattacctatacgggcgatggtatcatcacccgtatatttaaaatcttgcggagtagcagcaattacagctccgttataaatggtatttccgttaccgatgcgtgcgccgctcataatgctggcgttgggcatgattacattatcatcacctatctccacattcttatcaatgtaggcaaacgggtgaatagttacgtttttcccgatttttgctgacgggtctacataagctaacggactaatcatattcatattatttttaaggttaattattcacgtccaccgcccaatgcgctgtacagattgataacagcctgcatacgctggaaagtatcggatacttcgttcaactgtgcactcagcaatgactgttgtgcagtaatgatttccagataagtggcctttcccgcctgaaacaaatcattgttcatctccaccgctttttgcatttcggaaacctgtgcctggtgctcactcaactttttgtctgccgtatcatacaggaacaaagcatcacttacttccttaccagcttccagaatagtctgctgataattcatcttggcaatctgttcttccgctttcgatacttttaaattggctatcaattttccacgctggaaaatgggctgagtcaatgagccgatagcattccaaagcataacggcaggattagaaatcactgtaccattggaaccattagtccatcccaaagtacctgtaatattgacactgggataaaaagcggaacgcgcctgattggtagtataataagcgctagctaatgccaattctgccgcttttacatcgggacggttctcaagcaactgtaaaggaactcccacagccaaatctgcaggcatcacttgttcttctaatgttccacgatctatattctggggagcctttgccaacaatacggaaatagaattctcagtttcgcgcacctgacgtttcaagtcagccaatgaagcctccgtctgatgataagtccccttgctctgtgccacagcagcttcggtagtcataccggcttccttcattgcttccatagtgcgcactgtttctttcattaacgccacattctgctcggtcacactgacttgacggtcgagcatcaataaagaataataagcattggctataccaccaatcaactgtgaacgcactgcctgctgataggccttactttgcaaataagatgctttctggccacgatgggcattcagcaatttgccgaacaaatcaacttcccaacttgcagaagcaggtaaagtatagttctttacaggagtacttttgtccacactagtcaacgaaccttgtggggcaagggccaaagaagggagataagacaagcgagctgatgtcaataacgccttcgcctccttcacacgcaggatagcagcctgcatatctacattgtttgccaatccctcttcaatcagcatctgcaatttcggatcacggaaaatttccttccatgacaagttacccatattggttgtatcgttagcagccaatgtatcgttggcggcaaccgggtcacgatagatgcctgtggcatctatcgactcggggcgatcgtatgatttatagatgtggcaaccgcttaataaaaacgtcgcgcaacataatcctattatctttttcattgttcttctgttcatttacgggtgtattgttcaatttcgggttcaacctctgtattgtccacactttcccactcaatcggtttgaatttctcttgtaaccattggaataccacaaacaatacgggtacgataaagatctggaaaatcataccaatcaacataccaccaatagccgaagctcccaaagtacggttaccatgagcaccaactcccatagccaacatcaacggaatcaaacctacaatcatggccaatgaggtcattaagatcggtcgcaaacgggccgccgcacccaagaccgcagcccaggaaatactcattccctgcttacggcgatccaaagcaaactctacaataagaatggcattcttcgccaacaaccccatcaacatgatcaatgcaatctgcatataaatatcatttgacatggttcctaaaatcatcttcaaagccggaatatttcccaatgctgcaaatccgtttacaaacaggaaactacccaacagaccgaacggtactgaaagcaatacggacaagggcagaatgtaactttcatactgtgcacttagcaacaagtaaacgaatacaaaacacagaatgaagatgatacctgtggaactgccactggtagatgcctcttcacgagccatacctcccaactcataaccataaccggtaggcaaattctctttggcaacttccgcaatagcctgcaaagcctgtccggaagtatagccactggcaggagccaccatcactttgatagaagtataaagattgaaacggctgataacatccggtccatatactttcttgacagaaacgaactgggaaataggagccatctcattcccattacgtatcttgatactattcaaagattccagattcttagttgcttcgggttccgcctgaatcataacacgatacatcttaccgaaacggttgaagttagaagcatacaaaccaccgaaatatccctgcatggtagttagaatatcactggggctgatacctgcctttttacaagcagcagcatcaatatccaacatatattgggggaagttcgggttgaaggtagtctgagccgaattaatttcgggacgtgccttcaacgcatccatatagtccaaaacaacgtcataaaaatgattcaagtctccaccggtcttatcctgcatattcaactcgatatcactggatgccgaataacccggaatcataggaggagcaaagaacaatacctgcgcatccttgatgatcttctgtgcacgcataaacaacgtacctaccacaatatccgaattctgcatcatggaacgttcttcccaatctttcagtttaataatgatagaaccgtaagaaggaccctgaccaccaataaaaccgaaaccggaaatcaccgtgcgggaatctacagccggttcggcagccaccaagctgtctacacggtttaagatttccattgcacgttcctgtgaagtaccaggaggcagtgtcactgcacccataatggtaccggtatcttcattaggcaccatgcccgtcggagtaaccttcataaagaataccaacaaaatgatagaagcggtaaccaacccgaatgacaaccatttcttatggataaagaacactacatgcttcttatacttcttcaatatagaatcataagccgcattaaaggctgtatggaatcgttccacacgagtcatcttctttgttccatgtccttcatcatgcggtttcaagaaaatagcgcacaatgctggtgacaaagtcaacgcatttaaagcagagaaacctatagcgatagccatagtgataccaaactgacgataaaacgtaccagcggtacctcccatgaaacttaccggaatgaacacagacatcatgactaatgtaatagaaacgatagcgccacccaattcgctcatggcatcaatagaagcctcacgggaagacttatatccctgatccaacttggcatgaaccccctcgacgacgacaatggcatcatcgaccacaatcgcaatggcaagcaccatcgccgaaagagtcagcaggttcacactgaaaccaatcagtttcagcacaaagaaagtagccaccagcgccaccggaatggcaatagccggaatcagtgttgaacgcatatcctgcaagaagatatataccacaataaacaccaaaataaatgcttcaatcaatgtcttaattacctcatggatagaagcgaacaagaagtcattggcattttgggcaatattgatattcaaacctgtcggcagtgattcctgtgcctttgcaagcacttcctccaaattagaaatagtttcggtagcattagtacctgccatctgataaacgatacaagatacagccttgtggccatttaccgtattattgaatgtataagccagacgccctaattctatatcggctacatctcccaaacgaagtacattaccatccggcaaggccttgataacaatatcttcaaattcatttgtttgctgcaaacgtcctttataacggatcgtatattggaaagtctgatcaccacgttcaccgaactgtcccggagccgcctcaatattctgttcggccaatgctgccgaaacatcagtaggaaccagtttgtactgtgccatcacatccggtttcaaccagatacgcatagaataatcctgtcccaacacattagcgtcacctaccccctttacacgcttgatttcaggaatcaagttaatattagcatagttttcaatgaactcgatattatacgagtcggtttcatcatacaatgaaaagaccatcaacatggagttctggcgtttctgagtagtcacacccactttggttacttcagcaggcaacaatccttgtgccatagaaacacgattctgcacattaacagccgccatatccggatctgttccctgattaaagtaaacgttaatatcggcagcaccgttattggatgctgatgactggatatacatcatgttctccacgccgtttatctggtcttccaacggagcaatgaccgaattcaatacagctgtggagttcgcaccggtataggtggcacgtacctgcaccgtaggaggtgcaatatccggatattgcgtaaccggcaatgtagcaagtccgatgatacccagaataactatcaagacggagattaccgttgatagcaccggacggttaataaatctatctagtttcattctctatataccttatttatataaacgaagttaatctgtttatttttgattatttaaaggccgtggcaatatttccttccttctgatctttcaggtgttgttgatatttcgcctctttctgttccggagtaatcggagtaattgtttgtccgtccttcaacgtttgtacaccttcaactacaattttatcgccgggcttcaaaccactggtaacaatataattcttaccgtcactcaaattcgataccttgatctcagtatgcttcaatgtattatccgactgaagcacataaacaaactttttgtcctgaatttcctgtgtagccgactgaggaatcaaaataatatcctccatagtataagggaaaattacattagccataccaccactacgcaatacaagctgtttgttcgggaaaacggcacgcatacttaccgaaccggtagtctgatcaataacaccacttacagcgtcaatcttaccttcttcagtatacatcgtaccgtcagccaactccaatttcacagccggcatcttctccagttgttctttcagtgtgccaccggctcttgttaaacccaacaactgcttttcagtcatagagaaatacacatacatttcaccgatttcactcacggtagttaacggttgtgtaaccgaaggactcaccaaactaccaatacgatacgggaatgtacccaccacaccatctgaaggactggtcactgtacagaaacctaaattctgacgagcgctggtcaactgagcctcagcttgtgccaaactggcttttgcagaaagcaattggtctactgcgctttgatactcaaaatcactgataattttcttatcatacaaatttttcttctgttgttcgttcaaagtcagcgtattgacattcgattttgccatctctacagcagcttttgcctgacgttcggcagccgcatactgtgtaggatcgatctgaaagagtgcctgacctttctttaccgttgcaccttcgtctacacaaagctttacgataaagccggaaacctgaggacgcacctcgatatcctgaacacctttgatggtagcgggataagaagtagactgctggctggctgtagactgtacagccacgacggtaaactcgtcatcacccaacttcataccgctctgaccgcctccacaactgcttaaaacggccattgccgccgtaaatatcgcgaggcggctccatgaaaaacatttcatactatttactgtcatcttcataactaatattattgaactttacttatttatcgaattaacagaggtttatagaaaactttttgaacccaattagtttttactgccgcaaaattagtcatttttccggcatttgttcgcttagcccattagctttaactataaataacgtgcgcaatagaaggatactgattatgtaaaatatatttcacatatattcaatctgtttccagatctaaacaagtaaaccatactataactcatacataatacggacatgaatgaaactattttttcactatctttgtcctacaaaacacgaaagaatgaaatctgattttcacactgatcaaaactaatactttaaaaatcatcaattcgacatcattttacactctttagacttcaaattataattttatttgtatttttgccaccaatttaaaacgacatctaattaaaagaaaaagattatggtcaagattaccaaagaagctgctttgctataccactcgcaaggcaagcccggaaagattgaagttgtaccgacaaaaccgtacagcacacaaacagacctgtcactggcttactctcccggagtagctgagccttgtctggaaatagagaaagacccacaaactgcatacgactatactgcgaaaggcaacttagtagccgttatttctaatggtacagccgttttaggactaggcgacataggtgcattgagcggaaagcctgtcatggaaggtaaaggattgcttttcaaaatctatgcaggtattgatgtttttgacatcgaagtgaatgagaaagaccctgaaaaatttattcaggcagtaaaggccatcgctcccactttcggaggtatcaatctggaagatatcaaggctcccgaatgtttcgagatagaaaaccggctgaaagaagaactggatatcccagtaatgcatgatgaccaacacggtacagctatcatttcatccgccggcttattaaatgcattggaagttgccggaaagaaaattgaaaatgtaagaatcgtagtaaatggtgccggagcttcagccacttcctgtacaaaactgtacgtagcattaggagcacggaaagaaaacattttgatgctagacagcaaaggcgtgattaccagtgaccgtcctaacttgacagaaagtaagaaattttttgctactgaccgtcgcgatgtacatacattggaagaagccatcaaaggcgcagatgtatttttaggactatcaaaaggtaatgtgttgactcaggatatggtccgcagcatggcagatcatcctatcgtattcgcattagccaatccgactccggaaatctcttacgaagatgccatggcatcccgccccgatgtactgatgtctaccggacgttcagactatcctaaccagatcaataacgtaattggtttcccctatattttccgcggagctttggatactcaggccaaagctatcaatgaagaaatgaagctggctgccgtgcatgctatcgccgatttggcaaaacaacctgttcccgacgtagtgaacgaagcctaccatgtgaataattttactttcggtcctgattatttcatcccgaaaccggttgaccctcgtttaattaccgaagtttccatggctgtggcaaaagcagcaatggaatcaggagtggcacgcaaaaacatcaccaactgggaagcctacaagacccggctgcgcgaattgatgggacaagaaagcaaattaacccgtcaactttacgaaacagcccgtcgcgccccacagcgagtagtatttgccgaaggtatccatcctaccatgttaaaagctgcagtagaagccaaagccgaaggaatctgccatcctatcctattaggtaatgacgagcgcatcgagaaactggcaaaagaactggatctgagcttggaaggaattgaaatcatcaaccttcgtcatgaccgtgaagctgaacgtcgtgaacgttatgctcgcatcctctcggaaaaacgcgcacgccaaggagccaacctccaggaatccaacgacaaaatgttcgagcgtaactactttggtatgatgatggttgaaacgggagaggccgatgcattcatcaccggactatataccaaatattccaacacgatcaaggtagcgaaagaagttatcggcatccaaccggaatataaacatttcggtacaatgcatatcttgaattcaaagaaaggtacttactttgtagccgatactctgattaaccgtcacccggacaccgacacgctgattgacatcgctaaattgtcaaagaaaacggtagaattctttaatcacactccgacaatggccatgctgtcttactccaacttcggctcagatacagaaggcagcccggctaaagtacatgatgcggtggactacatgcagaaagaatatccggaactggctatagatggtgagatgcaggtcaattttgcactgaacactaaattacgtgatgagaaatatcccttcacacgtttgaaaggtaaagaagtaaacacgttagtattcccgaatctaagttccgccaatgctacctaccagctcattcagtctatgagtgaaactgaggtaatcggcccgatacaaatgggattgaacaaacctatccatttcactgattgtgaagcttccgtacgcgatatcgtaaacatcactgcggttgcggttattgacgctatcgttgacaagaaaaagaaagaaaaataaataacattcaccataggttgcatagatttacacagattattagttattagtaccagcaaattctatctgtgtaaatcaatgcaatttgtggtgaaattatattcaattcgttaaaacaatactatgagaagaaaaccgctttccctcccacaaatcgtaatcctagccctattatggattaccatttgctatattattctaacaggaagcgaacatattgacggtcctttaatactatccattatcatttcgggagctttagtctttattccactattaaaatatctcaaggaaagagaaaaataatcttttatccgctttttagcttacattttgtacagattgatatttttacatgcattttctttataatttgttgcacatttcaatttttatctataattttgcgccatcaaaagaaacaagaagaattaattaacaattataaaaagaagtagattatgaatgcagctaaggtattagaagatctgaaaagaagattccccaatgagcctgaatatcatcaagcggtagaggaagtactaagtacaatcgaagaagaatacaacaaacatcccgaattcgataaggtaaacctgattgaacgtttgtgtattcctgatcgtgtgtatcaattccgtgtaacatggatggatgacaaaggtaacatccagacaaacatgggttaccgcgtacaacataataatgccattggtccctacaaaggtggtatccgttttcactcttctgtaaacttgggaattttgaaattccttgccttcgagcagacattcaaaaattcactaactactcttccgatgggtggtggcaaaggaggttccgacttctctccgcgtggcaaatcaaacgctgaagtaatgcgtttctgtcaggcgttcatgttagaattatggcgtcatatcggtcctgagactgacgtacctgcaggtgatatcggtgtaggtggccgtgaagtaggtttcatgttcggcatgtacaagaaactctctcatgaattctccggtgtactgaccggcaagggtcgcgaattcggtggttctctgattcgccctgaagcaaccggatatggtaatatctatttcttgatggaaatgctgaaaaccaaaggcacagacctgaagggaaaaacttgtttggtttcaggttcaggtaacgtagctcaatacacggtagaaaaagtaatagagttgggcggtaaagtagttaccatgtccgactcagatggttacatctatgatccggatggaatagaccgtgaaaaattggatttcatcatggaactgaaaaatttataccgtggacgtattcgtgaatatgctgaaaaatatggttgcaaatatgtagcaggcgctcgtccttggagtgaaaaggcagatatcgcattaccctctgccactcagaacgaattgaacggtgatgaagccaaacaattggttgccaatggtgtcatagctgtcagcgaaggtgcaaacatgccttctacccctgaagctatccgcgtattccaagaagccaaaatcctgtatgctccgggcaaagcagccaatgcaggcggcgtatctgtatctggattggaaatgactcaaaattctatcaaactaagctggagtcaagaagaagtagatgaaaaattgaaaagtatcatgaaaaatattcatgaagcttgtgtacaatatggtactgaagcagacggttatgtaaactatgtgaaaggtgctaatgtagcaggattcatgaaagtagccaaagctatgatggctcaaggtattgtttaataaaaaccattcctttattattaagtatatttgcagttcaaggtgcgggaaagacaattttccgcacctttctattttgaatgcaaacactttcacggaaaatcagtacctttgcaatctgttatgtataagaacaactattaaattacaaattcatgaagctgaaaaacttattcacctgcacagtaacaggactgctcctttgcacctcctgtatcaaggacgaagcccccaatgcggaagcggacatcttgagctgcatcctccctgccgagatgctaacaggtacagacattgactataaccgtccttacgacaaaagcctgaatgcttaccctatttacatagaagtaaacaacggcaccgacttgacccgactagcccccactttcgagctgactgaaggagcatctatcgaaccggccagcggaagcacacagaacttcaccaacccagtgcgctataccgtaacatctgaggacaagaattggcaccgcacctacgctatcaatatccattatccagaaaccaaaagtatcccgacggtctttaactttgaaaacgtaaaaactgtaccttataataaaaatgaatattatgtgctatacgaagcagcctctggctactccacactgacatggtccagtggcaatcagggatttgccttaaccggaagcggttacgctccgaatgactttcccaccagcatcagtccaaacggccgcacaggtaactgcttgcaactgattactcgcgagacaggaagcttggggactctggtaggtatgcccattgcagcaggtaacctgttcattggcagtttcgacataggctccgccatgagcgatgcgttgtctgcaaccaaattcggaacaaccttctattacgaacccattaaattggtcggctactacaaatacaaggcaggaccaaaattctatgagaacggagaatatactaaccgaaaagacgttttcaatatctatgccctgttttacgaaaagaccaaagatgtgcagatgctggacggtcatatcacaaagaacaattacgagcatgaaaacatggtagccgctgctgtcataaccgacacgcatgaaacaagcgaatggacccgctttgaactggaattcgactatgagcattatggaaaaacaatagatcctcaaaaattggcaaacggaggatacaacgtcagcattgtcctgtcggcaagcaaggacggtgatgtattccaaggcgcaccgggtagcaccctgcttattgatgacctggaactggtatgcaaacaaccacttagataaaaacagatatgaaaaaatatacattaaccctgatactggctttggtaagcctcggactgtatgcgcagacaaacagaaacaaaacaatcatcaatgcagcattgcatggttgggagtacgaaatcaaagcgggagtcaacctaggaggtaccgccccattgcctttccccgaagaaatacgcagcatagacggatataatccaaccctgtctatcactatcgagggaaacatgaccaagtggctggactcgaaaaaaaaatgggggatcatcactggactgcgtttggaaaataaaggcatgcgtaccaaagcaactgtgaagaattacaatatggaaatcataggctatgacggaaaccgcctaaaaggaaactggaccggaggagtacgcaccaaagtacagaactcttacatcaccatccccgtactagcagcctacaaactgaatccacgcaccacgctgaaactcggtccgtacttttcttatctgatggacggagatttcagtggtcatgtatatgaaggctatttacgtgaaaccaatcccaccggagacaagataaatttcaccaacggagccattgctacttacgacttctccggcgatctacgcaagttccaatggggagttcaggcaggggtggattggaaagcgttcaagcacctgaaggtacacgccgacctgaattggggcctgaacgatatattcaacaaagatttcaagaccgttacttttgatatgtatgccatctacctgaatgtaggattcgggtatgcgttctaatccaaaagttttccaccactgaagatttgttattctactcccccttatcttacttcaatttcccgataaacaacacatttctgaagtaggataaggaggagtagtggtttatttacaaaatcatgagggaagacttttactcttaaaggatcattttgttctccggtaacttttagaagtgttcttgacatatcagtttttttctctagaaagttggggacgtttataccctcatgctctcactaca

SEQ ID NO: 14467 - DNA, 5107 bp, Unknown
  gut microbiota DNA sequence
tctccgtaaatcggtaaagactgtaaatcacagtcgtttcatcctttttattcttgattcttattgattgagttcttgcagaactctgtctgttattaaataaattatctatctcatactccgtatcgcatccgctacacgcatcacatcctcgcacgtcatcattgatcccgaaggcagacagagtccacagttgaacagggcttccgatactccgttgacgtaggtgggggaggatgagaatacgggttgcaggtgtaacggtttccaaagcggacgggtctcgatgtcggcttttgccaagtgctgcatcagctgcaaggcgctgaaactggtttcgttactgtccactttaattgtagtcagccaataattgggtagaaacatggtagatttcttgggttctaccacagtgatacccggaagtcctgccagcagctcggtgtatagccggtggatggcacggcggtgtgcgatatggttgtccactacacgcatctgcccgcgtccgataccagccgacacattgctgagccggtaattgtatccgatctgttcgtgctggtaccaggggaacggttcacgtgcctgggtagcatagaacttcactctctgggcttcctcttccgtatggcataataaggcgccgccaccgctggtggtgatcatcttgttgccgttaaaagagaaaatcccatattgaccgaaggtcccgcaatagcgtccgtcgtaaacggcccccattgcttcggcagcgtcttccaccacggggatgccgtagcgggaggcaatgtcacagatttcgttcatgcgggcaggcgtgccgtaaaggtgtactggaagaatggctttgggcttgaggccggtctgtttcatacggtcgcagatggcctgttcaagcagtataggatccatattccaagtatcaggctcactgtctacgaaaatgggggtagcaccctgataacaaatggggttggctgacgcagcaaaggtgaaactttggcagatcacttcgtctcctttgcttacgcccagcatgatcaatgccaagtggatggctgccgtacctgatgataatgccacggcgtgtacctcctggtcgcaatgcgttgaaagccactgtgacaagtcatgctcgaagccatctacattcggccctaagggaactacccaattggtttcgagagcctcacggacgaactcttgttcggatccgcccatgtgtgccaatgacaaccaaatcttactcattttcagttatgaacaaaaaattatttgttgcgtgcttcggtgatgaacactacaacacggttccactcgttcttcagctggtatggttgcaggctatcacctttgtaatccacccggatgcggcttggatccacaccgaactctttcaccatcatgttgcagacagcttcggcacggcgctggctcaatttcaaattgtaggccggattaccagtctgtacgtcggcataacctgttatgatcaggttgacttccggatggtcttccaaatacttggcagcttctgccacattctttttctggatatcggtaatattgtacttgtcgataatgaatgatacggtcatacccaacatttcgttcttcactacctctttcttcacttctgtgacgactggtgccggtatcggcttgttacgctcttcattgatcttgcggttcaattcgtcaacccatgcctggtcgttcacctctgtgtagcggaagcggcgatcgccgtactggtccttgaaatgataggtgagacctaacatgacgttggcgtatgaatcccatttgcggtcgtaacgcgtaccgttgaaagcatcgtccgttgcgttgaaggtcgcttccagattgatgtcaagcgcattgctcaacatataattgaactggaggcctgcgcgtagagagaaaaacgttttgttgtcagtgctgatttggtagggggcaaactcctcactgggggatttgtcccactctttgactttatcatcgaatccgaaactggagttgaatcccatacccaagatacctactacattgaaacggatatcttcgtcatattgggcgaaaatattgtgcaggttgaacaatccgtccaaataaccgttgaacatattgaaaccgtagttccctttgccatacacctcgggaaaggcttcaatcacttcgctgttggcgcgtgacatttgtttcaaataagcgagttgcacacgtgctccgatggcgggtgagaagtatttaccgaccgagagggctatgcttggtctggtcatggtgccgaaagatccgaagcggctgttctcggacagcgaatgattggcgccggcctgaattccgatgaaccagttgtcaccggccttgtaatgctttagcgcccgtacagtgtcggtctttaatttccaagttgcatcgtcttctattgtttgtgcccataaagatacagaacaaaagaagaccacaaataatatagctatttttttcatgccaaattatacttttaaaatgggtcgtttattcattgatgtacactatgacgcagctcttttgtggatcgagcgatgcaatgacagcagggtttttctctataaaaatacgtccggccggaatgtcgtatgtgttggctagcacattgcggatggattgtgcccgtgccatgaacaattcggtgtctcttacttctttggttgaagtgatatagaggtcgccatcggctagcttctttatattttctgctgctgtgtaaacgtttacttcctgtagtttgttgattgcggcggaagcattgtcaaacgagataaacgaacggatatgattgctttccaccacttctgtctcaatctttgtgacaggaggagctgccgctttgttggcttcacgcaggcggttgatttcggcgtttgcttcgtcatatttcgacatgtcgtggcgggcgtaggtgaattgccgtgagccgttatgatttttgaaacggtagctgacacctgccaatatgttgacatggccatcccagcggtcgtttgaaccttcgccttcccaaccgtcgaatgagtcgtcaagcaaactgttcgtgatttcaagattaaagtcccacgctttaccgaggcggaatttcgccatcagacccaggcggatggacagcaggtcttgcgattcggtattgtatattccgtcgttccaggtacgcttgctgaagttggcggtgtgttcgtaaccggctcccaagataccgatcaggttgaaggtccggtcttcttcatacccgcaaaagaggttggtgaagttgaacaatccgtctaggcctacccccatggcgtcccaatagtagggcttgtcgttgcttgctcgtccggcattgcttccatagaaaccttggaggcggatacctccggcaggagcgatccacttgcctatggacaacgcaccggcgggacggaactggtcgaagaatccagaactggaagtatgggtcccccaggaataaaaggcgccggcctgcaatccgacaaaccagttgtctctgaatttagacttgtttaagagccgtttgtccccgcttgcagggtctgtccagtaagagatctcctttgtatcctgtttgacaggaacatcttgagccgcttcttgtgcaaatcccgtagccaaggttagaaatggcatcataaacacaatgaaatgttttttcattttgcgattcattttagttaaacattatattggatttcatttttttggatatatatgttttttcatccagcgcctcatatacggagttcatacttttgaactccggtacaatttgcttcaactgatatacggtctcttttttattgtccgtctgggcaacctcaaccaattgttgcagggcgggctttattttatcgtaatcttgttttaaactgatacctttgaatattttcggattaagggtaggagtagagttctcttcattatagagtaattcctcatatagtttctcgcccggtcgcagaccggtatagacgatttcaatgtctttgtccggttgtaaacctgccagttttatcatccggcatgccatgtcggttatttttacgggtttacccatgtcgaaaataaagatatcgtttccttgtcccataaaagcggcctctagaaccagtcggcaagcttcgggaatagtcatgaaataacggatgatgtccggatgcgtgactgttacaggccccccttccataatctgttggcggaaaagggggattacactgccgttgctgcccagcacattgccgaaacgggtggttataaaagaggttttaccaattatatttccttcttggatagcactcccgaggctttgtacgtacatctctgccagtcgtttggtagcacccatcacactgctgggatttacagctttgtctgtggagatcatgatgaatttctttacgccatatttcaatgccgtatctgccatgatgcttgtacccaggacattggtacgtaccgcctcgcatggatatttttccatcatgggtacatgtttgtatgcggctgcatgaaagatgatgtcggggtggtagagtcttgtctgcgactccacacggtcacggttgcgtacatcacctatgataggcaggatggagcggtctggaaatcttttcttcaactccatatctacttcgtaagtggcggtttccgaaaaatcaaacaagatgagctgcttcaggttgaaacaacataattgtcggcacaattcgctcccgatacttcctgccgctccggtcaccatgataacacttccggacaattcattgcggatattatccaagtcgatgtttatttcttcccggcttaaaagatcttctatctgtatattgcgtaattgtattttactccattgtgtttgttctgtcaaaaatggtgcaatgcgcaggcagatgtggttctccagaccgtattgcactatttcttcatcgttacggagatctgtgtggcttagaaataatatacaattgacttttaaggtgctgaataattttcgcagactattttcttcgtcaattaaatatatctgatatcccacaagccggtatttcttgttttcgggttt

SEQ ID NO: 14468 - DNA, 366 bp, Unknown
  gut microbiota DNA sequence
tatctgccccgttccgctccaccttcatgaactgatagcctgccacaaacttcttttcgaacagactatatgaacgattatcaaatgaaaacatacggactattctgcgattgcgagacatgactataaagacgtctccatcattgggctcacggtgaagccgttcacgaatgacagacagcacacggctgtgcttacaacgcatatcggtaaagtcacggacataataaaaatgattcagaccggtaacactcaacataacccctccaactgctctaccatacgaaccaaatccgggtagcttaaattcttttgggacaaatgcaagccattgctgatacgaatctcaacccaaatacgaaccgg

SEQ ID NO: 14469 - DNA, 590 bp, Unknown
  gut microbiota DNA sequence
gttgttatgatgcttcgtttcatggctatgcttggttatggggttacacttccgaacgatgcgttcagcttgttgccgaacatcgtcaggtcattgtcaagtttctgcgtggttatcttcgcatagatttgagtcgtgacaatgttcgtgtgtcccagaacacggctcacgctttcaatgggcatccccttgctaagagccagtgttccaaacgtatgacgagcgcaatggtaggagatttgcttctctattccgcattccgccattacctttttcagctgtttgcacatcgtccaatagttgattttcccgaaaaccagcttgtcttccgacagatacttgtaccgttcgattatctgcaagggaatatccagcagcttcacttggaacgggacatttgtcttgtgccgtttcgacaatatccatttctcaccattcacctccactatttcatccgttgtgagttctttcatatccacgaaagacaaggcggtgaaacaggcgaaaataaacagatcccgcaccaatgcgagggtggggttgtcaaactcgtgcgccatgattcttttgatttcgtcctctgtcagata

SEQ ID NO: 14470 - DNA, 540 bp, Unknown
  gut microbiota DNA sequence
gttcgaccacttcacggacgaagctttttattacgggtggtgcgaaaactgcggattgggagttgccctgaccgacaaggaggaaatccggaacgaaattttggagaaataccacaggttcaagaaagagaatgcttgtgagccacattacgcaaattgccggattgtccaaagggacagcggtcaggtcaaggatgtaagaattatgctttcaccggacaccggtatggccgatgacggtattttcttttactgccacacattggaaagccttattgggctgtccgttcccggcagggaaagtttcacccttacggaatgtttcggttttgccttgctgacagacagggaaaagatggaacggcaggtatttaaacatgaagcggacggaaagcccgttatcgtaacaggcagggaagtgctgcttttctatgggaagcactatggtataagaccggaagaattgaagcaatacgcaacggagtattgctgccatatcaaacattacagggaatatggatatccgttgctggacaggtc

SEQ ID NO: 14471 - DNA, 48231 bp, Unknown
  gut microbiota DNA sequence
aagtattagcagtagctgttacatgtgagctatctctgccagtaacacaagagcgccctatgctaacacgataattcgctttagaaacacttttatttgatattactcttgccattagacttgtttttaaattaataatgtatgcaaaaatacaaattagaaatggaaatacaaatattagtcttaattaaagacttaattttattcttaattaagctaatggtaaaaatggagttattaattatagagaaaaaggcaataatattaaaactgaaaattatgcttacaataatagtattacatatatttatcatacttcttttcctaaaaatgaaaagattccttatatttgcatcgttgttgtggattaaagtatttagttacttttattcgcttaaaagcccggtttctttttctgagtgccgggctttttctttggctaaaatcaactttatatctttgcttgataaattgccaagcatgataagaaagattgcatagagcaaagatttgataaaaataacgctatttcctacatttatttatatagtcaatcactttccgattagcttcgtccactttatcccggtcaaaatctatataaatgtcagtagtcttgcatccaaatgaatgtcccaatgccattgatataacatctttcgatataccaattttgtgagcgattgttgcccagctatgccgggcccaatatgtggtcaattccggaaacaggggctccctatactttttaccaccaagcccttttctgacagttggaccaatctcggataagttatcattcatacgatgttgaaaatccttgtaattcccgtattcatccaaaacagaaagcagataattttttcccttatacctttctattaataccatcgcctccggttccaactttatagaataccatctacccgttttagcccgtctgtactctatacgtccattaacagcgtttttagaagtgaggctgaacaaatccttagtatttatgcctataagataaaatatcagcatgaatatatcacgatattttttctgatgttcctcacattcgtaatctcggagcatagccaactgctccggcaacaatgagcgtttgggagtagcttcctgctctattttgaactttttaaaagggtagcaggttattatatcattctttatagcctcattaaaaacagcacggatatttctcaaatgaatactcaccgtattggttttacactcaagatattcagagaaagaagtgagccacttatatgtaatgtcatcaaaggttaagctttcccaattttcagtataagcctttatccttccaagcgtgtatgcgtataattctttagtgctttgggcctttcttgagttcatgaagctttccatgtattggcagaacaagcatttgtcctcgtcgtcgtagctatttccggaaatggctctttcaataatagtacgcaattcttttccacttttaggccttttcccttgcatgttaatcagacatagttctattactgaaagccgggttcttacaagctggttcagacttgtgcgggaaatgtgcttgattactttgttactcgtttcatcccaatgttccggcagcaaataaatgccggtaggaataagagtgtacgcacctttataactcacagaaatttttagcggataagtcccatcttttttggcagaacgcttatccaggtagatttttgttgccatagtcttaaaatttgcaggagatttgcagcactttctgccaaatcaagtcaaaaaagtgcataaaattccttttttttaatggctatcggaactattatcaataaaaataaacgccgatagtcaagttaacaacttaattatcagcgttttatttattgtcggggtagcgggattcgaacccacgaccccctgctcccaaagcaggtgcgctaaccggactgcgctacaccccgaatctttttattttttcaattgctctgtttctcaaaagcgatgcaaagctacgacttttttttatatgtgcaaacgtttgaagtgatttttttccacttttttttcgtgctattatttattaaattataaatcaacatattaacttcatttttttcatccgcaacaaagaaatttcagtgtaaaacaactccccttccctatttcactacttgccgagatacttccaccatgtaaattcataatttgtttgcataaactgagtccgataccactacctgtcgacttcgttgtgaaaaaaggaacaaagattttatccaaaacttcaggaagaataccactaccattatcacagacagaaaggaaaaatagatgtttgtctaaatcacaatgtgtactaataataacttcgggataggtttgctctacacaagcctcacctgcattctttagtaaattgattaatacttgttctatctgtgaacgatctagcatcagaatcgtttctgggttttctactttatatatatattgtatgtttttattagggaatagttttttcatatcactcaacaactcacctatatttactggagccagtatcgggacagacagacgagaaagtttacgatagttttccacaaaattcagtaatcctttacttcttctatgaatagtctgcatcccttgcaacatgatattgtaatctttctcattcataccattttgcacagcacgctcacttaatgtttcacttaatgaaataataggtgcaatggagttcattatttcatgagtaagtacacgaatcagcttttgccatgcttccatttcattttcctccaatacagcatggatattctttaaattaactaaccggagttccgtaccatgttgagcggaatattcggataccgtaacagccaattcttgtagagtatctcctttatgtattcgtactgttttaatttctccaggctgtaatgacaggataatagtaggaaattcagaatttaacagagccaattccctgactgaatgaatacaatagccgcacaaatcctgcatggcggcccggttcatccaatgtatattgcacagactatctactaccagcaaactgctgtcaacagtattcaataatgtttcataatattgatatcgctcttcattctcggacaaccgagtacggaattcagcaacaacattatttatttcttgtgccaatcgttgttctgtacgagttttgtgctgggtagaaaaactcaaagagaaatctgcataacgaataccttctatcattcgtgatatcatacgggtcgttttatattgccactgacagatatagatgataatacttgccataatcatcagcgaaaataacaagcaaaaatagagtgaatgttgataaaacagatatgcagctatagctactacccccatcagtaacatacaagctatcatccgtaaagtttgtaaacgattcataaacctaatttttcaagtttccgataaagagcgtaacgggtaatccccaaatattccgctgcacgactcaagtttccttcgctgcgcttcatagcacgttctatggcattgcgttctaattgttccaagttcagtatctcatccgtattcaccctcttctcgggttgtggctgcaacatgaaatttgcaggctttaacaatggcgagtccgaaagaataatcgcccgttctatggcatgctgtaattcgcgtacattacccggccaatggtaacgcatgagtttctgcttggcttcgcggttcagtccgtttatctctttcttatatttatgagtataccgttgtaagaaataatcagccaataagagcacatcctctcccctttcccgcaagggaggaatggcaatctcgatcgtattgatgcgatacaacagatcttgacggaaattgccctcctccaccaattgtcggatatttacattcgttgcgcttatcaaccgaacatcaataggaattatatccgttgctcccaaacgtgaaatctgccgcttttctatggctgttagcaatttggattgcataggtaatgacaaattccctatctcatccaaaaaaagcgttcctcctgatgccacctccatacgtcccgcttttgctttacgggcatctgtaaaagctcctttttcatagccgaacaattcactttcgaacaatgattctggtatgctccccaagtcaatcgttataaaaggacattcacgacgaggagaaaaataacgtagagaacgggccaccaaatctttaccggttccattttcacccaatatcaaaatattagcatcagtatccgataatttccgaatagtatcaaaaacctctcgcataggcgctgagtgccctatcatctgaggcatctcttcatcctgcccgctcaatgctacaacttgttctttcagttgcctgacctctttacgagaatcacgaagtttgatagccgacgaaagcgtagcaagtagtttttctttttcccaaggtttgggaataaagtcaatagctccagccttaatagcccgtacagctttatctgtatctgcataagcagtcataaacaagacaatagcctgcgggtctaattttaatatctgttctagacaattgaacccttcctgcccgctgatagcatcccggcggaaattcatatcaagcagaataacatcaggttgaaaagtagtcataaaatgctcaatacgagtcggttgagtagtaacttttattttttctacgtagggttccaataaaaggtttagtgcaaaaagcacgtcctcattatcatctataatcaatatttttccttttgtattcattattttattctcatatacattattatacgaataaaagattttctatccgctattttgcaaagatattgttttttttagtgtgttgtctgtgcgaatacgcactatttttgtgcgtatccgcacagagacgtttttattttttagcccacaaaattctggtaaacaaagagataagataatggcacactatttgattagtctataatactaatatattaagttatgaaaaaaaaatcaataatagttatcagtttatgccttgtagcaagcatagtaattctatccagcaataagatctatatgctttatataggtgactgccgtcaattgtgggaagaagcacaaacccactatgtcaatcgacaatatgaaaaagcacgcgagttattagaaaagatagctcgcattgatacggcccatcatgcccaatatctgacaggcgacatgtatttaaaaggcttaggaggtgaaattgattatgataaagctttgaaactttttcatcaatcggcagcgggcggaaacacttatgctgaaaacaatataggttttatgtacacatatggtttgggagtcactaaggattacagccaagcattcaaatggttgaacaaagctgccactcaaggaaatccagaagctcaaattggtatggggagcctttataaaaatggttggggagtacgtaaagattgttacattgctatgacttggtacctacgttctgtggctcatggtaatacggacgccatgaacaatatcggttatttatataaaaacggacttggggttcccaaagactttgaagaagcttatttttggtttaaaaaagcagcagataagaataatccgatagctcaatataatataggaaatatgtattgttatggcgagggaatggaaaaagattttgctaaaggagccaagtggctgactaaagctgctttacaggggaatgctcctgcacaatataacctgggtcgcatgtatcagtggggtaaaggcgtagagaaagacttacaacaagcccggttctggttccaaaaagctatagacaacggtcatgaaaaagcaaaggaagcattaaccaaaataaaaagcgacttatccgaaaaagacactgaagactcgttcctgtttccctaactataagacaaaaatactaataggtataaagacataaaaaaacgaacatgaaactatattgtattatagcactttcccttctgcttcgcccggaaacagccgcagcacaacaagaagaattaatgacactgagtttgcaacaagctattgaaatagcacaagaaaactcaccggaagcacaagctgcccgtcatacctatcgggcagcttattggaactaccgttttttccgggcgaattatcttccctccgtcacattaacttcatctcctaccctgaatcgggagataaacaaaattacccaaccggatggaacaaaccaatttatccagcaagaccagttaagcacagacctcagccttaaaataaatcaaaatatatggttcaccggtggcagcttgtttgtaaaaagtaccacccaacgcattgatgaatttgaagataatcatacagcgtataacacccaacccgtagtaataggttacgaacagcaactttttggatataactctttaaaatgggatcgtcgtatcgaaccccttcgctaccgggaagcccgtaaagcatatgcagaagcattggaacttgtagcctcagaaaccagcactcttttcttcaacttggctactgcacaaaccaatcttgacatagctacctacaactatgcttctgctgatactttatacagatatgccgaaggaagatataatataggaacaataactgaaaacgaaatgctacagctggaaataaacaaactgacagaagaaaccaatatgatgaatgcccgtatcgaagtagaggaccaaatgcaaacactccgttcctttcttggcattaatcgggaaataaatttacgagttgttccggaagacagtattcctcaatttgaaatctctttacaaaaagcattacaactggcattcaaaaacagtcccgaccctgacacttataaacgcaaacaattggaaagccgcagcgcattagcttctgcaaaagccaatgcgggtttgaaagctgacctgtatgtacaattcgggctttctcaaaccggaaataaatttgcagattcttaccgaaaccccatgaatcaacaatatgccagtattggtatttctttacctatcctagattggggtcgtggaaaaggacgcgtccgtgtagctcgttccaatgtagacttagtagatacacaagctgaacagggaatgaaagattttgaattgaatgtatgtaaaatggtccgtcagttcaatcttcaagcataccgtgtagcagtagccgccaagacggacaagacggccgaccgacgccatgatgtagcacgtcggctttatatcttgggaaaatcgacaatcctggacctcaatgccgccattacagaaaaagataccgcacggagaaattatataacagctttgaaaacttattggagtctgtattatggtcttagaagtatgacgggatatgatttcctcagaaaagcagagatttcatgtactatacctaaaccttaactacacgacaggtataaatgacctttgtattatcgccatgcattaaaaaagaaataaaaaaattatatcaaaaaacataaactaatggatataaaaattgaaaagaaaccgtggtacatccgctatcgctactatatgatagctgcactggcctttattatcttccttatctatgtgataagcctttcattaggtcctcgcaaactgcgtatcgaaacagacaacattcagatagccgaagtaaaagacgacaaatttatggagtatgtagatgtggaaggactggtgcaacccattcttaccatcaaagtaaatactcgtgagggcggcagtgtagaccgcattgttggagaagaagggaatatgatgaaacaaggtgacaccttgttgatattgactaatccggatctgattcgttccattgaagaccaacgtgacgagtgggaaaaacaacgaatcacttataaagagaaagagatagaaatggaacaaaagagtctgacactgaagcaacaaacattacaggcacaatatgaaatggaacgactgcgcaaaagcttcggattggacaaagaggaattcaaaatgggaattaagagcaaggctgagcttcaagtatctgaagatgaatataagtataaactgaaaaatacggcattacaaatggaaagtctgaaacatgattcatccgtaactcttatccgcaaagaactattgagaaatgatctggaacgtgaaagcaaaaaactgaaacgtgcggaagaacggttggaagacttgatagtaaaagctccgattggcggccaactaagttttgtgaaagttactcccggtcaacaggttgcttcgggagaaagtatagctgaaataaaagtgctggatcaatataaaattcatacttctttaagtgaatattatattgaccgcatcacaacaggtcttccggctaccgtaaactatcaaggaaaacgctacccgctgaaaattactaaagtagttcctgaggtaaaagaccgcatgtttgatgtggacttggtatttaccggagaaatgcccgagaatgtccgtgtaggaaagagcttccgagtacaaatagaattgggccaacccgaacaagctatagttatcccacgtggaaacttctaccagtctactggaggacaatggatttacaaaataaactcatcaaaaacaaaagctgtaaaagttccattgaacataggacgccaaaacccgcttcaatatgaaatcacagaaggtttacagcctggagaatttgtagttatcacaggatatgatacctttggtgacgcggaagaattaatattaaaataaaacatgcaaaatgagaactttaaaatatgcctggcgcttcttaatgcgttctaaatcatatactatcattaatttgctgggactagcattcagtctggcatgcagcatcatcctaatacggtatatccatagggaactgacggtggatgcacatagcgtagatccggaacatatcatcattccgttacgggatatggaaggaaacattcatccgggaagtttgcaacaagattggacggaagcggattctgtttatatccttgaccatcaaatagtggagcaatgccgtctcatgctacagcaacgagacaatgtggtatacgagaacagcaactatgcaatgaatatagcagctgtagattccactttttttcactttttccactatccgattgtggctggcgaagctagtttagaagctcccaatgacgccattatcacccaacactatgctcgtaatatatttggcaaagaaaatccgataggtaaagtattggaatattatggtaaaaatatcactatcaagggggtgatcggagaattggactgcaaatcattacttcagttcgatatactagtatcatacagattgatagaacgctggcaacgtatggatatatcactgatgcgtatactccccggagtaaatctagacaaaataaacaaaatcagcaatgtgtacagaaaagataaaagaggaaacagaatacgttggaagtttattgcttggaaagatttatactgggaaaattccatcggtcacgatgacgattacgattccattatgcaattcgggaaccgtacgcacctgtatattctttcaggagtaaccatattgctattattggtgggtatattgaatttcatcaatatttatatggtatttatgatgaaacgttctaaagaatatggagtaaaaaaagtattcggcttgcagcgtctgcctttgtttttacaaatatggatggaaaatcagttattagcctttgccgcactgctaaccgcctggctgttgatagaagcaacccaagtaccagtcagccggttgatgaatgaacaaattagcaattcggcattcgactggaaattgtctttgggattcatcatattattacctttagtcacttctatttatccatacatcagatacaattatctccctcctattgtatctattcgttcaataacatcaaaccgtcatgctatcactgtacgtatgacattcctttttttccaatacgttataaccatattactccttatcttgtcattttactttggcaagcaactgcatttcctgctgaatacctctcccggatatcggacagaaagaattcttagagctgagttgttacacgagaacaaaaattatctgcgctctgaaacagaagaaaagcgcaatgagcgctttgcccgccaagaccgtatcaagcaactattaaacgagtgtcctcacattgaaatgtggatgagttcccattattctatattaaggggaagctctatctgcatgttgttaaatgaccaagatacccgtcaacccatgctcaccctatttccttccccacaattcttccaactgtatgatttgaaagtactggaaggagaaatcccccaaaaatttgaaggttggagtgactataaaatggtactaaacaaagcagcaatgaaagccatgggctatgcgcaactagaagatgcttttgtacgcagcgaatctccactttggattagtgtcagcgaaaaaggagaaatggaagaaggtggaaccaaacttatgcctgtagtggctgtaatagacgattattacccaagccatctcactgaaggaataaaaccgatggcatttgtcgtggggcccagcagtggcaacagcgattttttgattgccgtcaaccccgataaagaaaaagaagtcatagaatatctgaagaaaacagagaaagaaatatataataccgaagacttcacctatacttggttgacagatgaagttcacaaactttatgctcaggaccgtcaaacagcaaatatttatttcgtctttgccttgatagcaatcatcatctcctgtttgggactatttggattatccttatttgatatccgacaacgttatcgtgaaattgccatccgcaaagtaaatggtgcagggatgaaagacctttacctgctattattccgcaaatatatcaaagtaataggttgtgcatttgtattggctgttccacttgcccattacctcatatatatgtatacacaggattttgtgctaaaaacacctataggtatagggatttatttagcagttctagctatcatttcctttatttcatcaagcacagtaatttggcaaatacacaaagctgctcaaattgatcccgcaaaaattataagatcagaataaacacacataaaatatgaaaacactgaaatattcctggcgctttttaatgcgttctaaatcgtatactatcattaatttgctgggactggcatgcagtctggcatgcagcatcatcttgatgcgatatatccatagagaactgacagtggacacacattgcatcgacagggagcatgtgtatgccatctgtaccaatacagaaggcaaccggggactaagtggactgaaacaatataactatgataccatttctattgacaatcgtttcgtagaagctatgaccacctatattccattggaaaaggactatgtcatttccggtaccaaccgtattccggcacgttgcctcgttaccgacagtgtcttttttcagttatttcattatcctatagtgcaaggaaagctatctttcacaacacctcagtcggcattattaacggaaaaatacgcccgcaagattttcggtaatgaaaatcctataggtaaaatactacgttatagtaatggcaaagacattaccatagaaggcattgtaggagaacctgagtgtaaaactacaattaactttgatatcatcctctcttctaaattatcccaacattgggaaaggatgaatacggagctctatcgtttcctacccggtacagatataaatgccataaataagacaggtagtgttccacggtatataaatgatcctgaatatgacactcgcacacatactttttctttaatttctgtgaaggatatttactgggacggttctttaactgaccgtgaacctgctatgtttctttcgggaaaccgttctcacttaatcattttgtcgggcgtatgcctgttattgctcctcaccggcatcttgaattttattaatctttatctggtggcattattacgtcgcggaaaagaatatggattgaagaaagtatttggcgtatgcggcagaacattgtttgccaatatatggattgaaaatacattactagttctgagcgccttattagtatcttggcttattattgaaataatgtctgcccctactgaatatttgttcgacactcacttttcttatacggctttcgacggatggctttcggcaagtattttattattgttaccagtaataacttctatttatccatacattaaatacaattacacctcccccattctttccattcgctctatcggtgcccaaagtcattccaaacattttcgtatgttctttctaggggcacagtatattataacttttttgttagtggtactttcactttattttaatcgacaacttggaatgttattaaataccgagccgggctttcgtactaaaaacataatgaatgtaaatttagtatatgaatcgaaagattttagcagctatacttatgaaagtatgcaacaacgccgccaacgtgtcatgcaattggataatgaacttaatgcatgcccctttattgaattgtacgaacctagctatgagaatatccttactcctacctttggtacaaattatctgaacaataaaggagaaaaggtgtttctaaatattcattacgccactcctgcatttttcaaattatatgatataaaagtaattgaaggtgagatacccgatataaataaagaagaccggcgcactgtttttgttgtaaacaaagccgcactgaaagcattaggctatacttcaatcaatggcgttggagtgattgaagaaaatcaaaaaaaggctaatgctaacgcttctcttcaacctattgttgcagtagtagaggattattttgaaggacatttgacatctggaatcaagcctactatctatcctgtcggagcacggttcagtggtgatctctatcagatagcttatacacccggcaaaaagaaagaagtgattgatttcttacgtaatttggaatataaactctatggaagtgaagactttgaatatacttttctggaagatgatatcaaagcaatgtatacacaagaccgccaaacagccactatttattctatttttgcaagtatagctattattatttccagtcttggtttgttagggatttctctttttgacattcgccaacgatatcgggaaatagcgattcgtaaagtgaacggtgcaagtgccaaagacctttaccgactgttattccgcaaatatataaccgttttaattatagcatttgtcatagctattcctttggcttgttatctgataaatacctatactcaggattttgcagtaaggacacctgtcagtatagacatttttatcatatcattgctgttggtaataatcatatcactgggcaccttagcataccaaatacaaaaggcggcacatattaatccgacgcaaatcatgaaaacagaataattttataaaacaacggaaatatgttaaggcattatataaaaatggcaatgcgccacttattaaaatataagatacaaaatctgatatctatcgtagggctatctgtcgggatattatgttttagtatctgtctttattgtagccggttcatcagcgaagtagattcttgcttttccaataaggaacgcatagcagacataaatttatgtacaacacggggagatttgtattctggtattccggcaacaacgattgaagaattgcgtaaacttagattcgatgaggttcaagattttacctttaccgtttatccccgagagcggagttacaacgtagagataaaagaagggaaagaattaccatacgatcatttgatgacaatggaagtagactctctttttaggaaagtattcactccccaaatactacagggatcatgggaagtagcctccaacacccccaatgccattatactgacccgctctttagcaaaaaagattttcggtgagtcagaaaatcccataggcaaacgtatgatattgacacaacgtctttttacagcaccggataccactcctcgtactggaggcataacctataccattcaggccgtgatagaagatattcccctgaataccagcctgagttttcttgagaaactggatatgctaactttgaatgacagtgaaggaacattgcaattcaacggtcgtgataatatgaccggaggttttggttttgctctgctacgtccaggtaaaacagcccgaaaattagaagcccgttttcgctccataaatatgaagcactacatgtatgacgaagaaacagctataaccgcctcaccctttggagagaaattttgggataagtccatcgctccttattttgcaggaataaccatgatagtaggcctgctgatcttactgaccggacttcttaatttcttccattttcttatgggaactttcttgaatcgtaaccgtgaatacgggatacgcaaagttatgggcagtggaaaccagcgacttttttaccaactctttgtccagtctgtcatcattgcattcatcgctttcttgtttacgttctgcttgattgaaataatcagcccctatttgaatttcaatttatttaattatgttcttatcattgaaaagaacctcttgtttatacagaccacagagtatatgatattcatcttatttttatgtatgatattatgctttataactgtattgcgcatacattacacatctatccagacagagattcatggcagtgagataaaacgtcataaacatggaatgcgaaatatactgttaggtatccaattttttatatgctggattttcgtcgcatttaccgtagctctttatatgcaagcggaaaaaacggaatctaccctattcaacacattgactgaaaaagaaaaagccaatatactaagtttctccatagattatatgtttatgaagaatgaagagaaactggctttaatagaacgtatatccaaattttccggtgtacaagacaaattattggcagacatcagttatctgaaaggtatatcaggtactgggatgcaaatggaaaaaggtaacccggaaagcagttttgaagtaaatgtcatgaatgtttccactaacttcttccaattcatgaacatacctttactatcgggacacacattaaaagccaaagaggatttggtagtagacaaaacatgggcggaacgccagaaaaaagatccgttaggaactattttatacaattactcggaaagctataccatttgcggtatatgtggcgattttatcgccaatgtatataatcaaagtcctggatttgtattcttacccagcgacttcaattattatgtaggtcattgctatctgaaatgcgagccggggaaaacggctgaaataaaaaaaatgatagaaaaaacattgcaagaaacacttccggaaagtattcaccctcaagtcactacattgcaggaggatatatatgaagcacaagcaacagaaaataaattgaaagggattatcctgttcttttctatcgtcagcctgctcattaccttgttgggagtttattcgaccatcacattggatacggaacgcagacaaaaggaagtagctatccggaaggtaaatggagcaggattgaaacagattattttattgtttgcccgcctttatataagactgctgactgtttccgcagttattgcatttccattaatttatatagtcatacaaatgtggaaaaaagcatatattgtattctttaatgacggtatcatatattgggcaggaattttcatcggaataacatttattacggccctcacggtattattccgtattctgagaatagcacgaattaatccggcagaagtaatcaagaacgaatgataagaaatagattcaactatgataaaacattgtctgaaaatagcaatcaggaacttagtaaagtacaaagtccaatcggcagtcagtattctaggactggctgtaggatttgtctgtttttcattatccctttactggatacattatgaaatgacatacgaccatttccgccaggatgccgaccgtatctatatggtacgcactaatgacgaatatacggaagggaaaatttcaacacgagttccctattctttagccgcttatttggcccagcactttccggatatagcagttgccgccccctttcatctcatttctgaacgaatcagcgtgaatgacaaatatcaggatgccgttttttcatcagcagacagtgcatggatgaatctgatggatatccggattattaagggaaaccgtaactttatgctccccaaagataatgccgaaatagcaatcactgaagaagctgcaaaaaaatggttaagaacggaagacccgataggaaaagaggtgaaaatgctcagacgtaccaaaaaaatttgtgccattgtccaagctgaaaacagacataccaattttccttttgactttataggcaacccagaattgggaaaaacctggtggtatatcacttggagcatactgattaaggtaaagccggatacagacattgaagaattagaatcaaaaatcaatgccaacctgcctgccgaactgaaacaagtgacattgaccagaaaaaccggcattgaacggattatacttactccgctttccaaactacattatgcaaaagatttccgagatgataaagaagctggaataacttttcagtatatcatctatttttcaatagccggtatattaatcataacgtgtgcgttaatcaattatctcaccttatttattaaccgcatgagagtccgtcaacgggaaatgacactgcgaatgatacacggtgccaacatccgctcgcttgtttctctcttaactgtggaatttttgcttctgttggcgtgtgcagttactaccggatttctgctgatagaaatatgctttccatctttcatagaacttacaggaattgatacagcaaaatcctctttatacggagaagcctttcttttcatcggtttgatctccctaattatattgactgccattatcggacttttatatatactatatcatcgttccctacacctctctttgcgttacaataccggaaggagtaccggtacacagttacgtagaggaagtatagttcttcaattgtttgtctgtttgtcttttataggatgtaccgtgttgataaaccaacaattggattacctgcgtcaccgcgatttaggattgaaaattaagaatcggggcagcttctctgttatgggagacatggattatactcctttaataagaaaaataaaagaacttcccatgataaccgaagttatgcaacctgactattaccccatagtatcacaactgacagctatcggacaatttgacaattgggagggactggatattcctattgatacgccagttccggttaagttatttttagggaaagaagattttttccgtttttacgatatcaccttattagccggtgaatggcttgatgacctatctacttatgaagacatcattatcaatgaatcactggcgcgccgaatgggatggagcccacaagaagccatcggcaaacatattatacaatcatacattacctatacaattgtcggcgtagtgaaggattgccattatggagcaccgactttacccattccccatacaggctttctggttggagaacaaatgggattaatgcagcgttctgccggtatcttattcaaatataaagaaggaacgtggaatgaatgtcgtaaagcccttgaacacctttaccagaccgaatgttctcctgagaatatcttgcgtctgaacagtgaagaagaagtatataataattacctgcgttccgaagaaatgctgacccggctgcttagtttcgcgtctttagtatgtattcttaccgccatgttcggcatttattctttagtaacacttacttgcgaacaacgtcgtaaagaaattgcaatacgtaaagtaaatggagccacagtatggagcattctattcctgtttttccgggaatatctaatcatgctttgtattgctgcactgttcgcttttccaatcacatacgtcattatcaagcaatggatattaaactatgtccggcaggtcagtatcagtccattaccattcatccttattcttatagggctggctctgacagtcatagcaggaatcagttggcgggtatggaaagcagccaacgagaatcctgcagaagtaatcaaaaacgaataacttttaaaatataagattatgatcaaaacagtaaacttgcagaaaatcttcaaaacagaagaagtcgaaacatgggcattgaacaatgtcaatctagaaattaaagcaggcgaatttgtagccatcatgggaccatccggttgtggaaagtccaccctgctgaatatcctcggccttttggacaatcctacgggaggcacttacgaactgaacggaacagacgtttccaaatttaccgaagcacaacgcaccaatttacgtaaaggagtcatcggattcgtgttccagagctttaacctgattgatgaattaaatgtattcgaaaatatcgaattacccttattgtatatgggaattccggcgacagaacgcaaacgtcgggtagaagatgccatgaaccgtatggctattgctcatcgagtaaaacatttcccacaacaactatctggcggacagcaacaacgtgttgcaatagcccgtgctgtagtagcaaatccgaaactgattctagcagatgagcctaccggtaatctggattccaagaacggcaaggaagtaatggaacttttgaccgagctgaataaagaaggaacaacaattgttatggttacccactcccaacacgattccggctatgcaggaagaaccattaatttgtttgacggacaggtggtgaatgaaataaaaatataaattaatttatcattgaggtggtttaaccacctcaatgataacaaaaggatattataacaatgaacatcttcttaaacatcaaacttattgtccgcaactggtggcggaacaaacttttttttctgatttcactattcagtcttacagctggattaggatgcaccaatctgcttatgactttttttatccatgaatataatgtggaaaaatataataccgaccgtaacctcatttatctattacgtcaagactctccaatggaagaaggtattaaagtagcctactctacctcagacgcagccacacagataaaagaaaaatatgctgaaattacagatattctgcatgtgaacggaatgtctggtaatctttgcaaatataatggaacagatatcaaacagtttctttttatcagtgccgactctactttaaatcaatttttcccttatacaactttagaaggcagcctggaagaagtcctcacgaccccggacaaagttgctgtaaacaaaagatttgctcaccgacttttcggaaatcattccggaattggagaaatcctggaaataatcaacgaagaaggacaaagtaaaagttataaagtagcagctatattagaagatcgtccacaatcttttctgcattttgatttgctgacaggactatccgacaaatcatggggaggtcccgtattattaaaactacaaccaggtgcatctcccttagctttacaggaaaaaattaaaaaagacaagattccaactttagtaccggattcacaatattatattgatccgataaaagaactatactttaatactggaaaagacagtaagcagcaacagttggctttcttccaacactgtgacgtattattactatatatcagtctgatttcagccctgcttgtacttatcatcgcttgtttcaactatacaaatctgactctctcacgtatcatgcagcaacttaaaatgatacatatagagaaattgatgggagcaaaatcaaaagaaatccgcagtcagttatttcttgatgcagcacttaccgttttatttgcattcctgttatcattattgcttattaatgacatgctgccgtggtttaatgatctgttgtctacccacctcttcttctctttctttttcagctggcaagttctacctttacttttatccttcattttcttcatggctgtcattcccggtctgtatatcagccataaactctctcaacagactttgagcaagtatcggcaaacttatacaggaaggaaaaagcaacaatttatatggttgcttgttaccatccagtttatattttcaatcgggttagtgtatgcaaccactcttacacaaaaacaaatgaatctaatcaaatcccgtgcataccattacgaaaatacaatagaaataggaaatggcacccttcctctgtttccgctctatcaggaactgaaacaaatggatgggatagagtctataagtctttccatgagttctgtactttactgttggcttcgtgagcttcctatccgacaaacagacggtagtatccaacataattttatagcacacatccctactgacacagctttcttccaaaccatgcatatccgacaaattgccggagtatctccctcccaagcctgtcgggaatatactcatccggcttttatcaatgaaaaccttgcgcgtctgctgaacatagatgtttcccacataggccataaactaaatgaatttgatggattctcggattcattaagtattattgcaggtattttcaagaatttcccatttaactccctggaagaagaaatcggtggtcaacaaatatctattggaacagaacaggatttaattcagaaaggaacattcatacaaatgaaactcattcctgaatattataaagaaacattggtatctattgaaaaattatggaaggaaatgaatggtgacagaggtttcaaatatgtagatatgcataaagaatttatgttgcgtaataacaaagtaattatactctcccgaatccttatcagttactcatttattgcattggccctgacctgttttggcctgttcggtatttcatggtacgctgtacgtcatcgtacccgtgaaattgcaatccgtaaagtgcatggtgcttccaattgggaaatagtatggttactaaaccgttcttttctatggcaaatactagtagcatacatcatcgctattccgataacgtggttattaatgcaacattggctggagcaatttgcttatcgaatttcagccacacaatggaatttcctgactcctattcttattgtattggtaattacaaccattacgataacaatacatagttatcttagtgcacgcactaatccggtaaacagcctgaaaactgaatagcaaacgtctatgtatatgttcttttttgctgaaaaagcaccaaacttacagaaatcacaacaaggattatgcccaaagcactgtatgtagtaaagagttcattgaatacaaatacccctaccaggactgccgtaagaggttccaatgcacccaataaagaagtcaacgtcggtcctgccaattttacagccttcaccaacgtgatattagagatcgcagttgcaggaagtgccagtcccccaatatagagccaagtgattacattggtttcccaacggacccccttatcatagaaaagtcctcccagcaaaaagagcaaggctcccaaccccatcacataacaagttaataccgtagaattaacttccactgctctagtttttcttatacctattatataaccggcataagagaaaaccgatatgcaggccgctatcaatcccaccattctatttccaccattatattctatatttccggaagataagaaagatgctcctactaatgataaaacgatagcagcgaaagtcacaatagacttcttttctctaaagaaaacggccattgttactgcaacagccagcggatacataaaatggatgatagaagcaacaccacttgcaatattctgataagctatgacaagactgaacgaagtaagcgcacgcagcaagctcagtccgaaaattgttttaaaatttttataccctatatgaaaatcacatttggtaagaaaagcaaaaacaagcaagacaactgtagcaactccccaacgataagtcagcacttcaaaagaagaatatccaatagccaacaagcttatggaaaaaaacggtgccaatccgaaagtcgcagaagacactgctgcatatagaataccttttatccgattcatgtccttttcaagtaaaacggatacaaagatagacaataatacataataaaaaacaggttgcctttacaaaggcaacctgtgatatcttattttatgatttccaacttcttaaagcacttggtcagtttatccacagcatagtcaacttgttcctttgtatgagtagccatcaaagcaacacgcaccaaagtatcttgtggtgcacaagctggtggaataacaggattaataaatataccctcgtcaaatgccagcttagtcacttcgaatgtcttgtccgtatcacgaacataaagtggaatgatcggactttcagtatcaccgatttcaaaaccggcctgacggaaacaatccaaagcataatttgtaatcttccacaaattctcacgacgttcgggctcactcttaaggatatgaagtgcagcacgtgcagcagctgttgcagcaggagtattacttgcagagaatatatatgagcgtgagttgtgacgcaaccagttgattgtatctttatccgcagcaacaaaaccaccgatagaagccagtgactttgagaatgtacccataataacatctacctgatctgtcagtccgaagtgatcgcagactcctcgcccgtcacgaccgaacacacccaagccatgtgcttcatccaccatgatacttgcattgtatttgtctttcaaacgaacaatctcaggcaagttagccaaatcaccttccatagagaaaaccccatccaccacaatcagtttcacagattccggtttacacttctgaagttctttctcaagggcttccatatcattgtgcttgtatttcaactgggtggagaaagaaagacgacgtccgtctacgatggaagcatgatcacggtcatcgcagataatgtagtcattgcggtctgtcaggcaagataccacaccttcatttacagtaaaaccggtagaataaaccaatgcatcatctttccctacgaattccgccaattccttttctaactgaacgtgcagatcaagcgtaccattcaagaagcgtgaacctgcacaacctgtaccatatttacgggttgcagcaatagctgcttcgataatccgttcatcgtaggttaaccccatatatgagttggagccaaacatcagcacctttttaccatccatgataacctctgtatcctgatggctgtctatctcacgaaaataagggtaaacgcctctttccatgtatagttgaggcaatctgaatttacttaacttgtcttgtaataatcccatatcctattgtatatgtaagcctcgtcggcctactttaaaataatgtatataaactcactaatacattctgtcttcaaggtgttcccgtcaaaacaggctgcaaagatagtaaattctacaaccgattgtactttttttcaaaaaaatatttagggacatcaaaacttttaggatttagggtagttataaacaaaatgtattacttttgcgtttaataaagagctaaactaccaaagtaaaagtatgaccacaaaaaagaaaattgtatttgtcgttaatcctatctcggggacacaggggaaaagagccatattaaaatggattgacgaacgtataaaccgtacactttatgattatacgattgtcaaaacacaatatgccggccatgctgaaaaaattgcggctgcagctgccaaagagaaagtagatatagtagtagctattggaggagatggaactataaacgaaataggacgtgcactgatacatacggatacagcattaggtattataccttgcgggtcgggaaacggactagcgcgacatttacaaattcctttggagcccaaggctgctattgacattataaatgaaagttctgttgcctgtattgattacggaaaaataaacaacataccttttttctgcacatgcggagtaggttttgacgcatttgtcagcttaaagtttgctgattcaggcaaacgcggactactaacctatctggaaaataccttgcatgagagtctgagttacaaacctgaaacttatgaaatagaaaatgaagaaggaacggtaaaatacaaagctttcctgatagcctgcggcaatgcctcccaatatgggaataacgcatatattgctccacaagcctcgttaaccgatggtttgatggatgtcacaatattagagccattcacagtgttggatgttccttctttatcttttcaacttttcaacaaaaccatagaccaaaacagccggatcaagacattccgtactaaaaagattaagatacatcgttcaaaacccggagtaatgcattatgacggagatccgatcatgggaggaaaggatattgaggtagaattgattccacacggactcaacatcattgtttctgataaaaaaaaagagaacgaaccttttagtctcttacaacaaatatccgaaatattcagtggtatgaagcctaaagctgaaacttttgctttccggcacagccatttatttgagcttaacaaaagtttattgcgtcgtctatccaaaaaacaataaaaaatatcttttttctgaacatcagtaaagactctgccaaataaaaacagtttctttgatgatgttcagaataatccaccctctacattttcaaataaaattctttagtcaaggctatatattcttcactatacacatgacgtgataattcgatggtcaaatcgtctgtaacacatttatccacagagaatttgaaagcaagcaatacccgtctgggttcagttccaggttttgtatgaattaaagtctggtgtgagagatgtaatccgtaacgagtggcagccatcaaaaaagattctttaccatcagcaggaataatcacagaaaaaacaccttcggaatgaagcaaacgagcggcagattctgctaatttatcaaaatcaagaagatctgtatgccgagcgatattacgctgcctttcagggcatttcaatgaatcggtaaaataaggaggattggaaacaataacatcaaagagtgtttccgatgtaaaatggcaaatatcctgcaactccacttctatcctatcctgccacggagatgccgccacatttccacgagcttgttccacagcatccgcatctatatcaacagctcttatctgggcattgcaccgctgtgccatcatcaaagaaattaatccggtcccagtaccaacatctaaaatattacgggcagaaaccacatcaacccaagctcccaataaaactccgtccgtaccaaccttcatggcacatctatcatgataaacagtaaattgcttaaaagaaaaataaggatttggcatactatatttattaaattagctgtcaaaaatagaaaaatccatttaattactccaattattaggaaatatttgatttttaaaactcaattagttcccatgaattttccttattcgacaaggaatgattaactttgtccccgttttgggcattgggctcaatttaacacaagaggaataaattatgaagaggaataagaaagaggatattttgttgaatactgataacgatgacatctctatgttagctgaaatccaaacggatccggatgaagtaactgctatggaatttaataaagaaatacctgttatgcctttacgcaacatggtaatgtttccatctgtagtaatgcctgtaaccattggacgccccagcacattgaaattggtaaatgctgcatacaagaaaaaacttcccatagcggtagtttgtcagatacagggagacatggatgatcctggttttaatgatgtgtaccatgtaggagttattgggaagattctccgtgtattcgaaatgccaggtggaaataccacagtaattatgcagtcaaacgggcccaaagtacatttggacagtatcacaaaaacatctccatatttgaaaggaatagtgactcctattccagaggcaaatgaccaactggaaacggacgaattcaaagcattgattgacacctgcaaggatttgacgagcaagttcatagaggcttccgagaagatgagcccggatactgtttttgcaatcaagaacttggacaatccggaaattttggtaaactttatttgtgcaaacttccctattccggtagaagaaaagataaaattgctaaaagctggcgatttgcaaagccgcctgtatatgctggtcaagatcttaaatcgtgaagtacaattggctgatatcaaacaaagcattcaaatgcgtacacgcgaagatattgaccgtcaacaacgcgaatatttcttgcagcaacaaattaaaaacatacaggatgaactgggtgccggacaggaagatgagatagatgaactccgccaaaaaggaagaaccaaaaaatggagttcggaaatggcagaactttttgaaaaagaagtttccaaattggaaaggacaaattcccaatcaccagatttcaatgtacaacttacctatttgcaaaccctgttaggattaccttggaatgtctttaccactgacaacctgaatataagtaatgccgaaaagacattgaacaaagaccactacggactagagaaagtaaaggagcgtatccttgaacatttagcagtgctgaaactaaaaggtgatatgaaatcacccatcatctgcctttatggtcctccgggagtcggtaaaacttctttagggcgttccatagcggcatcattgaaacgtaaatatgtacgtatgtcattgggtggtgtgcatgacgaagccgagatccgtggccatcgtaaaacttatatcggtgccatgccgggccgtatcatcaaaagtttgataaaagccgagtcctctaatccggttatcattttggacgaaatagacaaactgggcagtgaccaccgcggagatcccagttccgctatgctggaagtgcttgaccccgaacagaacaacactttccacgataactatttggatgtagattacgacttgtctaaagtaatgttcatcgctacggcaaacaatttgagcaccatccctcctgctctgctggaccgtatggagttgatagaggtcagcggatatatcacagaagaaaaagtagaaatagctcgccggcatcttgtccccaaagaactggaagccaacggcattaaaaaagaatatgtgaagttctctaaagctgccttggaatgtatcgtagaaaattatactcgtgaaagtggggtacgcgaacttgagaagaagataaacaaggtaatgcgtaaaatagcgttggaatttgcacgtgacggctatgaagtgatgcatgaaataaaacctgccgatgtacgcaaatacctaggcacgccagaatatagccgtgacaaatatcaaggaaatgaatacgccggtgttgtcacagggctggcgtggacagctgtcggaggtgagatcttgtttgtagaaaccagtttgagcaaaggaaaaggcggtaaactgacgttgaccgggaacttgggtgatgtaatgaaagaatcggctatgctggctttggaatatcttaaggcacataccaaactgctgaatttacaggaggatatctttgacaattggaatatccacatccatgtacctgaaggagctatccccaaagatggtccgtcagccggtatcaccatggtaacgtcattggcatccgccctcacccagcgtaaagtaaaagcaaacctggcaatgacaggcgagatcacattacgtggaaaagtcctgcccgtaggcggtatcaaggaaaagattctagccgccaaacgtgccggaatcaaagacatcattttatgtgaggaaaaccgcaagaacattgaagaaattcagccgatgtatctagaaggactgacattccattatgtcacggatattaaggaagtattggctttagctctcaccaatgaaaaagtaaacggtgccattgattttaatattaccaatcaaaaaacagaagaaaagaaataaatatgacttttgacttacaatatacagaccctaaatcgaatgcccgtgccggattgataacgactgaccacgggcaaatagaaacccccatctttatgcctgtaggcacattgggaacggtgaagggcgtgcatttgcatgagttgaaagaggacattaaagcgcagataatcctaggaaacacttaccacctgtatttgcgaccgggactggatataatagaacgtgccggaggtctgcataaattcaatggttttgaccgtcctatgctgactgatagtggtggttttcaggtattctctttatcaggtatccgcaaaatgagagaagaaggtgtggaatttcgctcacatatagacggttcgaagcacttgttcactcctgaacgggtgatggacattgaacggactatcggtgcagatatcatgatggcttttgacgaatgtactccgggaaccgcagattatgaatacgcaaaaaaatcaatgcagcttacccatcgttggctggaccgttgcataaaacatttcaacgaaaccgatcccaaatatggttatcaacagtcattatttcccatagtgcaaggctgtgtttatcccgacttacgcaaacaatcagcggaatatattgcctccaagggagctgacggaaacgccatcggtggcctagccgtaggtgagccaaccgagaaaatgtacgaaatgatagaggttgtcaatgaaatcttacccaaagacaagccccgctatctgatgggagtcggtacaccggtaaatatactggagggtatagaacgcggtgtagatatgtttgattgtgtaatgccgacccggaacggacgcaatggaatgttgttcactaaaaacggcataatgaacatgcgcaacaagaaatgggaggatgattattctcctatcgaggccgaaggggcatcgtatgtagataccatgtacagccgtgcttacttgcgccatctgttccacgcacaagaactgctggccatgcaaatcgcttctatccacaacttggcattctatctgtggctagcaggcgaggcccgtaaacacatcattgcaggagatttctctacgtggaaaccaatgatggtaaaacgcttatctacaagattataaattactagaaatgaagaattggttcaagacaaacacagattcatccccaaaggataaaaaatggtggaagccgaatatcagttggctgaaactggataaatgggtgaaaagactggacatatatatcattaagaagtttctgggaacctactttttcgctattgcattgattatctccattgcagtagtgtttgacgtgaacgaaaatatagacaggttcatcaataataaagctccgctgaaagcgattgtatttgattattacatgaacttcatcccttatttctccaatctgttcagccccttgtttgtctttatcgctgttatcttctttacttccaagctggcagaaaactcggaaatcattgccatgttctccaccggaatgagttttaaacgaatgatgcggccctatatgatttcggctgcaatcatttccgttgttactttcggactgggagcatacgtcatacctaagggaaatgtaacccgtttggattttgaggaccgttataagaaaaaaaagaaacaggaatatgtgcggaatgtgcaactggaagtagacagcggggtcattgcctacatagaacgttatgaaaattataataaaacgggataccgcttctccttagacaagtttgatgacaagaaactagttgcccaccttactgcccgaagtgtcacttatgatacagcatctgtacacaaatggacaatcaagaactatatgatacgtgagatggaaggtatgcgtgaaaaaatcactcgtggtgaccgtttggatacgatcattaaaatggagcctcaagatttcctgattatgaaagggcagcaacaaaccatgacaagccctgaactgaaagaatatatagacaagcagaaaagacgcgggttcgccaacataaaggaatttgaaattgaatattaccaacgtatagccatgtcctttgccgcttttatcttgacaaccattggtgtttccttatcatccagaaaaatgaaaggaggaatgggactgcatttaggagtagggttagcacttagtttttcatacattttgttccaaacagtgtcagcaacctttgctgtcaacggaaacacccctcctattatagcggtatggattcctaatatactttacacatttattgctatctatttatacagaaaagctcctaaataattataggagcttttctagtttttgacgccaatcctcgccgttctccggttgcatcgtaataaagcccagttctttaccaataacaatattggccgcaccgtcatctacaaatattgtttcagccggattcagtttactatcttttatcatatagttaaagatgccagaatccggcttggtggaaccggcttcgtaggaagtgtaaatcttatcaacataagcgtccaatggctttcccgcagaagtaaatgcattactcctcgcccatcccatcacataaggattggtgttgctcaatatatataccttgtacttcttacgaagctcattcaagtaatccaatttatattgcggcacgtccgtaacaaatcctttccacccattttccacatcttgataagtcaattctttcccacaaattttactcaattcacagcgaaaagtttcagcgtccatgttcccattttctacttcctgaaaaatcccctgctgatggtatttccctaataaactgtccgcttccctcactcctatccgctcaaacgcctttacagcctgttcacggtcaaagctaatgataaccccgccgaaatcaaacacaatattcttaatctgtttcataacctttttatttatccgccgtaaaggtaagcatttgattgtgaatgataaatgatgtaagtcaataaaataccatatagcaaaaaaaaccgtagattccattgagaatccacggtaattatttttgttgtatttttcttcctttcggaaatgttctctcaattcaaataagaagagagttcggatacggtgatatccttggcaacaataacgccattttcatctaacaaaaagttcttaaagcctcttttcaagcgataagtctgatatagatccgatgaaacaccagccaattccacaaaacaattagaagttgatatctggtcttttttaatggtttcgttaaatatcgacttgtattcatcaaatgaaacggaaaccatttctacattgtcggcctgcgcgatggcatgattcaaagtagcattctgcatccttgacagagcatcatagctggcccaaaaacttagcagtacatatttacctcttaaatccttcaagtcaatcaactgcttttcgccacagatagtaaatgtaggagccttgtctcctatggtcaagccttctgtcggcgtgtttttccctacaaaagagaatgaaatcaaggaactaataattaatacaacaaaaatccactttacatttttaatcatgtaattcgatcttagttaatactatccgagactgcccttaaacagtgatttccacccggaacattatctttagtactgataatcaataccatttaaattagaaatctgcgacaaaggtaaggagttttgaaatcaactccaagattttttctcaaaaaatatgttatatagcataaaatcatccttttcatcgagaaaaaagaatgcagaaaatatagctgataaggatttatttacgtacttttgcaatatgtaaatagcaaccacaaagtatgaataataatactgaacttattttaatcagaattaccggtcttgatcggccgggattaaccgcttccattacggagattttgtcaaagtatgatgttaccattttggatattggccaggccgatattcatagcaccctgtcattaggcattttattcaaaagccaggaaaaagattcaggtaatatcatgaaagagttgctatttaaagcttccgcattaggcatcaatatccgtttctatcccgttactgtggaagaatatgaggaatgggtaaatatgcaaggcaagaaccggtacatcctgactttactgggacgcaagctgacagccaaacaaatcgcagcagtcacaggaatattagcggaacaaggtttaaatattgatgctatcaaacgtcttacagggcgtattccattggatgagcggaaagcgaatgtacgggcttgtatcgaattctccgtccgtggcaccccccaccaacgggaagaaatgcaacaggcgttaatgaaactgagcagtgacctggaaatggacttttctttccaactggacaatatgtaccgacgtatgcgacgcttgatttgtttcgatatggattccacattgatacagacagagtgtatagatgaattagccgaacgcgccggtgtgggtgaccaagtacgagaaatcacagaacgcgctatgcgtggagaaattgatttcatagaaagcttcacagaacgggtggctttgctgaaaggactggatgaaagcgtaatgaaagaaatcgcagaaaaccttcccatcaccgaaggtgtggaacgtctgatgttcgtgttgaaaagatatggttacaaaatagccatcctatccggtggattcacctattttggtaattatctgaaagataaattcggcatagattacgtatatgccaatgaactggaaatagtaaatggcaaattaaccggaagatatctgggagatgtagttgacggaaaacgtaaagccgaactgctgaaactgatcgctcaagtagaacgtgtggacatagcacaaactattgctgtaggagatggagcgaatgacttacctatgttgtccgaagccggcctgggtatagcattccatgcaaaacccaaagtagtggctaacgcacaacagtccattaatacgatcggattggacggcgtcctctatttcctaggtttcaaggactcttacctggaagaacgcggcaaactctaaagaaagaagtaactatatatatgaaattttcagaactaaatttagaagaaggggtgcttcaggcattagatgccatgagatttgaagaatgcactcctgtacaagaacataccataccggtcattcttgaaggaaaagatttgatcggagtggcacagaccggaaccggcaagactgccgcataccttttgcccgttcttaatcaattaagcaaaggcggatatccggaagatgccatcaattgtgtgatcatgtcacccacacgcgaattagcgcaacagatagaccagcaaatggaaggtttctcttattttctaccggcatccagcgtagctgtttacggaggaaacgatggtgtgcgcttcgagcaagaaaagaaaggtttaactttgggggccgatgtagtcattgctactccgggacgtctgataagtcatctcagcctaggttacgtagacttgtctaaagtttctttctttattcttgatgaagcggaccgtatgctggatatgggattctcggatgacattatgcaaatagtgaaatatctgccgaaagaacgtcagaccatcatgttctcggccactatgccggctaaaatacaacaattggcaaaaacgatcttaaacaatccggtagaaataaaattagcggtctcaaaacctgcggaaaagattatccaaacggcttatatctgttatgaacgccagaaattgggaattattcaatccctgttccaggatcaaacacctgaacgggtcattatctttgcctcttccaaattgaaagtaaaggaggtgacacaagcattcaagcggatgaaactgaacgtaggtgaaatgcattcagacttggagcagtcccagcgggaacagattatgcgtgaattcaaaagtggcagaatcaatatcctgattgctaccgatattgtttcgcgaggaatagacattgacgatattcgtttggtaatcaactacgatgtaccacatgacagcgaggattatgtacaccgcatcggccgtacagctcgtgccaaccatgatggttgcgccattacttttgtcagtgagaaagagcagacccaattcaaagctattgaaaatttcttgggtaggaatatctataaaatcccggttcccgaggaattgggagaagcgcccgaatacaacccgcgaagtggcgccggtcgtagcaatcacaaaggtggcagttccagaaaacaaggcaattataaggggaaaaagaacggtacgcccggtgccaataatagaagaaacaccccaaaagaatagacggaagagatgatatctaaaaatcattggaggaagacggacttgttttcctccaattttattttatgaagaaagtcacttcatggctctctgcaaaatagatgcggggcaatcacaaacatccattatatgtattgcttgtaggatatataatctttcacctgtaacattactaaccttacaacccacacattagtaacgtatgaggtgacacgttactaaccttccggtatgcacgttactaacctttcaaacgtcttgttcctttcagaaaagaacaaggtctttaaaaaaaagaacaagacgttttcattgaaagaacaagagctttttaaaatttgacctgttgttttttccataacggcatctacatgccgaaacaccttatttttccttcagatctttcagctattccgcaaacgccctgcccatcggcattccgactgaaggatatgcattgtgaaatgtttcagccgaaaaatatccttcaggaaaaccgattccccaagaatcggaagaaccaccaatccgcctgaaggattccaatctccagctgaagaattcccgagcccaatccttcagccggaataccgacaggcagggcatttgcgagcagactgaagcttttgaaggatttttcggggtattctctatagagcatgatagcgaccaaatagtaatcgctaaacgaaaaaatgacatagccacgactaccttaccaactcgaatgcaagtcctccatccttgccagcagtgatattgaccatataacaagatgcgccgtcaggtacgcataccgtggcctgataatgataccctttagaatcgacgcccataaaatccatatccgacaatatagcccattgcaagaaatcatccggaaccacccccttgaacatctgcttggtgatatctttggcataaagactcttcctgccttcatacacgcaaatgtgtatgatattgtcataatatacattatccaccccaagtccttcctccgaaactcccggacgcattactttaatctttgacgggttaatgtacacatatccgcgataacggacattatcgtatgtcaccaccgaatctttcttaataacttcgttataaacagggatttcccgagtatggataaatgccagagaatcattctctgtatcagacttatgcagacgtatcacatctcccacagccgaatgaaaccaaaaaatatgctcctcctgcttctcaatcttataaccattagtccgtgcaccatacgtaatcaacgaatcgcctataattttaaaagcaacgggagctgtagcggcatctgcataaaacagggtgtcgcctttcaccctcagtaatgccgtttccgtattatcgtccaaccatataccttccaacaaagattttgcctccttgttctcttccagggcggatgctttttgttgcggagttccacaagaagacagcgcaacagccaacattattatcgaaaaacgtttgtacatggttattctctctattttatttatcgaccgatgcaatgataaacaaaccccatttcctgtagttcgtcaccatcataaatatttcgtccgtcaagcactacaggctgtttcatcgccttcttgattactccccaggtaggaagacggaactctttccactcggttaccagaatcaacgcatccgcatcaagagccgcatcatacatatcgtgcgcataataaaccgactctcctatccggcggcgggactcatccatagcagcaggatcgtatgcgcggacattgcaacccgactgtttcaatttctcaataagtaccaaagccggagcctcacgcatatcgtccgtaccgggcttgaatgcaagtccccacaaagccactgttttgcctttcaaatctccattgaatacctttaccagtttctcgaacaaaatgcctttctgattctcgttcacatcttccaccgctttcaacacctgcatggaataaccattctgctcggcagtcttaatcaacgccttcacatctttcgggaaacaagagccaccataaccgcatcccggatacaagaacttacgcccgatacgactgtcggaacctattccgtcacgtaccatatttacatcagctcccaccagttcgcacaagttggcaatatcgttcataaagctgatacgggtggccaacatggagtttgccgcatatttagtcatctcggcagaaggaatatccatgaaaataacgcggaagttaaccagcatgaaaggtttatagagcttggtcatcagttttttagccctttccgactctacgcccactactacacggtccggactcataaagtcgtcaatagcattaccttctttcaaaaattccggattagaagccacatcgaaatctatcgactcccctcttttctccaattcctctcggatgaccgcttttacttttcgtgccgtacccacaggcaccgtactcttggtcacgaccaaggtatatttcttcatattagcaccaatcgtcttggcaacttcaagcacataacgcaaatcggcacttccgtcttcatcaggaggagtgcccactgcactgaacacaatatccacattgtccagacaactctctaaagaagtggtgaaatgaagacgtccagcctttacattacgcaagaccatatcttccaatcccggttcataaataggaataataccctgttgcagattagcaatcttatccgcatttacatctacacaagttacgtctacgccagtttcggcaaaacatgttccggtaacaagtcctacatacccggtccctacaatcgctatattcattttatttaattcgttagtctaactttttcgctgcaaaattacaataaattatgagtgagttgttattttcttccataaaagttgcgctgaaacggaataaaaatgctaattttgcgatatgattgaattggctagacatatagaaattctgttactggaaaatgactgtgtgattattccagactttggcggttttatagcgcactatcaaccggcacggtatatcaaggaggaaaatctttatcttccccctgtacgtactattggtttcaatccccaattgactataaacgatggtttattagctcaatcgtatatgcaagctcatcacaccgattttcctgatgccacacgcatgatagaagaagaagtagccggattgaaagaacaactataccaaaacggatgtgcagaaatgcatggtataggggtcttacattataatattcatagcacatacgagtttcatcccaatgaggacggtgcattatcacctaccttatacggacttagttcgttttctatcaccagattagaatatcttacttcaacaacgtctgcaacaaccagagaattacttccccaacaagaaaaaagaaagagaacagtacgtttcaaacgtcagtggataggaaatgcagtagctgtggcaatagctgtagtcttatttttcttcttgtctgttccggtagagaacacatatgtggacaaaggtaattatgcttctttaggtacggatggtctgtttgacgccattcgttcccaatctttggcaacgaccttgataaccgttccttccagaccgcagcaacccaagaagacgaatatcaaaaataatcaaaacacgttgaaacctgtaactgtaaaagtagaaaaggtaggaaaagcacaagaagcagtacccaagaatgctgttgcagcaaatttgaacagtacagaacagccagttgccaagcctgtcgctgtaagtaaacctgcccttgagaagaaagaaacagcaacaccttcgagcagtaaaaaaaataattattatatcatcgtatccagtttaccgacagccaatgacgcgcagcaagtacttaatgagtacaagcaaaaaggatataaggatgtaacaatcatagaaggtaacggacgttatcgcctgtctttgtgcaactttgcagataaagccgctgcttataagaaattaaatgaactgaaacaaaatgatgcattcaagaatgcatggatattgagttctaaataaacaagattattttttatgaaaagagttttgtgtcccaaatgtgacaactatataacttttgatgaaaccaaatatacagaaggccagtcgttggtctttgtatgtgaccattgtaaaaaacaattcagcatccgtatcggaaagtccaaactgaaagcaacccgtaaagaagaaatattggacgaacaagccaataaagaggattttggaagtatcgtagtagtagaaaatgtattcggatacaaacaagtattacccctgatggaaggtgacaacctgataggacgcagaagcaaaggcactgaagtggatattcccatcgaaacatcagatccgagcatggacagacggcattgtatcattaatgtgaaacgcaacaaacaaggggaaatcatttataccctgcgtgataatgacagcattacaggaacatttctgatgaacgagattttggggaacaaggaccggatacgaatcgaggaaggcgctatcatcacattaggtgcgactacgctgattctgcgtgccaccgagaagtagaacaatgaaacgtattatcttaatcacaggaggccaacgttcgggaaaaagttcatacgcggagaaattggcattaagcttatcacccactcccgtttatatagctacttcccgtatttgggatgaagaattccgccaacgcgttatcaaacatcaagaaagacgcggaccggaatggacgaatatagaagaagaaaaagaactaagccgccatcaagtaaaggataatgtagtattgattgattgtgtcaccttatggtgtaccaactttttctttgatttggatgcggatgtagaggctgcattacaggcagtcaaacaggagtttgataattttatccggcaagatgccacttttattttcgtaaccaatgaaataggttccggagcagtatccgaaaacgccattcaacgccgctttacagatttacagggctggatgaatcaatatatagcttcaaaagcagaccaagtatatttgatggtatcgggaattcctgttcctataaaataataaatacaatgaaaaactttcatattgagtatcccgatgaaagctttcgggaggcattgatagacaaaatcaacaatttgacaaagcccaaaggttcattgggtgttctggaagatcttgcattgcaaatcggattaatccaacaaaccctctcccctacattaagccatccgcacaacgtactttttgcagccgatcatggtatagtagaagaaggggtaagcaagtctcccaaagaaatcacttggcaacaactaagtaattttttgcatggaggtgccggagttaattttttatgccgccaacatggttttaagcttgtattagtagactcaggggtcgattacgatcttccttacgagaaaggcattatcaactgtagcgtaggacgtggcacgcacagttttctaaaaggccccgctatgagtatggaagaaatggaattatgcctggaacgtggagcaaagataacggatatgattcatgcagacggttgcaatgtggtcagctttggcgaaatgggtattggtaatacctccccttcttctatctggatgcatttgctgacaggaatctcattagagcaatgtgtgggtgcaggaagcggactggattcagaaggcatccgtcataaatataatgtattgaaacaatcggttaaccattataccggtaacggttccgtaaaagatatcatcgcttggttcggaggatatgaaatggttatggcaataggcggcatgctccgggcagcagaattaagaatgattattctagtggacggcttcatcatgaccaattgcattctagccgcctcaaaacttcatccggaagttctctcgtatgccatattcggacatcagggagatgaaatcggtcataaactagtattggatgccatgaaagtgcgccctttattaaatttaggtctccgcttgggagaaggaacaggagcgatatgcgcttatcctatcgtcgtttcctctgtaaacatgataaatgagatggacaatttcgcccatgccgccatcactaaatatttttaaccatgaaactgcttgcctccctcatttttttcacacgccttccgttttggaaaatagctaatgtaccacctgtttactttaaacgagtagtggattactggccctttgtaggatggctgacaggaggtatcatggcaggcactctatggatcactgcagaatttctacctgtacagatagctgtgctcatggcgctggccgcccggttactagcaacgggtgctttacacgaagatggattggcagacttctgcgacggcttcgggggcggtacatcacgtgacaagattctgtctatcatgaaggattcacatatcggcacatacggagtgctcggattattattctattatggattgatgtggaatatactcaccacactttctgtacccttggcatgtgcggccatactaagcggagatgcctggagcaagttttgtgccgcacaaatcatcaacacgcttccatacgcccgtaaagaagaagaatcgaaagcgaaggtcatatatgaccgtatgagtccaggtattttattatccgcttttatggccggaaccctgcctatgcttttattactggataaaggatactggtgggcagccatcgctcctgctatgatgttcatccttttaatgtcactcatgcgcagacgcctgcaaggatataccggtgattgttgcggagcgactttcctattatgtgagttttctttttatctaactataaacttaatctatacaaacctatggtaatatacttaatgcgtcatactgctgttgatgttccgcaaggtgtttgttacggacagacggatgtacccttaaagccgacttttgaaacggaggcaactcaaacggcagccaatttacaaggtctatcttttgataaagtttataccagtccgttaacccgttgtgtacgcctggctaccttttgcggctacccggatgcagaacgggacgaccgcttgaaagaactaaacttcggagattgggaaatgcatcggttcgatgaaattgccgacgctaacttggaaagatggtatgcagattatctgcatgtaaaagcgaccaatggagaatcttttgaagatcaataccggcgtgttgccggttttctagacgagcttcgccaaaaaccgtatgaacaagtcgcgatctttgctcatggcggcattttactgaacgcacaaatttatgcaggtatcattaaacccgaagaggcatttagcgcactcactccttatggaggaattgtcaagataaaattatcgtgatgcaagaacatatcgcttatttatttgttctatttataaagacaaataaatatgcttactcatttcctagatttattagctgttgttataagtgtgacaagccttttgattgtcacatacggagcgttgataggtattatttcttttttgaagaatgaaatacgacgctttaccggagggtattccattaccaatatacgaaaactaagagccacattcggaacttatctgcttcttggcttagaattcctaatagcttcggatattttgaaaacagtattggaaccaaccttgaatgaattagccctattgggaggtattgttgttttaagaaccatcctgtccgtgttcctcaataaagaaataaaagaattggaaagtgaagaaaaataaaaaagagcggcaaacgggactcgaacccgcgaccctcagcttgggaagctgatgctctaccaactgagctactgccgcatctctaaaacaggaacaaaagtaatatatatttttcagctgaccaaatataagcaaacaatatttactataatcatcaaaatttctgctcttctgtttatatcgacagctttatgcatatcctgtgtatggataagccgatccttatctccaataaaaggtttatagactatctctccaaaataaacatgaggacctccaaaacggcaattcaagatacctgctaaagcagactccggataacctgaattaggacttgcatgccggttaccatatttacctacaaatctcagcaaaccgggacgccccacagacaaaaccattaaaagtgcggttaaacgagccggaatatagttcgccatatcatcaatatgtgcagcggcacaaccaaattgcaaataacgttcgttcttatagcctaccatagaatcaagcgtattaaccattttataggcaagcataccgggaactcccaaaagcaaataccaaaacagcggagcaataactccgtcactcaaattttcggccaacgtttccaaagcagctatacgcacttcctgatcggtcagttctgaggtatcacgccctacaatacgggaaacctgctttctcccctcctctaaagaacggtccgcagctagaaaaacctgttttacttctctaataagtgtagtccctgctaaacaatagaaaacaagcacagcggagagggcgatgcccaaccagcgattcaacaaaaacaaataatgcaatgccaaagcagatcctacatatactagcaaaataagcataatagccgccccccctcctttcaacatccgatgtgccccacagttccatcgtttctcacaaaaagagatcagcttcccgaatcctaccaccggatgcggcaatcctaccggatccccaagcaatttatctaatatccatcctatcaacaacggaagaattaatacatatatgtccatttctttatactttctaccagtttgtcattttcttccggagtttgtgtagcaatacggaagaagtgttcattcagcccttcaaaattggatgcgtcacgaataaggataccctgctctgttgccagatattctttcaaagccgctgcctttcccatacgcaattgaactaacatatagtgagtatccgatggccagatctccattcctcctattgaaagtaaagattgagctaatctctctttttccttcaacaacaaagagatatctatatcatattgagaagaagacaataaataatgcccggcctctatagccaactgattaacagaccaaggcatccgctgtgtccgaatttcatgtagcagttctttacatgcagtgatatatcctaaacgcaagccgggcacggcaaaacgttttgtcatggaatgcaacaggataacattcggaaattccgcagcctccctggctgtaagcaaagccttctgtgtaaagaattcatacgactgatccatgacaaaaatacgctgcggattttgttttatacaggctgtcaagacttccttctccctgacctctccagtgggattattaggattacataaccatatcaacctccccctatccggcaaacggttcaagttatatataggaaccactttatgaccatgcagacgacaagcatccgcatattcgctgaaagtcggcatcaagatagccgaaatctgattcctgaatgtctgagctattaaataaatggcttccgtagccccattggtcacacaaacctcttcagacgaaagatgaaaccgtttcgccaaaaccttttccaatgaataaggttccggctcggggtacgtacggatactttccatctgctgaaacaaatgttgatgtaatccgctatggtctacatgattatatacgtttgaactgaaatttatctttattgctttatacttataagcatcatcaccatgtccttcaatcattcccactcattatttggtacaacaaaggcagattgagatgactgcgtacatgctctgccaatttatcatattgttcttctttataagtccggtaatccaacaccgtatgacactccagtttttctgcgtatggttccagtaaataatctataaatgcctgattatccaatattccatgaatataacttcccatacatttttggtttacaaaacaaccgtcctctccaccgtcttccagtttattcaaaggaactacagacacccccggaaccgggcgggtttctcccatgtgtatttcatatccttggcaagtttccgcattctcaagaaaatgaaaattcacctgccgtgtcaccttctccccttgcatcgtagtaatgacgggaagcagtcccagtcccggcaattggcggatctctccctccactccttccggatcgtgaatctcaagtcccatcaattgatatcccccacaaattcccattacagtaaccccttccctatgcgcacgcaggacagcttgcgccaccccgttccgtctcaactcatacaagtcatccaaagtgcttttgctgccaggaagcagaataatatcagctttggccagatcttccgtattattagtataataaaggtgcactcgttcatcccgttccaatctgttgaaatctgtaaagtttgagagatgacgcaacagaacaactgctatgtttattttgccttccactgcttgcatccgtttatagtccaagactacggaatcctcttcctcaatatgtatatttctataataaggtattactcccaagacaggaataccacataaatcttccatcatcttcacaccaggctcaaacaaacggatatcccctctgaatttattaatgattattccttttatacgtttcttgtcctcagtagtttgtaacatgaccgaaccatagacactggcaaatactcctccccggtcaatatcagctaccaaaatcacatccgcatccgcataacaggccatcggcatattcaccaaatcagtatcccgcagatttatttcggaaatgctccctgctccctccattacaatagggttataacgtgcggcaagacggtcaaaggctgcgtttacctcttgcctcagttcttcacgcccctccttgcgaaaatactcaaaagcgttacgattaccgatgggacgaccgtttaacaccacttgcgaagtatgatcggagctgggtttcaataacagaggattcatgtccgtgtgacaaggaactccggcagcttcagcctgtacagcctgtgcacggcctatttccaatccttccggagtggcatacgaattcaatgccatattttgtgccttgaaaggtgccggttgataaccatcctgtttaaaaatgcggcataatgcggcggcaataacacttttaccaacgtcactacctgttcccgccaacataatggggtgtaatttctttttcatcactctttcttttttcttttataggcaaaggactgccacttttcttccgtccagttctgctgttgcatctcataacgggccataacaaaaaataaatcggacagccggttgataaaccgaagtatgatttccggtaacggatcgtgtttatgcaaagtccataatctccgttctgcccgacgtgccacagtccttgcaaattgcaactgtgccgatacaggtgttcctccgggaagaataaaataaccattatcctccatttgttccatcaacttgtccattgcctcctcacaaaaagagcataaattatcaggcaaaatattgggattcccatcacgaagagccgatggtgtggccacatggctcatcactaccattatatttttctgaatcgtaaaaagcaaggattgccattcgtgctcctgcggcaaaagtgaacgtattattcctataacagcattcaattcatcgatacatccattagcctcgatacggatatcatccttaggtatccgttctccaccatgaatccctgtcatgcccttatccccagtacgtgtataaatgcgcctcatacttcccataattttaatatatccgtttctccccaatataaatgggtatacccggctatcacatttttatatctataaagcggggtactcacttccattcctcttgccgtaaattgttttgctacagaaggcatagcatcaggagcaacgacattggaataatgaaattcgtgcccgcgaagctccatccctttatattctatacggcgatatcctagatgaagtctggcacccaccatggtacaatccaaaggcaaaatacccgtcatggcatatgcagtccctccttggcggactgtcagggaacgggtgagaaacatcatacctccacactcggccaaaatcttccccccctcctctgcataggttcttaatgcttccattaactttttgcgccgatgcagttgacgggcaaacaattccggatatcctccgggtaaataaaccaaatcagcatccggcaaatcactaccatatacaggactgaaataagtaatgcttcctagcgcagacaagcggtctatgttttctctatagataaagttgaaagccggatcccgcgctatggctatcttcatctttttagcagaaggagcaaaactttccacccctatctcagaactataaggcaatgtataccgacacgggaaattacgatgacaaatactcagcagcttatccaaatccacatatttctcaaccaattccgcagcctgttctattaaggtgttcatggaacgtttggctgtcaatgtcaaacccaaatgccgggatggaattttcaacccttctgtcataggcagataccccaaacactctactcctgcatcaacacaagcctcacgtaaataagcgaaatgagaaggagatgatacttgattgaaaacaatacctgcaatcttcacagccggattaaaatgcttgaaaccataaattaacggagccacagaataagctgtagaacgcgcacttactataagcactacagggatattcaacaatctggctatttcagcactacttccctgcattctttgataaccgtcgaacaatcccatcactccttcggttacacatacatcggctccatctccatatttattatacagatattgtacatgggtatttgatgccatccaaatatccaaattcaccgactcatggtcagcagccagcgtatgaaattgtgtatcaatataatcaggaccacatttaaaaggctgtactcgcaggcctcgtttgtgcaatgcccgcagcaaccccatcgtaaaagtcgtttttccgcttcccgatgtagcggcccctatgagtaattgtggcttcattctttagtatttcttttaaaaacggatacaaagatagtgcaaattgcaaattatcgaaattagaataacagattaattcataattccgacatatcaagtaaatatccttagaaagcaattaaagttttatggtttatcaattaaataagctacctttgcagtcatttt

SEQ ID NO: 14472 - DNA, 78710 bp, Unknown
  gut microbiota DNA sequence
tttcgggtgataaatccgaaaacattataaggattgttttcacttcgtagataattagccagactgattcccctttcggagataccatatattaaagttgcttgtctaggtttttttaaaagctgtaataaatgatagtagaaattgacggttaatatccgtgtacacatgagcaggaaaacggaactgataaaatctgttataatgatggaataaatgaacaatccgatgtaatccagtgttatatatgcaaacaaaacaaatgtgagagctttcagcagcatggcataaatgatacgtgtcagttctactaaggtggaataacgtataattccctcgtaggtcttacaaattccagtccatacgatactggaaatgaccgctatcagcagaatataacgctgctggttgaaatggatgctgatattaatcaaatagtggaaaaataaaaagatagaaaatgaggatatgacagataaaaaaacatcgatacaccatattatatagggatgtatataatctgtctgcaaaaatttattgcgtattttattctttaatagggaaagcataggtcgttaaggtatttttttcaagaaggcttgcggaatataagaggtggctacagcacatacaccatggactgttataataagccggtggttctttttaatgcgacagatatacccttctgcacctttgaatgttccgtcaatgacttttacgtggtctccttgataaaatttaggattatctgtgtcaaaatattctagacctttttcgcctgacgaggtaacgagcatgaagatgttcatctctctctcgggaatggctaaaggaatttttttaaaatctatttgccgagtatagagaattactttatcggtcaagatcttctgtatctcttttgctatgtaagtttccgaatggaaaaaaagcaatgaattgataactggttttcgtacgtttttttttgttccatcttgttttaaaacctttacggtttcgcagggaatataacattttatctttttcttcaaaagaagttcttcaatggcaaaaaccttattatagaatacttttaatgcaaaccagtgttttttcgaattattgtttgatgtcatttttatctttaatactttaaaaatggaaggacattccttccattcctgcatgttatataacacacagtaatcagagttaaactaacttttttctataatttgaaaactttagcacgcagcatttttcctgatccaagaaaaataaactgtaactccaaattcatactgtctctaagtaagagatggtataatattataatgtgaatataatcagcatgataggatatacctaccaagctgatttttcaaacttttgtaacttgtctttagcccttcgttttttatttttaacaacttattttttatttttattttgtaatgttattgtatttaacaatttttctatcatagtatcgtaaagtattaaatattagacacaagcataattattatatatagatagagaaaaaaaatgttatctattttgttaatcaataaaaaacaagtatctttgcatcgaatttataccgtctcttacttagaactactgttttatcgaatcgataatagctttatttacttcatctataattgaattgtctatctttgtcaaataaatcagtgtggttttttccgaactatgtcccatgcctgcactgatgattgacaaaggtacatttttattgcgtgcggttgtagcccaggtatgtcttggagtataagaggataaattaatattcggttctaaaagtttggaaagacgtttcagttggcgattatagtaattgagcgctatttcatattgtgagtaggctttattctcatcttctgtatttaatatcgggaacaaatatggtgagtcttttttttcatactggttgattatattttgtagtctggtttcaatccttatagttaattcttgaccagttttatgtctgacgtaggtaatatatccattctgtatattcgatttttttaagtagacgatatcgacaaaagccattccacgagcataaaaactgaaaatgaacaaatctcgtgcaaattgcagagccttggacttttttaggtctatggagagaagctgagagatcaccgtttctgtaacagcacgttttcgggttctatccactcctgtatagacgtttttgaatggaaaagtttgttctatgattttttgggttacagctttgttatatacagaacggaatatgcgcatgtagaatgaaatggtgtttcgtacaacaccccgttgaattaaaaaggtgttgtaactttccacaaattgttcagttacaatattgaacgttgaatctgtatttttcataaatgccttcaggctttttaaggttttgctgtaattacgagcggttcctcgtcgattgtcatttttcagcttttgaatttgttgggtgaaaaaatcagtaatactgtaatcggcggttgtttgatagaatttttcaattatttcattaactgtatagtttgcacattcagcatctattttgtagatgattttttttagccggtctaaatccctgtctattttacactgaagtaagtatgaggttgagtctgtgaaaatgatttgtgctttattgctatcccaatcttgtggatgaagatgtatcttcgtagtgatttgtttaacctgacgaagatgtgtcagttgataatagatagttccggccttacctggaacagttgacggacgtaattttacttttacagttgccataattcttaacaattttatttatgcaattcatttaattaaataataatagttgaatatactattttgccctatttcctgttgctaagattgataatcatctctcttgcttcagtagatcatgtctttctaggagtcggactggtataatctgagaaatagggtatacttgccttctttttatttaatttttaccgtattgtaatttgtcttgaagaaggacttgaaatattgaaccatttcgatccttgtatgttcatctgatgcagtataattaggaataagtcatattacgcaaaaggatatggtatagtctgcaagcgtaaacggtataactcctggaaattacggtattagttttccaaatctatgctgttagtttgaaaaaacgttgaggactgtcggggaaaattttttcttttttgggttaggagcacggttgaattttaaaaaaagaattatatttgtactactcattaccgaaactatggcaaagaataatttactaagtgagcaacttgcttatattggtgtcagttgtactcctacgcatctgcatttgtgcagttataatgctgaaagtatttgtatgcaggatgggaaagatatagatagtttaatcccttatttgaataagaatgctataaactggatacaaattcatggttttcagaatacggaggtcatacagcatgtctgtcagaattttaatgtcgactttttgacgatacaagatattttgaactccaaccatcagactaagatagaacagcatgatacatataatgtagtgattttgaagttacttttttctaatgatgatggctatgtgccacaacaaatagccattgtgcaaggtggaaattatctgttgacctttatggagaaggaaacagactttctgaatgatataaatacggcattggaaaagaatgtgttgaaaatacgtaaccggcagtctgatttcctgctcagtgttattctaaacagtgtgatggccagctttatatccatcatttcggaattggaagatggattagaggatttagaagagcaattgctttcaccggaacagactgatatgcctggtattgaaaatatacagcaataccgccgtaattttcgtgtaataaagaaatgtattttaccattaaaggaggaaatcagcaagttgttgcatactactgataatgatctgttgcacaaagcaagccgtcctttctttaatgatgtcaatgatcatttgcagtttgtattgcaaactttagatggttgccgtgacatgatttcagctttggtagatatttacctttccaataatgaccggcggatgaacagcatcatgaaacagttgactgttgtttctactatatttattccgttgacttttctagcaggaatctggggaatgaacttccaatggatgcctgaactggggtggcggtatggctatgtatttgcatggacattgatgttaatactagtagcagttatctacttctattttaagcgtaaaaaatggtattgatgggagaggatggatgggatttacttaaatgtgaattccatattcatgttttacttcattcattacaaaggtgctttccagtgagcccaaactgtcaatcgtacccaagacattgaggataaattcctgataatacttcatattaggggagtgtattttaagcaaatagtcataactgcctgatatgttgtagcactctgttacttcagggatatcctgaattattcgtgtaaattccgcagcaatgtcccgattcagtcttcttagtttgacactgcaaaataccacgaagccttggtttagtttctcagcgtccaatacggcgatatatttttttatatatcctccattttccaatcgtttgaggcgttcgaacaccggagtggaggaaaggcttacccgtgcagccagttctttggtggtcagtcgggcattttcttgcaaggtacgtagtatctgcaaatctactttgtcaagtttctctaaagtactcatagaataatattctttcaaggggttgatattattttcatatctgtcaatacaaatatattgcatttatcttagattccggagaatttttcgggaaatgtagtacagagttatattctttttttgccagagaatgcaagaaaaaggcagaatgattttatctctcaaaaatactttttatctttgcagccgctatgacaaagtatatatatcttttttatatcttgttaggtgtatgtctgttggcgggctttggttccgcatttggtagcggacaggagcacgatgtagttcgtacagttgatttggaaaacagtgcggtggcgttgtgcaacatatctgaaagcaataacgggcaggaaaaaaaagagataaataatgaaagctaccatttttataaagtcggtatcggcggtgcagctacttctttttcttttcgcaccttgtgctcctccaaaattctgcgaactcattcctctgcttccgtcatagccaagttggctagatttttgaaagtacttcttcctgaagaaaaacaaatttctttttcacctattctttattttacccaatattccagtgaatactatatttatcagttgaggcgtattcttatttagcttatttttcttttcggcaaggcctatttttttatgccttatatttcttttgtttttatattttcataatgggaactggggtggatgcttgttccttttatgaatggtgttatatgttaatgtattaataactaatgtataatggaatttttattggactttatacttcacattgaccaatatatgatagatattgttcaagaatatcatacttgggcttatgtcatactgtttataatcattttttgcgaaacgggattggttgtcactccattcctccccggagattctttgctttttgtcgcgggagctatttcggctttgcccgatatgcctttggaagttaatattctcgctttggttttatttatttcggctgtgctgggcgattcctgtaattatatgataggacacttttttggacgtaaacttttcaataatcccgattcccgtatatttaggcaaagtcatttggaaaagacacatgaattttataaaaaatacggaggaaagacaatcattattgcccgttttgtacctatagtccgtacatttgctccttttgttgcgggtatgggtaaaatgcattattattattttatggtgtataatctgatagggggaactttgtgggtcggtattttctgttatgccggttattttttcggcgatcttccatttgtacagaagaatctgaaattgctgattgtggctattattgtcgtttctatattgcctgccgtcatagaagtaggcaggaataagtggaaaactcgcaattactaaaatcaaacatatcaaaaacaatttattcaaattacatttatgaaaaattctttttttagtcgattcacacctcaggaacctaagtttttccctatgttgaaacgtttgtctgaaatcctgacctcatcatcggatttattggtagaaagcatgcagcatgataagccggaagagagagcgaactattataaacgcatcaaagatatggaacgtgaaggtgacaagcagactcatttaatttttgacgaattgggaaaaactttcataaccccttttgatcgtgaggatattcacgatttggcatcgactatggatgatgtaatagacgggattaacagttgcgccaaacgcataacgatctataatccccatcccattgctaatagtggaaaagagttgagtttgttgatacagcaagcggctgtttatataagtaaggcaatggatgaattggaaattttccgtaaaaagcctactgaattaagagcatgttgtacaaaattgcatgatattgagaatcaagcggatgatgtatatgaactctttgttaagaaactatttgaggaagaaaaggattgcatagaactgattaagatcaaggagataatgcatgaattggagaaaacgaccgatgcggcagaacgggtagggaaaatcttgagaaacctgattgtgaaatacgcataaaagcagaaagtacaacatggaattattagtgattattattacgttggctttgatttttgactatattaacggatttcatgatgcagccaattcaatagccaccattgtgtcaaccaaggttcttactccgttccaagcggtgatatgggcggcattttttaattttgttgcgttctttattgctaaatgtataatcggaggattcggaatagccaatactgtatccaagacagtagtggaacagtatatttccttgccgattattctttcaggggttattgcagctattgtatggaatctgtttacatggtggaaggggattccttcttcttcttcgcatacgctgattggaggttttgctggtgctgctattatggctcatggttttgatgccattcagctcaatattatattgaagattgctgcttttatctttttggcaccatttatagggatggttgttgcctttggattcacgttgcttgtcctccacatttgtcgtcgtgcacatccgcatacggctgagatgtggtttaagaaattgcagcttgtttcttcggctttgttcagtattggtcatgggttgaatgattcccagaaggtaatgggtattattgctgctgccatgatcgccgctcattcggaagggttaggaatggggataaatagtatcaatgatttgccggattgggtggcattttcttgttttactgccatttctttaggaacgatgtcaggtggatggaagattgtgaaaaccatgggaactaagattaccaaagtaactcctttggagggggttattgcggaaactgctggagcatttacattgtatctgacagaatatctgaaaatacctgtaagtacgacccacaccattacaggagctattatcggggtgggcgctactaagcgtctttcagccgtccggtggggaataacaagaagcctgatgacggcttgggtgttgactattcctgtcagtggaatattggccgctgccatttacggagtggttggtctctttttaggatgaccggattgtaggctgttctagaaaataaagatctgccgtgaccgaggtgactgggaagctacctcggttttgtatatgtacctatttgtaggtaaaaagtggatgaaacagataataaatataaaatgttattgtgattttgttatttgtttctatttttgcagtggacttactgaacacaaaaatgagagaaaacgcaaaaggcaggatttttatagcatggctgttgtttatgacgcttatgccatttttcatggtgaagacttttcactaccatgaagaagatgctatttgccattctgatagtggaaattctcatgactcctctcatcagtgtcccgtgtgtaacttcacactttcaccttttacgcaagttgaaacattacaacttcatattgttcttccggtttttgattatcagccggaaataacggtggataaggtttgccaggttaaatcttatccttattatctacgtgcgcctcccgtttgctgatttacatagtatcttttatttattcacaacatcaaatgattgtaatttatgcgtatcagatatgtttcgggtacgctgggaatgttttttgccttgtattcaaatgcacaggtagtttctgatacgattaaaagtgtagatttatccgaagtggtggtgacgggatcttaccgacatgctcaggagaaaaagactaccctgacacttgagttgtttcagaaagattatttgaaccggcattttaccggtaatttggtacagactttgaaaaatgttcccggtgtacactcgatggatatcggtgcggggttctccaaacctatgattcgtggtttgggattcaaccgtattgccgtatccgaaaatggaataaaacaagaggggcaacaatggggagccgatcatgggctggaaattgatgcttttaatgtagacgaggtacggattctgaaaggtccgtcttcactgttctacggtagtgatgcgatgggaggtgtcatcgaaatccttcctttgctgccacaaaaagagaaccggttttttggtgaggctgccttattgggaaaatcagtgaacggcactgtgggcggttcactgatgctaggtattgagaagaatgcatggctggtcagagtacgtttctcagaacagcactatggagattatcatgtaccggcagataccattgtatatcttacccagttggtgcctgtttacggtcataagctgaaaaacaccgctgggttcgagcgcaatgtttctgccatgggagattatagaaagaagttttatcagatgaatattgctgtgagcaatgtttatcagaagatgggcttctttcctggtgctcatggcattcctgatatttcccgtttggaggatgatgggaacagccgtaatattgacttgccttatagcaaagtgaaccatcttaaagtaaccacgcatcaacagtatctttggaatggggtacaactttcaggtgatttcggctatcagttcaatcatcgggaggaatggagtgctttccatacccactatgacactcaggtgatgcctgcaaaggatccggatagggaactggtgttcaaactgcatacattcagctcctctctgaagctgcggttgttcaattcctcttcctgggagcatatggcagggtggaatatgcagatacagaaaaatgcgattggcggatattcttttctgctaccggaatacaagcgttttattaccggagctttttggctgacgactttccgactggataatcagttgtctgtaactggtgggatacgttatgatcggggaaggattgatataacagcattcgaagatccttatttggtggagtatctacacagacaaggatatgaagaagaggtaatacaggcatatcgttggcgaagttatccggtggacagggcttatggtaattactcctgttcggcgggagtagtgtggacacccgctgccggtcatcttctgaagatgaatgtgggacgtagcttccgtttgccggggggcaatgaattagcatccaacggagtacatcacggaactttccgtcatgaaaaaggagatgccactctttcttcggaacaaggatggcagattgatgcttcctataccttggcttataaaaaaatggaactggttgtttcatcttttgccggttggtttgataattatatttatttgcgtcctacgggagaatggtctgtattgccccatgccggacagatttatcaatatagtggcgcacgtgctttgttcatgggtggtgagataaatttcaatatggattttctacgtcattttaattatcgtttggttggtgagtatgtctatacttataatcgtgacgaacatacggctttaagtttttcacctcctgtatccatgcggaacattctaacatggaataaaaaggattttcagttgtatgctgaatttcaaagtatagcttcacagaaccgtatagcgagaaatgaagaccgcacatccggagcttgtttgattcatctgggtgggagtattcatatacctatggccaaggcggatattgaaatatctttgggtattcgtaatttgtcggatgtgaaatattacaatcatttgagtttttataggaaagtggaaatccctgaaccgggaagaaactttcagatttcgattaaagtaccatttaaacaattattaaaatgaaaacaaaattttattttcttgtaatcagcctattggctatatgctctgtttgtctgcctgcgtgtgataatgatgaaaaaggggatgtaacaaagcccgtgatcgatttgatagaacccgaagagggagcggtgttgaaaattggtaatgagaaaggggtacattttgaaatgaatttgtcagatgatgtgatgttgaaatcgtataaaatcaatattcataataattttgaccaccacggacatgattcccgggcagccggacagaaaaacatagcttttacttttgacaaggtatatgatgtttccggtttgaagaatacaaaagtacatcatcatgatattgttattccggctgatgctgctcccggagattatcatctgatggtatggtgtaccgatgcggcgggcaatcagacagaagtggctcgtaatattgtcttgagtgcggacggaggtactgaaacggaacatgatcatgaccatgagtgatcttttgtatcaatcgtattgtgtgtattaattgtctgatggcggtcgatgtgaatcggccgtcactttattttgttggatgtcgccaaagaataattttcttccaggaggtaataatccgtttgtaaatagaatatttgttctgtaaatagtgatgattgtagctctattttctttatttttagtatatcttgtttgatataactacctttaatacctttgcaacaggtaaaaacagaaatatataactctaaaaagataaagattatggctacaaaaaaattacatttcgaaacattacaacttcacgtaggacaggaacaaccagactcggctacggatgctcgtgcagttcctatttatcagactacatcttatgtatttcataactcggcacatgcagccgcacgttttggtttacaagatccgggtaatatttatgggcgtctgactaattctactcaagctgtttttgaacagcgtgtggctgcattggaaggaggagtggcaggacttgccgtagcttccggggctgctgccattacttatgcgtttcagaacattactcgtgcaggtgatcatgttgtagctgcaaagactatttacggaggtacttataacctgctggctcatacgttgccgacttatggtgtgactgctacatttgtggaccctagtgatctttctaattttgagaaagctattcaagagaatacaaaggcggtgtttatcgagactttagggaatcctaattcgaatattatagatatagaggctgtggcggaaatagcacatcgccatcacatacctttgattattgataacacttttggtactccttatctaattcgtcccattgagcatggagcggatattgtggtacattccgctacaaaatttattggtggtcatggaacttcactgggtggcgtgattgttgattcaggtaaatttgactgggtggcatcaggtaaatttcctcaactgacagaaccagatccttgctatcatggggtgcgttttgtagaggcggcaggtccggccgcttatgctgtccgtattcgtgctattttattgcgtgatactggcgcgactatcagtccgtttaatgcttttattctgttgcagggattggagacactttcattgcgtgtggaacgtcatgtagagaatgcgttgaaagtggtggagcatttgaaaaatcatccgaagatcaagaaagtaaatcatccttccttgccggaacatcctgaccatgctctgtatcagcgttatttccccaatggagccagttctattttcactatcgaggtgaaaggtggtcaggaagaagcacatcgttttatcgatagtctggaaattttttctttgttggccaatgtcgctgatgtgaagtcattggttatccatcctgccagtaccactcactctcagttgaatgcggaagaattggcggaacagggtatttatccggggacagtgcgtttatcaataggtacggaacatatagatgatttgctggccgatttggatcaggcattagctggaatttaataagatatactatatagaataaggaatattactacaatataaaatcaatatatggataagaagtgtatgccggaggtttgtgtaaagatacattatacatgcttctggcattactttatttttactaataaaaaaggatagatcattaatccaaataggattcttttttgttattaaaaaaagaatctttgcggaagtggggtttcaaaggcttaatttaagagtttatggataccgtttctttaacttaaatacaatggttatgaatctagtccttgctattattccggtattgctattaattatcctgatggcgttttttaaaatgtccggtgacaaaagtagtgtgatttcccttgtcgttactatgctgattgcttttttcggctttcattttccggtagacgatttgctgttttcttttctgtacggtgcattgaaagctgtttctcctattctgattattattttgatggcgatattcagctataatgttttattgaagactgaaaaaatggagattatcaagcaacagttttcttctatttctaccgataaaagtattcaggtattgctgttgacatggggatttggtggcttgcttgaagctatggcaggatttggtacggcagtggctataccggcggcgattcttatcagcctcggattcaaaccggtattttcggcaacagtcagtttgattgccaatagtgtggctactgcttttggggctattggtacaccggtcttggtattggcgaaagaaacgaatctggatgtattggtgctaagcgccaatgtcgtgttgcagctttcggtactgatgtttctcattcctttcgtattgctgttcctgaccgattcgaaattaaaatccttacctaaaaatattttcctgtctttgttggtcggtggtgtctcattaggcagccagtatattgccgcccgctatatgggggcggagtctccggctattattggaagtattttatctatcattgttattgtggcctatggcaaactgactgcttctaaagaggaaaaagcaaggaaaagcacattgaaagggctcgaggtactgaacgcgtggagtatctatcttcttatcttgttcttgattattctgactagtccgttgtttcccggtttgcgtacaacacttgaaaataattgggtgacccgtatcagtcttccgattaatgattcaactatgaattatacggtttcttggctgacccatgcgggagttttactttttgtgggcacgtttgtcggtgggctgatacaaggagccaagatatgggagctgtttgctgtactctggaatacggtaaagcagttaaagaaaacttttatcacggtaatttgtctggtgagtttgtccactatcatggatacggcaggtatgatttcagttatagccactgctttggcggttgctacaggaagcctttatccgttgtttgcccctgttattggttgcctgggtacctttattacgggcagtgatacttcttcaaatattttgttcggcaaattacaggctaatgtggccgggcatattcaagtaagtcccgactggttgtcggcagccaatacggtgggggcgacaggtggaaaaataatttctccgcaaagcatcgctattgccacttctgccggaaaccaacagggaaaagaaggggaaatcctaaaatccgccattccatatgcactggcgtatgtggtaataaccggagtgattgtttatattttcagctaatcttttccggtacatagggtgcgccggacgatagcttatagtaccaattccttgaacaactgttgtaaggtagcatccaggttcatggaaaatccgggatgaggccgtgaagtctgtatacaggcactacgtacagcggtcagccaacggaaccggtccggaatttccatttgtgctatgcttcctccctctttctttccttggcataccttatcaaatacctgtagtgcattctttaggcattccatatctacttccgtagaaaatactcgcaacttctgttcattcagtacatagattgcattcaggtatctggcttgtttggagaacaagactattcctatattaagaaactcctcacgctctactttggggacaaagcggattactgcatattcatataagtgcttttctggcattttgtgcttcttttacaaatagttcggaatggtgaaccctttcttttaaaaaatgaaaatatacctctctcagatcttgtattgtttctccttcttctgcccaagtaagccagtcatcgggtatggcatctgttatttcctgtagtttttcttcggtcagtatttgtttgaaccggttatccgcttcttccaactggctggcataaggcagaagtacatggtcttttattcttagaaaaggattgacagcctgtttctgccagttttcccatgaatgatgaaagtaaagtgctgcgccgtgatctatcagccacagttctttatgccacatcagcatattggtattcttgatggtacggtctacgttggtgagcagagcgtccagccatactacttgtgaagcggtttgtacgtctacctgatgtacgatggggtcaaaagtcagtgcgcccgacaagaaatgaagtcctagattcagcccacggctccattgcaacaagtcttgtatctcttcatctgcttctgtccggccaaatgcttcgtccagttgcagaaagacgatttcgggtacgcggaaatgaagggcacgggctatttctccacctatcagttcagcgataagcgccttgggtccgtggcctgctcccctaaatttgacgacatatttaaaatcatcatccgcttcggccaatgcgggcaaggaacctccctcacgcaggggcataatgtagcgagtgacattaactgtacgtaaatccatttaaacctccttgattatagggaataaagatacgatgtttttgggtattaggaataaaaatagtccgtaaattgggaattatagcactaatttagcatttaagatacttccaaatctgctgaaatatgctgcaaccagggataaactgttgaaaaatcgtaaaaaaagagatagataggagatttattgccaaaaaagaatttaatttgaacagttttataatttataaaaaaaaagaacatgaacgaattaattgctaaaatcaaagaattgaacgaagcttttatgtctgatgctgcattgcagattgaaaaaggtaacaaagctgcaggaacacgtgcgcgtaaagcatcattggaattggaaaaactgatgaaagaatttagaaaagcatctttggaagcttctaagtaatcttttattcgtcttttaaagatttttataagccatccttcggggtggctttcttattttctactaagttttgcttttatttcgggggataattgatatttttgtatttttattggtgggtggttaacctaaaggagaagggatgtttatgaagaatatgtgtctattgcctgtatgggcggttttattgattatagcagggactttcttttcttgtgaaaagaagaaggatatggctatataccgtcaggcggattctttgaacttgctttcttatcatatgcgctataagaatttggacacagcgtgtaaagcagcgcatgacgcctacaaactggcggatggattcccctccctgcgtgccggggcattgaataatcagggtttctgcgcctttatccacatggactttgaaaaagccgaagatctttttcttcgcgtatatgaggagtcaaacaatgaattggaatgtctgatagcagatatcggtatgatgaaaatttgtcagcgtaccgccatgaacaaggagttctatgattatcgtaacagtgcgttacggcgtatgaaacgtatcagcgatgaccgttctgctataactgatcccggagagctggaacggctgaattatgcccgttctgagttttccattgcttctgccatttattactattatttgcagcaggaacagcagtccttggaggcgattaatgaaataaaagtagacgaggcgctggaaagtgatactgcccagttgctctattattattatatgaaagggtctggcggtatgtatgaagcggatacaccgcaggatgtggtattgggtgagtttaactatctgatagaatgtctgggtatcagtagggaacacgggtatatctatttcgaggcgaatgcatctcaggcaatggcagaattgctgaaagagaggaaaaatttcgatttaattatggaaaggcgtcccaatgtgatgcgtgccatcaatagcgaggacttgccgtgggaggaactgaccatgcgttttgcctggcaggctttggatttgttcaaaaaatatggagatttgtatcagatttcgggtacataccgcactttggcgtcgtgcagcaacgagcaaggcaggtatgaagacgcgctgcattacttgtcggaagcgctggggtacgtcaaccggcatcacgaaaaatattaccattgtacggataccatggacaggcttcgtccgtatgttcccatggctaccacttccattgaactggaatggattaatgacgatggtataaaaagtgtccccgaatggatcgcccgtttccgtgaacaattgagtgtaacatatgcggcgttaggaatgaaaccccagtcggattataatcgtaatatttatctggatattttggactacacccgccaggacaaagaattggagagtcgttataatgcgttggagaaggaatcggaagccttgaacggacttctggtggtagtggtgattggtatcgctgtccttatcattctattttggatattgaataaaagatggcgtgtgcggaatgctctttacattgataagttgaaacgtactttggaaatatgccgtaagataacggcttccgtacccattgatgcgggggagatagaggatgtgacaaaagcggtagttgcctcggtgaaagaggatattcttccgttggtgggagccacggacttccgtattgtggctgaaaatggagagggaagagaggtgccgggacaagggatttgtacaagttttatcttgaatattccaagcagggaacaacctttgggcgaggtgcatctgtattcggagcacaaaatgaagaaagatgataaagcactgatgagggtcattacaccttacatttcgtggacactggagaatggactggcttttatttcgttgggcgatgaacggaaacggctggaaaaggagcaatatgtccatgaacagcatttggcggagaataaacggcagaatctggtgaagaaagcctgtttgtttattgtcacaggcattatgccttatatagaccgcatcatgaatgaagtgcataaactaaccgtacacaactatattcagaacgaagaaataaaagaaagcaaataccgttatatcgacgaactgattacccgtattaatgagtataatgatattctggccttatggattaagatgaggcaggggacactgagcttgaatatagagaattttgaattgaattcccttttcgatgtactggtgaaagggcgtaagactttcgagatgaaacaacagaccttgaccatagagccgactgccgccattgtgaaagcggataaggctctgacgcttttcatgataaatacgttgacagaaaatgcccgtaaatatacgcagccgggaggaaatgtttctgtttatgcgcaggaaacagaatcttacgtggagatttcggtgaaagatgacggtccggggctttcacaggaagatgtggagcgtattctgagtgagaaagtttatgattcaggtaaaatcggattgcagaccagcgaaaatgtcagcgaattgcagaagaataaaggtcatggtttcggtttgatgaattgcaaaggcattattgataaatataagaagaccaatgaaatattccgggtctgcctgttccggatagaaagtgaattggggaaaggcagccgtttctattttcgtctgcccaaaggagtgcgcaaaacgttgatgttggtactggtcgcttttctttctgtcctgacaggatgtaatgaggggagagagaaagacgggaaagcggaacaactcactcttaatgattccattcagcgatatgataaattattggctgttgcgaatgaatatgcatacgatgtttacaattgtaacattgatggactataccaacaggcattgtgttatgcggacagtgctctacattgtttgaataagcattatattatgtattcgggcagcaaagggcctttgttggaattggaaggagagggggctgcagcggatttagattggttcaaccggcattttgataccgattactatgccttgctggatgttcgcaacgaggcagcagtcgcttttttggctttaggtaatctggaggcttatcgttataacaataatgcttatacggcgctgtacaaacaaatcagtgaggacacctcattggagcaatattgccgtcagatgcagctttctgccaataataagacggtggctatcattctttgtgtggttattctgttggtattgctggtgggttattatattctgtatttccgccaccgtttgatttatcgttataacttggaacaggtgttggaaatcaacaagcaggtgttttcggcctctttgcttgacggaagaaccgaccgggatattgctgcaagtctggtcaatgatatgtttgagacggtgaatgagttgctgcccattgatgtgttgggcgtagcggtttatagtgaagacaaccatagcttgaattatgctttttcaccggtggaggatgagaacgaagaaatgcgtgagatgatggcccgtagctttgacgcgaagacatcttattggcgtgagaaagataggttaaagtgtttgcccttgtgggtggaagcaggtaacgagaatcgttgcacgggtgtgctggcattgaaaatcgctttgcctgtggagcgtgaggacgaccgcttgatgttggagcttgtggccggatatgtagccatcattgtatataatgcagtggtactgatggcacagaaatatcgggatatagaaagtgcgcaggatgatgcgcgccgagctatacgggaggaaaaccagttgcatgtgcaaaatttggtattggacaattgcttgtcaaccattaagcatgagacaatctattatcctaaccggataaaacagattatcgacaggttgaacacccgtcaggcaggagaaaacgaagctgtgcaagtagagacgattggtgagttgatcagttattataaggatatatttactttgctgagttcatgcgccgcacgtcagttggaagaaattactttccgcagaggtgttgtgaaagccggcgagctggccgattatgcggcacggtatataaaacgtgctggaaaacgtatgccgcatcgggtagaactgaggacggaggtggaacatgtttccgtactgggagatgtcattcagctgaagtttatgttggagaatctgatagatgaagcgctatcatacgaggtggatggccttttggaattgtgtatttatgaggataaggattttgtgcggtttgatttccgcgatacgcgtcgcgaaaagtcgcaggaagagttgaacttgttgttctacccacatctgtctcgtatgaagcaggggcaggaaggagttctgaccggtacggaataccttatttgtaagcaggtgattcgtgaccatgatgaatttgccggaagacgcggttgccgtatcaatgcgcagcctgccgctgagggagggttcaccgtatggttcaccctgcctgcccgttgaatgtagaatgtaaaaaaacaatgcatattatggagaataatagatttaaagtcatcattgtagaggatgtcaaactggaattaaaaggaacggaagagatattcagacacgaaattccaaatgcggaagtcatcggaacggccatgactgagaatgagttttgggaattgctgaaagtgcagttgcccgatatggttttattggacttgggcttggggggatcgactaccatcggtgtggaaatctgttcttctttacggaagaactatccggatatgaaggtgctgattttcactggtgaggtgttgaacgaaaagttatgggtggatgcgctgaatgcgggtgcggatggtataatcctgaagacgggagagttgctgactgccacagatgtacaggcggtgatggatggtaagagactggttttcaattatcccattctggagaaaatagtggcacgtttcaagcagtcggtggctcaggagcagcgtaggcaggaagctgtcatcgattatgatattgatgaatatgatgagcgtttgcttcgccatctggccttggggtataccaaagaaatgattactaatctgaaagggatgcctttcggggtcaagtccatagagaaacgtcagaatgaattaataaaccgtttgttcacattggatgaaagaaatggtgtcaatgcctgtcgcttggtgacccgtgctttcgagttgcggattcttgatattgataatttggaaccggatgaagagtaaatattatttccctcataccgctactgtattttttctgctgacagtagctgtagccttgttctcatggataggaagtatttatgggctggggaaggtgcaaagcctgctcagccccgaaggaatccggtgggaattgaggcatgctatggggaattttgtccagacaccggcattgggcatagtaatgatgctttttttagggttcggcattacggttcattccggggtatggggcacgttggggagaatagtgaaaagaggaaagcccatttcccgtaaggaaaagcgtgcgttgatattggcaggttgtatgctgcttgtttatatcataatgattattggcaccacttttgccccatggactatgttgcgtagcgtgacgggatctctcacgaattctccgtttcaaaaagggatttattatctcatttcgtttggtgtgggattatcgggtatggctttcggctatgcatcgggacgttttcgggatgataaggatataataagagggatgtcctgtctcttttctcgttttgccgattactttgtggtgcttttttttatagttcagttcttttcctcattgatgtatacgaatttggtggaatgggttggaatagattcatatatagtgtcttacgtttttcatatttgttgctatttacctttcgcttggatgttgaatagaaaaaaataggttgttaatgcaaaaaagttacggattcttttggtaatttcaataaaaaccgtacctttgcactcgcaattaaggatggttccgtagctcagctggatagagcaacgcccttctaaggcgtgggtcttgcgttcgaatcgcaacggaatcacataaagaaactgtatctctttcgggggtacagctttttttatggaaatatttaaaaaggattcatctaaaagcagggctatggaaaagatcttgtccatatctctaaacctttcccattggatagttaagggttttcttcctgcttgttctatctccgcaagcctttggagttaactccatagcctttggagataactccaaagcttatggagataactccaagggctatggagatagaataatccgtataaaaaggtttaacctggaaagagaaaaggcttatgcaacagggacggatgcaatacattgttgtttaattccgctggcgggttgttactttttctcagtttcttcttcctttgggcttcacggcagcggaaagattgaaccggttaaaaagtcatgttaaccctttttgcatgcagaagatgtatatactgaatctaaagaaaggtatgaaccggaaaataagaagtagttcccgttaaatttctactatcccttaaaaacggaactttcttcttttctgaacaaaaaatcccactcattcgtcatattttcctcttttacatcagaatatatttgtacttttggtccggatgccccaaggaaagaacattttctttgtcaggcttgtctgaaaatcataaataaaacaactaccgactatgacaacacaaaagtacaaaagcctattggtgataatatgggcactatgggcttttcatccttgtttggctattgacgatgtgctccgtacagccaaacgtgatgctattttagcacaaattacaggagccgttcgtccgaaaaagcagatttcacttatttcgtttggtgcgaaaggagatgggaaaaaagattgtaaacctgcatttgataaagcgatgaagcgtgctgcccatatgggaggagcacatattgtggttcccgcaggggaatatcttttgaatggtcctattcattttgtaagtaatgtatgtttggaacttcaggaaggggcgaccttgaaattttcatctgaaccggctttttatctccctctggtgaaaaccagttgggaaggaactttccttcagaattacagtccttttatttatggatatcagttggaaaatgtttccatcatcggcaaaggagtgatagatggaaatgcggggactacttttgccacttggaaaagtaagcagaagatagggcagcagcttagtcgtgaaatgaatcataaagaagtgccggtagccgaacggaacttcggtgaggggtattggttgcgtccgcatctggtgcaattctttgattgtaagaatattacaattgaggatgtgtttattacgaatgcgcctttctggtgtattcatttactgaaatcggagaatattatctgccgtggcatacgttatgatgcaaaattggtcaacaatgatggcatcgaccctgagtacacccgtaatttgctgattgaaaatattgaatttaataatggagatgacaatgtggccattaaatgcggacgggataatgacggatggaaaaccagttgtccttcggaaaatattattattcgtaactgtaagttcaaagggcttcatggtgtggtgttgggcagtgagatgtcatcgggaatacagcatgttttcgtagagaattgcacttacggaggctattgtaaacgaggtatttttatcaagacgaatccggaccgtggaggttttattcgtgatatttatgtgaataattgtgagtttggtgaagtggaggatcttttttatgtaacttccatgtatgcaggcgaggggatggataaccatcattttactgaggtgcatgatatttatgtaaaggatttgaaatgcaaaaaggtgaatgtagctgcattggtgcttcaaggtacagaggcaaagcctatttataatgtgacttttgataacatggatgtggataaagcagggataggtcttagtttttcgaatacgaagacaattggggtttctaattgtaatttgggaggttatgttggggtgccgtctacagccagtgcgaaagatggtatattcaataaatagatttgtttgacttcttggttcacttcgccgattccttgagaaagtcttgttacgctggaatgacagagtaaaaggaaagcaggaaactgttttcggacagactggggaggatttttcatccctcagctaaacaaatgtttttatagatggttctataagtaaaaaagacgataattatgaatacaaatgaatttgcccgaattttattgacttggattaagagttttctatcatggataggcatcccgcgcgataggttgaatgaactggatgagattattttcttgatcctgattgtagttattgcttttgctgtaggagctgtatttcattatttatctgtgcgtttcacacggaaggtgttgaaatataaaaatatcagttttttaagttcgctgatagaatacaatgctttgcggaaaatgtctgcggtcattccgccgcttattatatccgctttgttgccgtttgcgttcgattatcgttctacttggtttactgccagtgaaaaaatcacttggatttatttctttatcgctttgttgttttcggtcaatgccgtgttaaattcggtgggtaatgtgctgatgaacaaggagcagttacagaatcgtccgatgaaaggtttcatacaaatctttcaagtgattttttcgtgtattgccatcattgtcatcatttctatattgattaataagtcgcctctcaatctgattaccggactgggtgcttttgctgccgtgctgatgttgattttcaaagataccatccttggctttgtggcgggggtgctgctttccgagaatgatatggtgcatatcggcgattggattgagatgcctcagaataatgtgaatggggtggtgatggatatcactctgaacattgtgaaggttcagaatttcgataatactattgtcactatacctccttattcattagtttccggttcatttatcaattggcgtgggatgactgaatcgggcggacggcgtattatgcgcgagtatgcgttgaaactggattacatacaaccctgtactcctgaatttttggagaaaatgaagaagtttgatgctgatttggccgactttatcacagaaaagcagaaacaggcggccgaaggaaaggtagcgaatactgacaatccggccggattggtaaatggaaccattgatacgaatgtagggctgcttcgtgcttatatgactctctatctgaagcgccatccttttatcagtaaggacctgttgctgatggtacgcacgttggctcctacggagaatggtctgcctgtacaaatttattgtttctcggccaataagaactggcctagttatgaatctatccaggcggaaatcatggagcattttgtttctgttcttcccgagtttggattgtatccgttccagaatcctactgccagagattatgtaatcagtggtttgatagagtctggcaaggacctttctactgtagacggaattccttggcattcggtcttgccaaaggaagaaaaggtatagttagggatttaaacatttattaatgacttgcggttgaacaattcttgttgccgccgtgttatataaatgtgtttttcatagtattagattaaaggttgaagattgcaatcggcttgagagaagtagttgcatctgaagtagaagcgtctactataaaaaatatagaaaggttgttccttacgggacagcctttttgttttgttaaaagaaaccattcgcattaacttgaaatgttaaaggatttgttgcttttattaaacaatactataatttctccttaacgcttccttaaatttgcagatagcaggaaagtgcgtatatttgtatgtgtgtttttcatagtattagatttaaggttaacaaaaggttggagcaaggcgttgctcctttttttatggaataacgtgaggcttacatctgctgtccggttccgatacccaatacagaaccacagagaagaatccgtgcaatgtattcctctccgtgactgtgtaacttaattctgctctttaatgcaaggagaaggctgaattaaataatctcgatgccttgcttccggcataactccaatcccacatcctttaacttgaatttctgtatctttccgctgcccgtcatagggaactcatcaacaaagaagatatatttaggaattttgtaacgggctatcttgccatcgcaaaagtcacgtacatcgaattcgttcatttccaccccttcgtgcaagatgatgaatgcgcctaccgcttctccgtatttcttggaggggataccggctacctgtacatcttttattccttccatctgatacaggaactcttctatttcccgtggatagatattctctccgccacggataatcatgtcttttattcttcctgtgatacgataattaccttcttcgtctttcactcccaaatcccctgagtggagaaagccgttccggtctatcacttcggcggttgcttcggggtttttgtaataccccttcatggtgttataccctttgttgcacatctcgccttgtacgcctatgggacattcttcgcctgtttccggatcgatcacttttacttccgtaaactcgaaatcacggcccactgtgttgcagcgtacatcaaacgaatcgtcgatgcgggaggctgtcatgccgggagaagcttctgtaagcccgtatacactggtgaccttcataaacattttctcttctacacgtttcatcagttctaccggacagagtgagcctgccataatgccggtacgcagactggacatatcgaacatatcaaacatgggatggttcagctcggcaatgaacatggtaggaaccccgtataaggccgtgcagcgttccttgtggacggaggcaagtaccagcagtgggtcaaagcgttccaccattacctgcgtacacccgtgtgtaaggcagttcatggtggctaacaccactccgaagcaatggaacaggggtacgcagacacatagtttgtcatcggaagtgaatttcatgtgctcgcccgtcaggaaaccgttattgctgatgttgtaatgggtgagcatgactcctttggggaaaccggtcgtgcccgaagtgtactgcatgttcactgtgtcgtggcagtccaccttcgctttcgcttccagcagctcgtcatcgtctatgttgcatcccagaagcagaatctcggcggtgttgtacataccccggtatttctcggggccgatgtaaatcacgttcttcatgcaggggaagcgtttgctcttcagatatccgcgctggctggtctttagttcgggcagcatggcgtagaccatatttacatagtcgtcattgccacggtctccgtttacgatacacagcgtgtgcatgtccgagttctggcagaggtattccagttctgcctgtttgtagttggtatttactgttacggccacggcaccgattttggcgcaagcgtacagaaaggtcagccagtcgggcacattacccgcccagattcctacatgggttccccgcttcacgccgatggctagcagtcctttggccatgtggtctacacgttcgttaaattgtttccaggtgaagcgcagattacggtcggaatatacgatatattctttattgggggtggtgagggcccaatgttcaagccagtcaccaagggttcttgtgcttaattccatcataaatcaaataggggtatagataacggccaatattttggcggcttgtccttgatatccgtgtacgtggtgcggaacaatagaatcataataaatactgtctccggctttgatcagatggcattttttaccgtggcatacttcgatggtgccttccatgacatagataaactcttcgccttcatgcgaggagagcgagaagtgggtttcctctgtcggttctacgtccacgatgaatggttccatatgcctgtccgcttttgattttgacagtgagtggtagcgcatatgtgtacgcaggtccattgcattgttcgagaaactgatggtatcctcactctcttgtttccggcagattactgctccttgttcttcctggtcgtccagaaaagtgcccagacgtacccctaacgcacgggctatcttgatgaggggagccaatgaaggaagatctacattattctctattcgttctatttgttcttcggcaaggcctgagcgtacggccagttcggctacactgatttcttttgtttcacgtagtgattttattttttcaccaacaatctttgtgctgtccatggtttgtttttaataagtttgcaaagtataaagtgcaaatatataataaaaaagaattggacagtctatttttgttctgaatatgtaaaaaaggtaagttagtgacgaattgccggtcatttatcattaatagtcggtaagtttcgaatatttgtgttttttgttctatctttgttctcgaaacttaattaaagactaaaacttatgttctcagggattgtagaagaatatgcggaggtggtgcgtattgtaaaggagcaggaaaatctgcacctcaccttgaaatgttcgtttgtggacgaactgaaaatagaccagagtatctctcataacggcgtgtgcctgactgttgtcagtttgcaggatggcacgtacacggttaccgccatgaaagaaacgatagagcgttccaacatcggcttgttgaaagtgggagataaagtgaatgtggaacgcagcatgatgatgaacgggcggctggacggtcatattgtgcaagggcatgtggatcagactgccgaatgtatggatataaaggatgctgaagggagctggtattttactttcagatatgcgtttgacaaggaaatggcgaagcgcggttacatcacggtggacaaaggctcggttacggtgaacggtgtgagtctgaccgtttgtaaccctacggaggatactttccaggttgccattattccttatacttacgaacataccaatttccatacttttaaagtgggaagcattgtgaatatagagtttgatatcatcggcaaatatttaagccgcatgatgcagttctcctgattctttcaccgcaggttgcacagatgattgttaaagatgaaaaaaaggttctttgtggaaatccggaattatctgcatcggcttttgaacaaaaaaagaatctgtgcaatctgtggtaaaacaaatatcagagttataaatcttttagcaatatcttactggtgcttttataatattcttcgcgggcattggtcaatgcctcccaaggaccgctatatcgttcccggtctattttgaaggcttctgttccggctatgtccagtctgttcagcagcatagccacgttcatccggttgatatctactgacggcaaatagcctatgctttcatcgtcaccgtccatagaagtttcgtaaaccatgtgcatgtcttgtagttcgtataggattttcttagtgagtcttatcgggattttatgttcgtcgctgagtgtctcggcggtataaggagtctcttccgtttcaaatcgtttgcatatcagagacatgatgaggatgcacagaaagtcgtgataacggcggctgatatttgccgtctctttgctgaaactgtagttgcgaagattctgtgccacatagcaaagctctgcgccatacaggcagattccccatgaaatttgcgcccataacaagaacattggaatagcggcgaaactaccatagattgcattgtatcttgatacccatatctgactgccgatatacaagtattgaaaagcctgaaaggcagtgcctgcgatgatacccggaatgatggcatatttcagtttcactttagtattgggcataaagacgaacagccccgtgaacatggcccaagtcaggatgaaaggaaccaggcgtaccagaaatttcatcaggggtgccagtaatacgaagtcctccatgtttttcaccatggtggacataaagatggtaagaccactggaaagtacgataagtaggggtaacaagagcaggatggagaaataatccgtcattttgcgatacagcgtacggggtttcttcacttgccatatataattgaaggtacgttctatgttataggttaggctcaaaatggtccagaacaacattaccagacccactccgataaaaaccccgcttttggcgtgcaccagataagagtcaatcaggccgagaatggtttcggcagccgcactctgtccttcaagaccgctacggaactgggtttccagcaggttggagaaaccaaatccacgtgcgatggcgaatagaatggccagaatgggaatgatagaaagcagggtgctgtatgtcagtgcggatgctttattcaaaatacgtccctgagtgaactcacgaatagaaagagtggcgatttttattgcattatagagtattcctcgggatttgctaacctcgtcttctgtcactcgccatatatcatctttgagaaacgattgcagacctttcagtttttccttgttcatggtactcataagctctttattaggatatatgaaaaaaagcagccggcctgtaagccgggttctgttcctcgccttgcggcgaagtgcctgccatttatctacgcctgttgtcaccaacaggctctagcggtctaccctccgacgtggggcgagcaaccctcataatgtcggtttacatgaccttacaactcctaagacgtacagcccgtcatgtcaccatgcggctggtgggctcttaccccaccttctcacccttaccccgtttcccgtaggaattgtggcggttgttttcttctacgttactccaccttcgcagatggctttctgttaggaagtaggatgctctgcgttgcccggactttcctctttcgccttgcggcgtcagcggcagaccggccggctgcttttaagtttacaaagatagcgattttaggttaaacgtaggataataaagcggaaaaaagtaagaaaataaatgaaaaaacaaagaaagagcggaacagcccattactttttcttggtatatataataaaagaggagaaaatcagtgatgctcggttcggcactcctgcttattgtatagaaacaacggtaaaaacaggaagaatatttaaaataaatgaactgtgccggaaagagaagtgggtgctgttttcactttccctctccggacacggaatttagcggtagaatcccaattcgtttctcaatgaacgcacttcctgttgcaaaagttctatacgttccagcatgtggtggatggcgtcgattcctgcaatattgatggacaagtcataatataaatgcgtgtaacgctccagctccgctagttgggatgcggggaggtagcgttcctcgtcaatcacccggacttcgatcagtccgtcttcttccagttccgtaatgaacgacgggtccacatggcaacggtcgcaaaaatcgttgataataattaaatcgctctgcataatccttctctttttttaattgctactatcttttaattggcggaacaactctttctgatgttcggtaaggttgctaggaatggtgacattataagttactatcagatcgccaaatttgccttcttccttgtaaacaggaaagcctttgcctttcaaacggactttggttccgttctgggtttcaggttttactttcagttttaccttgccgttcagtgtgtccacggtttcttcaccacccagtacggcggtgtagaggctaagcggagcatcgatatataaatcattccccagacgtttgaatacaggatcgtctggaatgacaaaggtgatgtacagatcgcctgcaggaccaccgtttactcccggtgcaccatgaccacgcaatttgatagtctgtccgttggctatacctgccggaacagtgatacgtatgttctttccgtttacattaagcacttgtttgtgtgtttcggcggcttcacgcaatgaaagttgtaattcagcattatagtcctgtccacggaatccggcacttcgtctgccgtttgcaccgccacgatgtccgaacagttcttcaaaaaaatcagagaagccacctgtgctgccaccgaaatgtgcaccgctgaattcttctcctccattgccggaataccagtaactgccgttaccgtccgtaccgaatccgcttccggctccgccaaatcctccgaatccaccggctcctccatattgttgcttttgtttttcaaattcgtcggcatgtttccagtgttcaccgtattcgtcgtatttcttacgtttttccgggtcactcagtacttcgttggcttcatttatctcctgaaacttatctttggccccagggtcattcggattcaggtcaggatggtatttgcgggccagcttacggaaagccttcttgatatcatcttgggtggcgcttttgtccactcccaatactttgtaatagtctatgtaagccatattatatatttgttaaatttcatctgctttaagggaaacaaaatacatgccaattggttgtgttctgtttttattttattatctttgcagcgaatttttagaaattattctaaaggaaatgaggggattggcaatcatattcaggttttttatgctattagtcctgctgcttcctgtggttgctctgtgtcctgtgaaggcggaaacaactctggaagggcctatccttattgtcacttcttataaccccgaaactcgtagtatttctgacaacctgtctgctcttatggatgaataccgacagcgtggcggcaagtatactccgatcatagagagtatgaactgcaagaatttgtccgaggcttatctgtggaaatcgcgtatggcctccatccttggtaagtataaagggaaaaaccgtccgtcactggttatattgctggggcaggaggcatggtcggcttatatttcacaagacacggagatagctaaaaagactccgtccatctgtggtatggtcagtgtcaacggactggtattgcctgatgatagtatcgacacacgggtatgggaacctgaaagtaagaatatttatacggatttcggcgattataatattgttgccggttatgtatatgaatatgatgtcgataaaaacatagagttgatgcgtcgcttttatcctgatatgcgccgtgtggcatttatatcggataatacctatggcgggctgtctatgcaagccttggttaaaaaggagatggagaagtaccctgatttagagacgatttggctggacggtcgtacgaaaacctttatggaagtgagtgaaaggatgcgcagattgcctcaaaatacgtgtgtattgttgggaacatggcgtgtggactgtacggagagttatgttattggtaatacgacttatatgctgcgtgatgcgaatcctaccctgcctgtgtttactatcgcatctgtgggattgggacattgggcattgggaggatatactcccgaataccatgcggtaggaaagaatataggcgcggttacttatgattttttggataaaggagatagagaaggggtggacttggtgactattcccggaaactatacttttgatataaagcgtttgcatgaattcaaattggattcattgaatcttcctcagggagcggtgttggtgaacaagactccttcgctttatgagcagtataaatattgggtcataggggttgtttcggcgttcatgttcctgatagtctgtttcttgatagccatatattatattatccgtatcaaccacttgaaacatcatctagaagtgtctggcgaggagttgttggtagccaaggagaaagcggaagaatccaacaggctgaagacagcttttctggccaatatgagccacgagatacgcactccgttgaatgctattgtgggattttccagcgtgttggtcagtgatgattcctctcctgccgagaaggcgcagtattgtgatatcattcagaagaattccgatttgttgttgcacctcataaatgatattctggacatctcgcgcatggaatccggaaaaataaaattcgtatgggaggaatgtgatgtagtagagttgtgtcagacggctttgtctacagcggagtatggacgcaagaccagcgctttgtttctgttcgaaactcctgtagcttcgctggttatcaagacggatgcccagcgcctgaagcaagtattgattaatttgttgtccaatgccgctaaatttaccccgtccggttctattaaattggcgattgccatagacaaacagcatcaacagttggaattgtctgtgtcggataccggttgcggtattccgtccgataagagcgacagggtttttgaacgtttcgagaaattgaatgaatattcccaaggtacggggctgggattggccatcagcaggctgatagtcgagaatttgggaggtaagatatgggtggacaaggattataccgaaggcgcccggtttgtattcacgcatcctttaactaaaaaagaaaaagaatagagatatgaaatatagaatatgtatcagcgccctgctgttgtgggcgggtatgcaggtgtctgcatccaataatcagaaagaagtggttatcaagattatagaaaccagtgatgtgcacgggaatttctttccgtataactttatcgaacggaaagaatggagtggaagtcttgcccgtgttcattcctttgtgaaagagcagcgtgagaaatatggggataattgcctgttgatggataatggggatatcctgcaaggtcagcctacagcttactattataattttatggataccgtgtctacccatgtggcggcggatatgatgaattatatgggatgtgtggtaggcaatatgggtaatcatgacgtagagaccgggcatgcggtgtacgaccgttggataaaacagtgcgattttccggtactgggggctaacattatagacaatgccaccggaaaaccttatctgaaaccctacgaggtgttggagcgtgacggagtgaggatagcggttctgggtatgattactccggccattccttcatggttgccggagaagttatggagtggcctgcattttgaggaaatggagccctgcgcacgtaagtgggtgaagattataaaggaaaaagagaaccccgatgtcattgtgggattgtttcatgccggaaagtcgggcaacgtgttgggacaggtggtggaagatgcctctatggatgttgccaaacgggtcccgggctttgatgtggtgctgatggggcacgaccatacaagggaatgtgtaaaggtgcagaatgtggcaggagacagtgtgttggtcattgatccggcaaacaatgccaatgtggtttcggatgtgaccctgaccgtaacaaagaaagacgggaaagtggtggcgaagtcggtggagggcagattggcggatatgaataagtatcctgtcagccaggagtttatggataaattcgctcctcaatataaggctgtaaatgacttcgtatcccgtaaaatcggtactatttcacgtaccatcacagcgaaggatgcttatttcggttcttctcctttcatagacctgattcatcagttgcaattggaaatttcgggtgctgaagtgtccttctgtgctccgttgtccttccgggcagagattaaagaaggagacatctatgtgagtgatatgtttaatttgtacaagtacgagaacatgctgtatgtgatggaactctcgggcaaggaaattaaagatttcctggaaatggcatacgccatctggactaatcagatgaagagtcccgaggaccacctgatgcttttcaaggagccggtagaggagggaaagcgtgctaatttcaagaatttcagctttaactttgattctgccgcaggtattaattatacggtggacgtgaccaagccggcaggagagaaaatcacgattcaaagcatgtcggacgggactcccttcagtatggataaggtttataaagtggctttgaattcttaccgtgggaacggtggcggagatttattgacccttggagcaggaatttccaaggaagatttggcaaaacgtattatttttgcaaccgataaggatttgcgttattatctgatgcaatatattgagcaggaaaaagtgctgcatcctcatgccatgcaccagtggaagtttattccggaggaatggactgtgcctgccgcaaaaaaagactatcaattgctgtttggcgaggaaaagaaataatagttgagcaagagaaggtacataatagccccgttattactgctgacgctgtttttaacgtatcaggtaagcatcaccttgtttacccacgttcatattgtgaacggggtgatgattgtgcactctcatccttcgtccggcaaacaccatacgcataccacaggacaggttatttctattgctcatctgagcactattcatactttggaggccgaggttcaggccgagatgactgtattccgtcctttgttgtatgttttggaatataagataaatactttccgcgcgaaagcgctttgcgcgcaatgtatccatttgcgcgctcctccttttcattgctgaaacaaaggtatatctgttgatggaatacattcgggcaatccctttaacagatgggaatgtgtttttgccatagggctacacacattctttattgaataaaccgaaacattttagtaatagaaaaaaaatagatgaaacaatatattctgttactcgtgctcatggtgatgggtgcgggtatcaatgcgtatgcagaagatgtaaatcctgtgaaggaaggcaatgtgatttcaggtcatgtagtggaaaaaggcacggagaacagccttccgtatgctgccatattgattgtggaaaccgggcagggtacggtgagtaacgaggacggtgagttccgtttcaagaaggttccggcaggaaagtacacattgagggttcagctactgggctatgagacacaggaaaagaaagtgaccgtcagtaacgacttcacggtagatgttcattttttgatgagtgatgaaagtattatgacggacgaggtggttgtatcggccaatcgcaatgagacaagtcgcaaggtggctccggtggtagtcaatgtgatgaatgccaagctgttcgaatcggtgaactctaccgatttggctaaatccttgaattaccagtcggggctgcgtgtggagaacaactgccagaactgcggcttccctcaagtacgtatcaatgggctggaaggaccttattcgcaaattcttatcaatagccgtccggtagtcagtgctctgtccggtgtatatggcttggagcagattccggtgaatatgatagagcgtgtagaggttgtccgcggaggagggtcggccttgtttggtgctaatgcagtgggcggaaccatcaatatcatcacgaaagaccccatcaacaattcatttcaagtttcttcaacaatgtccaatatgaacggcaaggtgtgggaacagtatatgggagccaacgcctctttggtgtcaaaagacaatacatatggcatcgctttgtatcagtcttatcggaaccgtaatccgtatgatgcggacggggacggtttctcggagttgggaaagctgaacatgaatacgttcgggctgcgtacctattaccgtcctacgcagttcagccgtatcagtctggaatatcataccacgaatgagttccgtcgcggagggaataaatttgatttgcagccgcacgaaacggatatcaccgaacagactaagcatgtcatcaatagtggcggattgagttatgatctgttttggaaagaatacaagcataagctttctttctattcttccatccagcataccgaccgtaacagttattatggtgcgcaacaggatgcgaatgcatacggaaagacgaaagacctgacttgggtggcaggtggcatgtatgtgggtaattttgagaaagttttattctctcctgctacttttaccgccgggttggagtatcagaacaactccctgcacgatgttatgaccggttatcaccgtgatatgaaacaggatgtgcgtattgccagcgcttttgtgcagaacgaatggaaaatgaatcagtttgtattcctggccgggttccgtctggatgaccataacctgattgacaatcctatcttcagcccccgtctgaacctgctctacaaaccgagtgacaaactacaggcacgtattacctggtctaccggtttccgtgcgccgcaggcatacgatgaggatttgcatgttaccgcagtaggaggtgagggcgtgcttatcaagttggcggaagggctgaaaccggagcattccaacagcatcagcggctccattgactggacggcgaatatcggtcatttccagaccaatttgttattggaagggttctataccggattggatgacgtgtttgttctggaggatatgggccatgacgagaacggtaacaaggtgaaggagcgtcgcaacggtaacggggcacgtgtgtatggcgtgaatctggacggaaagattgcacatggacgtgatgcggctttacaggtgggcttcacggtgcagcgcagcgaatataccgagctggaggcatggagtgagaatcctgaggtagcgccggtgaagcggatgccccgtactcctgactattacggttatttcacattgacatctgctccgttcaagaatttcgactgctccttgtccggtgtgtacacaggccggatgcatgtgccgcatttcgcaccgacagagttgcccgaggaatatataggacaatatatcgctaaagatgaaatggtgcatactcctgatttctttgatttgaatgtgaaactgaattacacatttgtattgaatgaccatatcaaattgcagttaaacggtggagtacagaatatttttaatgctttccaaaaggatttggacaaaggtggttatcgtgactcgggttatttttatgggcctacacagcctagaacgtattttgtggggatcaagattacgaattgaataatctgctgatttgtcaatgtgctaatatgtcaatggggtacgctttgttccgcatggcacattagcacattgtcacattgacaaattaacagattgatttattaccaactactgacaagtgactatacttttctgtaatccggaatcccggatcgggataattatataagggaaagcggtgttctgtttctccttccatatatttccacagactggcatattcttctttcttctcgcccatttcctgcaattgcagcatatattgccagatagacttgttttccttgatgtatattttttccatctgatgaataatcggactatgctggcgggttgggtcatggtcaaattccagtatccgttttccctcttttgtcataccgatagttacgaaagtcatgctcttgcctatacccggcaggttcagtacgctgcggtctgttgctacgaaaggaatctgatggaaggtgcagaaacgctgtacggctgccgcacggtctttacagtttctcaacaggttcaaaaactccttttcttgctctgcggaaagttttccccatcttttttcctcttctttctcctgtaaggaacggctgttcggtgtgaataccgcatagttctcttcaaaaccttttaccgagaaagtgtagtaacacaatacacccaatccgttcaatactttgcgcagcttggcggtatgtccgcgacgggaagccgccacattatatactagctggttggtgatagtccacccggctgccagtatcttgcggatagcttcacgcgcttcgggtgttacttccagtggagtctggaaatgcgtttgaatcagaaattgtctgacccctacggcagatgccttttctttgaactcacgtaagatatccaatagttcgtcattgattcgcatgggcagatataccgggagccggctgcccaggcgtactcgttgcagttccgcatatttctctccttcggcgcggtgcaggtttgcgtttcgtttgcggacagccattttgtagacggcttccaatatattgcgcaaggtcttgttctggctcatcaatgcatcgcctcccgtaatcaggatatccctgagctgagtgtcgttctcgaaatattccatcagttttctcaacctcttgtcccagctctctttcggtttcaattcctcgaagttgaagttcagacgttcactttggaagtcgtacatgcgctggcaggatgcacacaggccgccgcatgcacgtcccatcgagtcggggataagaatggccacatcgggataacggcggtgaatgttgtgtccgtccggcagcagccatcctgcagcgttaggctttccgtcctccacagcatcttctttttcccatgcgtggatgttaccgtatgtttctaccagttggggagagtacagaatatagcttcgtatggctgtatcatcatatcctttccccgtaggattcaacaaagacagatagtaaggggtgataaagacaggcattcctttcttgcgtgctttgtgataaagctgcaaggtctcttcggatagggagttgcctagcattcggttcagttcggtagggctttttatggccattgccagatgaaaacgggcttcgttccaccattggcagaccagctggcgtttgtcctcttccgtgcttccttcgggaaaaagatagcggctggagggcgcgtgtctgttttctattttctggataagaagggagataatacgctctttgttttgtcggcggatagcccggacatcctcattcagtccgctgggccagcgtttcatccattgttgcacttgtttttcatcaggtagttcctcctcttcgtgataaagccggtcaaactggtgatacaggtcaatccataaatcaacggaaatctcttcattgatgatactattcgttaaaaacttccaaagcagtgagatggtttctattttaatctcctgttctgtagaggcttcgtaaatggtttttccatcgttatctatcagtcttttaatttgccttgcggcagcaggattgtaaataggaccggataatagataatcgttcagcttgtttttgaaagctgtttcatcctggctttctgaagccaatgaagtgagttgggttaatcgggtttcgaatagtgttttaatgccatgggtggataacatcttattcttttgtttcataagcaaacggttgttaaaaaagtgaatactataaataacatatttctcgtagaaaagttatcaaactgttaacttcatgctgctaagatagtaaaaaagcttcttttatgcaaattccttaacaaaaagacgttttttataaatagcattattttatagagtacatttgctttgtgctttcgtctttttttaaagcccggagcttttatcgggaaacgaagaaattcgtaattttgtagagctttgcttgtttgcaggccaatcaagctgaagagaaacctcattttaatagatggaaaaacaacatagaagtaaataaatggaactgaaacaactttttacctttgcagcagcctgttcgctggcactttcggtgtcggctcaagatagagtacactatacaggcacagagctgtctaaccctacctatcatgacggacaattatcacctgtggtaggagtacacaatattcaggtgatgcgcgccaaccgggaacatcctgcacccgataacggcaatggatggacatacaatcatcagtccatgttggcttattggaacggacaattctatatgcattatctttccgatccatcagacgagcatattcctccctcacagactttcctgatgacttcaaaagatggataccactggacaaatccggtgactcttttccctatctaccgggttcccgatggctataccaagcccggacgcacagacaaggcgaaagatctggatgccatcatgcatcagcgtgtaggcttctatgtatcaaaaagcggcagattgatagctatgggaaactatggcgtagctctggacaagaaagatgatccgaatgacgggaacggaataggccgtgtggttcgcgagattaagaaagacggttcgttcggtcccatttatttcatttactataaccatgcgtttaatgaaaagaatacatcctatccttattttaaacgcagcaaagacaagggatttgtaaaagcctgtcaggagattctggacaatcctcgttaccgtatgcagtgggtggaggaagctgaccgtaatgacccgttgattcctttacacaaagaatacaaagcgtattgtgactatactttgcccgacggtcgtttggtaagcttgtggaaacatgccctgacttccatcagcgaggatggtgggaatacgtgggcgcaaccggtggaacgtgcgaaagggtttgttaacagtaatgcgaagatttgggggcagcgtttgagtgacggtacatacgccacggtgtataatccttccgagttccgttggccgctggctatctcgctcagtaaggacgggctggaatatacgaccttgaatttggtgcatggcgaaattacaccgatgcgttacggaggtaattataaatcattcgggcctcagtatgtacggggtattcaggaaggtaacggaactcctcccgatggtgatttgtgggtgacttacagtgtgaacaaggaggacatgtgggtctctcatattcctgtgcccgtccgcgcacatgccagtgcacatgctgacgataattttgccaactataaagatttgaatgaactgaccgactggaatttgtattctttgcagtgggctcccgtatcattggatggaaaatggttggtgctgcaagataaggatttgttcgattatgcccgtgtggagcgtaagatacccgctacaaaagaacttaaagtttctttcgaactgatggcggagcagaacgataagggccttttgcaaatagaattcctagatgaaaacggtattgcctgttcccgtctggaattgacttccgacggacttttccgtgccaaaggaggtgcgcggtttggtaatttgttgaagtatgaaccgggcaagacgtataaggtagaagtggaactttctgttgctaaccgtatggtaaccgtttacgtggatggaaagaaagcaggacaacgtatgttctttgctcccgttccggccattgaaagagtgatgttccgcaccggagcgcaacggacttatcctacggtggatactccggcagactggtatggcattctgccgaatgcaggtgagcaagaacctttgtgcacctatcgtatagccaatttcaagacgacttctgctgataaggatgccggtgcggctttcttgaaatataaggatttcaagccctacgtggattatttcaacagtatggaggatgagaatatagcccaggctgttcccaatgcccgcgcatctcaatggatggaagaaaacatacctcttttcgagtgctctcaaaagaacttcgaggaaatgtattattatcgttggtggacgctgcgcaagcacatcaaggaaactccggtgggctatggtatgaccgaattcttggtaaaccgttcgtatgccgataaatacaatctgatagcttgtgccatcggtcatcatatttatgagagccgctggttgcgtaacccggaatacttgaatcagattatccatacttggtatcggggtaacgaaggaggcccgatggccaaaatgaccaagttcagctcgtggaatgcggatgcggtactgggacgttacatggtcgatggaaacaaggaattcttgttggatatggtaaaggatttggaagcggaatatgcccgttgggaaaagacaaaccgcctgtccaatggactttactggcagggagatgtgcaggatggcatggaggaatctatcagtggaggtcgtcgtaagcaatatgcccgtcctactatcaacagttatatgtatggcaacgccaaagcgctctctcttatcggcatcatgacaggagatgagggcatggccatgaaatatggattgaaagccgactccattaaaacgttggtacaggataagttgtggaacacagaccaccatttctttgaaacgatgcgtggagatgcgtccgccgaagtacgcgaggctatcggctatatcccttggtatttcaatttgccggatgcttcttcccaatacgatgtggcatggaaggaagtgatggacgagaaaggtttttccgcaccttacggacttaccactgccgagcgccgtcatcctgagttccgtacgcatggcgtaggtaagtgtgaatgggatggggctatctggccgtttgcatctgcacagactttgactgcaatggccaatttcatgaataattatcctcagactgtattgacagacagcgtgtatttccatcaaatggaacgctatgtggagtcgcaacatcatcgtgggcgtccctacatcggcgagtatctggatgaggtaaccggttattggttgaaaggggatcaggaacgtagccgttattacaatcattctacttttaatgatttgatgattaccggtttgataggactccgtccgcgcatggataacacagtggaggtgaatccgttgattcccgaaggaaaatgggattatttctgtttggataatgtgttgtatcatggccgtaacctcactattttgtgggataaagacggtagccgttaccagcgtggaaaaggtctgcatatctatgtggatggaaaggaagtaggacatgccgatacattgacccgtgttctttgtgagaatgtgctataattttgaataaaggggatgtcttaagataataaatagactgttgaaagaaaaatgaattacagaaaattcttaatagccgctttgttagttatgtctttctccgtgcaggcgaaagacataactattacccgcctgacgtgtgagatgcgcgaaggaagagtgaccatctctgatgcccctcgtttgggatggcagatgagttcgccggaaaatggcacgcggcagactgcttatgagatagaggttcgggatgtatgggcaggaaaagtagtctggaacagtggcaaagtaaaatccgctcgaagccagttggtttcttgtgcggatgcggccttggcgaaggacaggcattatacttggcgtgtccgtgtctgggatgaggctgatacgccttcggcatggagtgcgccttctgatttcagtatcctgacttccgaagcagctttcgccggcagtgaatggattggggccattacccgtaaggatgcccgcatacccgaaggccggaaatatcatggcagtgaactgaaaaagcctgaggcaaaggccgcctgggctgctgtggatactttggcaaagaaaagtatttatctgcgtcgcgagttccatgtggcaaagaaagtgaaagacgccacagcgtatgtatgtggcttgggcttttatgaattttcgctgaatggagaaaaagtgggagacagcgaatttgcccccctttggagcgactatgacaaaagtgtctattataatacttatgatgtcacctcgcaagtgaagaaaggcggtaacgctatcggagtcctgctgggaaatggattttacaatgtgcaaggcggccgctatcgtaaactgcaaatcagtttcggcgctcccacgcttcgtttccggatggtggtgaattatgaagacggaaccagtgaaacgattgtttccggaaaggactggaagtacgatttcagtcccgtactgttcaattgcatctatggcggagaagattatgacgcccgccgtgagcagaaaggctggaacatgttcggttttaaagagcaggattggcgtcctgtcgtgattcaggaagcccccaaaggggtgcttcgtccgcagatagcgcaaccggtgaagattatggagcgttatgatatccggaaaatgaccaagctcaccgctgaacagataacagctgcctgcaagtcaaccaaacggacagtagatccgtctgcctttgtgctggatatgggacagaacctggctggtttccccgaaattaccgtccgtggaaagaaagggcagaaaataactctgcttgtatccgaatccctgacggacgaaggagcttgcaatcagcgtcagaccggcagacaacattattatgaatatatcctgaaaggggaaggagtggaaacttggcatcctcgtttttcttactatggtttccggtatattcaggtggaaggcgctgtgctgaaagggcaaaaaaacaccttgcatcttccggtgatccagaagatacaatcgtgctttgtttataattcggctcctaaggtatccacattccaatgttccaatcgtatattcaatgaggcccatcggctgatagagaaggcagtgcgaagcaatatgcagtccgtgtttaccgattgtcctcatcgcgagaaactgggttggttggaacaagatcatttgtgtggtcccggtttgctttacaattatgatttgacaggctttgttcctcagactcttcagaacatagccgatgcacagcatgccaatggcgcggttcctaccactgctccggaatatgtggtgttcgagggtcccggtatggatgcttttgccgaatctcccgaatggggatgtacctttgtggtattgcctttcatgtattatgagacgtatggggatgattcattgattagaaaatactataacggaatgcgtcgttacattgattatatgactacccgtgccaatgatggaatcgtttctttcggactgggtgattggtatgattatggagatttccgggccggattttctcgtaatacgcctgttcctttagtagctaccgcccattattatatggttgttcgctatttggtggaggcggcacgtatgctggataataggtatgatgtagcatattacactcatttgggtgaagaaattaataaagcattccatcgggagttttatcataaggatactcgtcagtatggtacgggaagtcagtgcagtaatgccctgccgttgtttctcggaatggttcctgccgaagataaacaggcggtacttgataacttggtagcggatataaaacgtcatggtaaccggctgactactggtgatgtgggaaatcgttatttgttccagacgctagcccgtaacggactgaatgagctgatgtacaccatgcataaccatgaagaggccccggggtatggtttccaactgaaatttggagctaccacgctgaccgagcaatgggatccgcgacaaggttcttcgtggaatcactttatgatgggacagattgatgaatggttcttcaactcgctggcgggtatccgcaccgttgagggaaaaccgggaatgaaggaaatagaaatacgtccccgtccggtaggcgatttgacatacgtccgtgcctctaccaaaaccttgtacggaaaagtcgcggtagactggacacgcgagaatggagtctttacattgaaagtaacgatacctgtagggtgtacggcatgcgtattccttcccgatgagaaagagccgaagatagtggaaagtggaacttattcttttaagaaataaacgcagctttcataggaaaagccccctgggggtgtttggtaaaactaaaatcaattaatgaacgatatgaataaacgtacctttttaagtctgttgttatgtgtttgcagtttgtcttttctgcatgccgagcgtgtggatatgcagcaagccggtgccgatatacaaggccggaaattaaacacgacattgattaattctaccatcgaccgcttgaatgccaatggtggcggaacactctttttccccgcaggaacttatctcaccggttccatccacatgaaaagtaatattacattagaattggaagcaggagccaccttgaaattctcggagaactttgacgacttcctcccttatgtggaagtgcgtcacgagggaatcatgatgaaaagtttccaaccgttgatttacgccgtagatgcagagaacatcaccatcaagggagaaggaactctggatggacagggtaaggcatggtggactgaatttttccgtgtactggtagaccttagagataacggcaagagaaacatcaacaagtaccagcccatgttcgagaaggaaaacgacctgaaagccctttacgctgaaaccaatgaagactggcatggcacactggaccgtcgctttttccgtcctcctttcatacatcccatccgttgtaagaatgtacgggtagagggcgtgaagattatcaactctcccttctggactgtaaatcctgaattttgcgacaatgtgaccattaaaggcattaccatccacaatgtgccttcccccaacacggacggcatcaaccccgagtcttgtaagaatgtacacatcagcgactgccacatttcggtaggcgatgactgcatcaccatcaaatccggacgtgacttgcaagcgcgtaaactgggcgttccttgcgagaatatcaccattaccaattgcaccatgttgagcggacacggtggtgtggttatcggcagcgagatgagtggaggagtgaagaaagtgaccatcagcaattgtgtctttgatggtacagaccgagggattcgtctgaaatccactcgtggccgcggaggcattgtggaggatatccgtgtaagcaatattgtgatgagtaatatcaagaaagaagctattgttctcaatctgaaatatagcaagatgcctgccgaaccgaagagtgaccgcactccggaatttcgtaacatctatgtttcgggtgtgacggtccgtgatgtgaatacccccattatggtggtgggcctgcccgaagcgcctattaccggtattgtgatgcgtgatgtgtatattcagaatgccaagcaacgctgtgtctttgaagattgtaaggacttggtgctggatgatgtgtatgtggatggtaaagaaataaaatagactgcccgatgaaaaaacagatgcttttgtgcatggcggcactctctttttccgctgtgtctgcacaaacttatgaaacccggttcgcacgtccgttatccgatgtgttgaatgacgttgccgcccgtttccaggtccgcttgaagtatgatattgatacggtggggcgtatccttccgtatgccgatttccgtatccgtccctattcattggaagaaaccctgactaatgtgctttctcctttcgattataaattcgtgaagcaaagtgataccgtgtacaagttgaaaccatacgagtatgcacgccgcacggatgttgatggagaaaaaatgttgtcatatcttagtggcttgtatactgataaagatcagtgggaacagcgcagggagatacttcgaaaggaagtgcgccaacgtctgggattggatgatatgctgaaaggaacagtgaaggatgcaaagcctattctctcgaaagtacggaaattcgatggatataccgtgcagaattttgcattggagaccttgccggggctttatgtttgcggttcggtttatgcaccgcgttccaaaggtaaacatgcacttattatttgccccaatggccattttggacagggacgttaccggaaggaccaacagcaacgtatggctacattggcgcgtatgggggctatttgtgtggattatgacttgtatggatggggtgaatccgccttgcaggtgggtgcggaagcgcaccataccagtgatgcgcacaccattcaggctatgaacggattgctgatactggatgatatgctggcaaaccgtaaagatatagatcctgcacgcatcggcgtgaacggtggttccggcggaggaacgcagacggtgttgcttaccgttttggacgaccgttttacagctgctgcccctgtggtcagtctggcttctcactttgatggcggttgcccgtgtgaaagtggcaagcccatccagctggcaggtggaggaacttgcaatgcggaactggccgccctgtttgctccgcgtcccatgctggtggtttccgacggaggagactggacagtcacggttcctcgtttggaatatccttacttgcaacgcatctacggtttttatggtgcgacggacaaggtgagcaatgtacatttgccgcaagaacgtcatgatttcggtccgaacaagcggaatgcggtttatgatttctttatagacgtgttcggccttgaccggagaatgttggatgaaagtaaagtaaccattgaatcggaaaacgcactgaagagctttggtgagaaaggtgagaaactgccagccggagccttaagatataaagaatgattttgtcgtttatttattaggttaagagttagtgtagaatctccctcttgcatagcctgtgaaggtgagcaagggggagtttttttaggtatgggggttaatactttttgtcgggtatatcaggtcttgtcatacggactgttaagtctttttgtgcggactgttactatagtcttcggcagtggaccgtacagtctgctacagtggactgtacggtctgccgtagtgaaacatacggactactgtcgcagtctgtaaaaggtaaccgtaagaaatgctttaatggtactgaaaaaaagacttaatggagctgaagcgatgaattaactctgcatttatgttataatcatctttaattctccatccttgtggcgctttcggtcgttttcttgtttatagttgcggattcaaaccggtttctacatcggatttcagccgggtataatggaaaaagcggaggttataataagataatgcgtttctgtaatatggcagcaatctgttgtctcagttgtggggcgctgatgggcttggccatatagccgtcgaagccattttccataacccgttgttcatcactggcataggcgaaagcggtaacggcgatgataggcacatccaaggatagttttcgtatttcccgggtggcctcatagccatccatcaccggcatattgatatccatcagaattatctgaggattatggagcttatacaaattgaccgcctcttttccatcccaagcatgaaccaggttatattctcgtttcaagatagattggaacagccggtaattactctcattgtcttcggcaactagaatggtcagcttgtctttctgcacggagatgggctgatgtttgtcttcctttttgttatccgcatcagcgggctggtagggaatggtgaaccagaaagtggatccttttccttcttcagattctacgccgatgcgtcctcccatgtgctctacaatcgtctggcaaatggataatcccagtcctgtaccctgtacaaaagagttcagtttgacgaaacgtccgaatatggagttcactttgtcggctggaatgccgcaaccggtatctttaacatagaaataaagttctctgccgcatagtttgtagccgaaggtgatgcttccttgtgaggtaaacttgctggcgttgttcagcaaattattcaaaacttgcatcaggcggttcttttctgtctttatggggcaagaggggagccctttgtgtgcaatcagttgaatgccacaggtttccgtccggtaacggaccacgctctctatttcggaaataatctcgttcagctctacattggaatagctgaactccagtgtgccggcctctatttttgataagtccagtatgtcgctgattaattgcagcagtaacgtattgttactttcaatgatattgatatattcctgcttttcctgttcctcttctgcagtagcaaggatgtttgagaaaccgatgatagcatttagcggagtgcgtatttcgtggctcatattggcaaggaaagcggacttcagccggttggattcttccgcgcggtccttggctgaaagcagttcgttttccattgttttccgttcgttgataatcagtgaggaaccgactaaagtcagcggctttccgtttttgtctcttgtttctacggctgcttgtgcttctacccagtctattttccaatgttttccatcattggccagtacacggtactcttctttcactttctctatttttccgtctgccaggtcgcggtaggcctgtatcacgcgtggacggtcttctttgataattttggcgaaatattgtttgtccgatacgctcaactgatcttcgctgatgctgcccggcatggctgccatggcaatggggcggttaaggtcgcacaagatggtatggtctttcaagttccatttccaaggtacaatgttggctacttccagtgccatggaaagtttatggttcgtggcgcttagcatttgctgtgcattgtgcaactcggtgctgtccatgcagaacacatcgaccatatccggttcagtggagcaattcaggacaacatcatagaaggtgttgacggttttaaaataatatgggaatgtgatcgatttcttttctttcaaggtgatactcatgaaatgggtgaattccggtaaagattcgggaaagatttcggaggcccttttccctattatatcggattttttaaaaaaacatcgttcgaaataacggttgacatcctgataaatgctgtctataatatttccttctttatcccatattacttgttccttcatgtaaagaatcggcatattatccaccaggttgatatattgtgcgtttgtttctatttcattttgttgggctcgtctcaggactttcagcatctgaatgcgtttttgttgtgttacagccatcagtgcgaaggccatgagcacaatcaggataaaccatttgtatttgttcagaaagtggacaggcttgtcatagaaaatggtgtcatcggggcatcgcttggggtcgagccctttatttatgagtctggtatagttgaaggtggggtgtgcttcctgaggctcatagaaaggaatgtcactggctctttttccaccgaggatgtcgtcaattgttttcaataattgcttggtgaaggcttgttcattgtacatgtatcctcctaccatacctccgtcgtccatacctgcatagcggatggtgaaaagaggggcggagatgctggaaatgcttctgtaagcgtttatcagaaagctgtccgaggtgaaggattcggtgaaccaagtggataccagaatgcctgtagtcttgtctgccttacgtacagcattatataactggtgcagagtattggtgcgtgaagagatgtatttatattccagttgcggatattttgtttggatcaattcccgcagtcgttggtcatattcgggattgggataaatcccgtctcccaaaaagatgagtcttttcatgccgggaatcatttgcagcatcagttccacactttcttccagatagataggggtatgcatgtaggtgaaattgtattcttgggccagttcgctcatgtgtgtcttttctttgggagtgactgtatctctctgcctgtagaatatttcaggatacacataggggtctgccccgcagacaatagtaggtacggtaccccataaagcttgtatctcttctctgaaaatcagactcatgcttcctacaaataccaatagacggggaggggtggagccatatcttgaggaaagtgtttctgaaaacttttctattttagcagaatcgcctaccatgaataaattcagatgttctatgtaggcgtctatatttttggttccggctagtttatggacaatgggggtggtaatgctgttgctccatggagaagattcgttatagctgtttaaaatcagcacatattcttcgttcccggtacgatcctgtgcattggcagcttcacaggtgaatgagaagatggtacatatataggtatatatcagcagccattgaatatagcctatacggattctcctacgatttttatccattattgttttctactcttctttaaatatatcgctctgatgcttgtgatgaaacaaatgtactattaaatcagggagtggacgaagaaaaataaatgtttaacaaatattaaaagaaacgcactgaagtggggaacttcctgtatgtccaggtgtgaacattttaaacgggaactttggccaacttatatggcaatgatttaaaatgccggtgaaaggcaggaaaagagggaggatgagaaatatcttttgcgttatctcttttatatctgaagaaatagctttatatttatcccctcatcttattttaaggtagttatggaatatcacttaagtactaaattgaatggaaatatagcaatgacttcctgtttccatgaaaactcctttttgcaacgtgacgggagtctttataaatttatatgggtgcggcatggaacgctggatgtggaagtggatcatgtggtgatgcatctggaaaaagaggaaatgatttcgctcactcctttgcatcatgtgcagataaggggagtggacggtgaatacctcacttttctattcaatagtaacttttattgtatttacgggcatgacagcgaggtgtcttgtaacggattcctgtttaacggttcttcccgtgtcatgcgtttgaagctttcgccttcccagtcggcccgtcttgacagtattgtcgatattttcagaggggagtgtgaaatacaagacaacttgcaggaagaaatgttgcgtattattctgaaacgtttcattatcacttgtacccgcatagcccgtgaaatgtttgatgtagacccggggcgtgagaacacgtttgatgtgattcgtcagttttatgtgctggttgacagtcattttaaggagaagaagcaagtgcaggattatgctgatatgttgtgtcgttctcccaagaccatttccaatctcttttccctttacaggctttcttctcctttgcgtgtcattcatgaacgcgtggatgcggaagccaagcgcctgttgctttatacgggcaagagtgcgaaggaaatcagtgagattctgggatttgaggatttggctacatttagccggttctttaagaaaatgaacaaggagagcctttcggaataccggaaaagagagaaacgggaataattgccaacctatatgggggaattgccatttactggagagggaaaactgccgacctttgcaccaggaagttaaatcttttaataatgaaagcaatgatgacaaaattaaaatctctgtttgttgcgtttttaacaatagcagcatctgcccaaaaactgggtatcaatcttatccgtgtggcaatccttgtaatttttgtatggattggcggtctgaaattctggaattatgaagccgaaggaattgtgccttttgtggcgaacagtccctttatgagtttcttttataccaaggacgctcctgaatataaagaatataagctgaaagaaggcgaattcgatgaagcgaagcaccagtggcatgaagagaacaatacttatgggttttctcatggattgggtattttgattatgggaatcggtatcttgacgtttttaggtatcttctctccgaaaatcggtttggtaggggccggactggctattgtcatgacactgggcactttgtctttccttgtgacaacgcctgaggtgtgggtccccgatttgggaagtggcgaacaggggttccctctgctgacgggcgccggccgtctggtcattaaagatactgctattttggcaggagctgttgttgttctttcggatagtgcgagaagggtattgaaccagttgaaaaagtaaagttagaaagaccggtcacggacatgcccttttataggggtgtatatggatgtattccagcgggaggcaagtatttcctgcaagacataactatctatgaggcaagttgtatcctgtgtcatcttgctgtctgtcagctattgataatgaatgcaaatttggcagattctgcggttaacccctgttaagtgcttatctatctgtgttaaaagaggaaaaaaatctctgacaaacggtacaaccgtacaatatttgtcattacattagcgtcagaaatgttaaaccaaacttgaaattaacaaattaatagatattaagttatgaaacaagcaactaaaatggtactaggcgcagcagcaattgtagcagtcagcgcaggtgtagcaggagtaacgacttattctatgttgaaacccgagccaaacaaaagcgtggcctttaatgatgtgttccaacaaaatccgaatacaagacttgccgcgctggacgccacccaaatgcaaccggtggatttgactcaggcagcggaaaattcagtgcatgcagtagttcatataaagtcaactcaagaatcaaaaactcagacagttaccgttcgtgatccgttctatgatttctttggtgatatttttgggaatggcagaggcggcggtcagcagcgtcaggtgcagactcctgaaagagtgggattcggttccggagtgatcatctcgaaagatggatatattgtaacgaataaccatgtaattgataatgctgatgtgatcagtgtcaaactgaatgacggacgtgaatataaaggacgtgtaatcggcacagatcccagcacggatttagcgttggttaaaattgaagcggatgaacttcccactattcccgtaggcgattcggaggctttgaaagtgggcgagtgggtattggctgtaggtaatccgtttaatatgacatctacagtaaccgccggtattgtgagtgccaaggcacgttctttgggcgtatataatcaaggtgtggagtcattcatccagacggatgcagctattaaccaaggtaacagtggtggggcattggtcaatgcaaaaggagagttggtaggtatcaactcggtgctttattcaccgacaggagcttattccggatacggttttgccatccctaccagtattatgaaaaaggtaatagccgatttgaaagaatacggaaccgttcagcgtgcggtattgggtatcaagggtactccgattaatgatgaccagcagatgatgccggaagaaatcaagaagaaagtgaaggaactgggtgctaccgatggtgtgctgatagctgaggtgattgatggaggttctgcggctggtaacttggaagtggacgatgtcattatcggtattgacggaaaacgtgtgaagaactttgcagagttgcaggaagggttggctaaacaccgtccgggtgacaaagtaaccgtcaaggtgttgcgtgacaagaaagaaaaggatatcgagatgactttgaaaaatgcacagggaacaacgaaagtggtgaagagtgcgggcatggatatcttgggcgcagcgttccgtgaagttcctcaggaattgaagagacaattgaacttgggatatggtgtggaagtcacaggtgtgacagacggtaaaatgaaagctgccggtatccgtaaaggcttcatcatcctgaaggcaaatggacaacctgtcaaatcagtaaatgatttggaagatgtgctgaaagctgctacccagtcaccggatcaggtattgttcttgagcggtatgttcccgtcaggtaaacgtgcgaactatgcagtagatttgatacaggaataaggatatttttaaggtagaaagtttcaataggtaaagtttagaggatgcacggtaagggacacttccgtgcatcctgattttataatcaaacaggattgatatgctggaaagaagcattgtaaacggaatttcggggatgatgggaacacaagtttgatttttagtatgtttttatccgatagtagagtcgtgtaactattaatttgcgtcataggtgtttgcgttcccgtccggccggaaaacggaggacataaatcaattctgtttcacgataagataagagctgttgacaggtctatccttacgctatatcatggaataatctctattaagtaagctgataagatcaataaagagaaagatataaccctattttcgcaaaatatttaggaaaagaaggacaaagatagtcttttttgatttattagctaatatttttcaaacaaaaatggatgtattccatttaatgttgtaaatttgcatcccaaatttgttttatagagaatgagacaattaaagattaccaaaagtatcactaaccgagagagcgcatctctggataagtatttacaggaaataggccgtgaagacctgattactgtagaggaagaggtagagctcgctcagcgtatccgtaaaggcgaccgggtagcattggaaaaactgacacgtgccaacttgcgtttcgtcgtgtctgtagccaagcagtatcaaaatcaggggttaagtcttcctgacttgattaatgaaggcaacctgggattgattaaagcagctgaaaagttcgatgagacccgaggcttcaagtttatcagttacgccgtatggtggattcgtcagtctattctccaggcattggcagaacagtcacgtattgtccgtttgccgttgaatcaggtaggctcgttgaacaagatcagcaaagccttctctaaattcgaacaggaaaacgagcgtcgtccttctccggaagaactggccgatgaactggaaatacctgtagacaaaatctcggacacgttgaaggtttcaggacgccacatttctgtagacgctccttttgtggaaggagaagacaacagtttgttggatgtgcttgtgaacgacgactcgcctatggcagaccgttccttggttaatgagtcacttgcgagggaaattgatagagcactctctacgctgaccgaaagggagaaggatattatccagatgtttttcggtattaatacgcaggaaatgacgttggaagaaatcggcgataaattcggcctcactcgtgagcgcgtacgccagattaaagagaaagccattagaagattgagacaaaattcgcgtagcaagctgcttaagtcttatttagggtaagaaagattcggtttccgaaaagaaaacaaagcacaagatggaaggttactcccgtcttgtgcttttgttcataatataccaataatgcccattggctgcgctatgtgccacatggtaatgggcacatcagcaaattattatagttaattaatctattactttttcgtatttgtccgtaaataactatttttgtcctctaataaaattataaaattagaattatgaaatccataaagattctgtgctctttattattggtactgatggtatgctcggcattctcattgaaaggaagtaaaggtaaatccgtttatatagtaggtgtatccgcatcgtttacagattcattggtttatttcacggaaatccaattgctggacagtgtaaggctggataagaacaagatgttgccggaacgctcacaatacagttatcagctgaaaaattatttggaaaacgaggaagggctgacgaaccgcacttgctttgtttatttctcgaacagcagaaagaaactgcagaagaccatcaataagatgaagatcaagtatcaaaaaggaaagatcttgctgattcgcgaagtgaaccccaatgcattcaagttcaagaaaccggaagagtgatccttttcttatgaaaaagattctatttatatttttaacagcctgctttttcttctcttgcgagaaggaaacaatcgtgattcctcagcaacatgccggaagaacggtcctggctttcttttgggcggataacagcttgaattccaatttgcgtaataatattcggacgatgatgcaggggcttcaggctatgaaggattcggctgctttgttggtatattgggatggtgaggcttcggatatcagttggccggagccttgtatcgttgaatatgtgactaatggtcaaggggggatcaacagtatgtccaaagaagcggtcaatgcgatgatcgcggatcaggacatgtcggttcacgacttgataagtattggcaatatcagaaaaaaatattcccctcagacatcgacggagaaaaccgtcatgcagacagtgataggtgatatgatgagtgtttatccgtcggaaagttatggaataatctttggttctcacggttcaggatggttgcccactattaccggcacccgttctataggtcaagatggcggccggtattccagtgacacagcgttgataccggaattggcggaagtgctgcgtacggtaaatcctcaaaagtttgattttgtcttgtttgatgcgtgtatgatggggtgtgccgaagtgtattatgagctgaaggatgctgccaaatattgcatcgcttctgtacttgatataccggcagccggatttccttatgcaagtgtgatgccttatttgtatgaaaatgcgatcaaggagtatttgaagccaatctgtaaagattatatagattattataactataatggttggggaaccatttcggcagtggattgcaatcagatggaaggtttggcggaagcggtcagaagtgtgattttgtccaatcaggatagcctgaagaacgtggatatagctgatttgcagcaatatggcaaaggcagcagcaacttcaaaggatatgcctatgatatgttacagtttattgaaaaattgtgtggaggaatggctccagacgattttacgcaacaattaaagaagacggtcatttatacagattatactcatgatcccacctcatccttgtacagaatagatggggataactacagtggaatgggtatgtatatccccaattcattcaccactcccaaatatttgctttggaacaattatttcaagtcttccatagcgtggtatcatgcatccggatgggctgaaacggaatctatttgggggaattgaaggagaatgcagccagttgctttttacttgatcccgaataatagatatagcggatggaagtaccgaatttccggtattcttccatttccaccgagttgtctactgcattctgcagggcttgtttaaaggcggcataatgggtgttcatataagtggcgttgtccagttctcctgtaacactgtagaaatagctcacactattatctttctcattataacgggtgctgtccagtgtaatcgtttcgttcatacgtgtggggcaggaccggttggtcttttcggctgtctgtttgaatttacggacttgtgaacggtggttattattacatcctgccaaagtaaggatgcctagggccgctattataactgtttctcttttcattataaatcggtattttgaagcgaaagtaaactataagtttgaacaaagcaaatggatttttgttttttattagtaagtttgtgcaaacaaaaaaagtaaaacatgtctcgcattatagatgaattaaaacgtacggaccacaagcgttatctgggtggtcttgatttctttaaatatattggtcccggattactggttactgtaggttttattgatccgggaaactgggcctcgaattttgcagccggttccgaatttggttacgcgttgttgtgggtggtgaccctgtctaccattatgttgattgtgttgcagcacaatgtggcccacctgggcattgtgacgggattgtgcctgagtgaagcagccacgcagtattgtcccaagtggatatcccgtcccattttgggcagcgcggtactggcctccatatccacttcgctggcggagatattgggaggagccattgccttgcagatgcttttaggaattcccatagcctggggatctgttcttactacgatgtttgtcgtcattatgcttttttccaattcatataaaaagatagaaagagccatcattgcttttgtatccgtaatcggcctttcgtttctgtatgagttgtttttggtagatattgactggcctgtggcggtccgttcctgggtggttcccgacataccccaaggcagtatgctgattatcatgagtgtgcttggggcagtggttatgccgcataatcttttcttgcattcagaggtgatacagagccacgagtacaacaagcaggacgagagttccattcgtaaagtattgaaatatgagttctatgatactttgttctccatgattgtgggatgggctatcaatagtgccatgatcttactggcagccgctactttcttccgtacccagactccggtggaagagttgcagcaggcgaagtcgttgcttgacccattgctgggcagccatgccggaatcatttttgccctggcattgctgatggcggggatttcctccaccataaccagtggcatggcggcaggttctatctttgcgggtattttcggtgagtcttatcatatcaaggatattcactccaaggtaggtattttgatttctttggggatagcattggttcttattttctttattgagaatcccttttacggacttatcatctctcagatgattctgagtatccagctgcctttcacggtgttcctgcaagtaggactgacctcttccaaacgggtgatgggcaaatatgccaactcccggtggagttcattcgtgctttataccattgcggtgattgtctccgcattgaatatcatgctgttgctcagttgaataatgtgcgaatttgcccatgtgccaattgccatgcgggaccatagcgcagcacgtgggcacatgggcaaattttttatttcgttttgctttccgagataatcagcagtttgtcaccggcatgcagttgcagagagccattggggatcatgaattcgttccccctttttaccagcatcaccagcatacctttaggcagattcatatccatcagcctgtctccctttgccagcatttcctccgtcagtacgatatcgcggaggtctgtattgatttcctccggtatctctactccgaaatcatttcctgttttttccagtggtgtatccagatggagtaatttggccatccatgaaatggtcgttccttgaaccactaaagacaatatggtaatgaaaaatacgatattgaaaatctgggtagatcccggcacatcagccactaccggataagtggcgaatatgataggtactgctccgcgtaatcccacccaggaaataaacagccgtgagctgatgttcatctttttaaagggaagaagacagagcaggacactgagcgggcgggcgagtacaatcatgaaaatgccgatcaaggttgccggtatggcgatggacaacatttcatggggattcaccagcaatcccaggctcaggaacatgataatttggaagagccaggtcatgccgttcataaaagtagcgatctccttacggtttacaatgcgtgcgttacccaccatcattcctgctatatagacagccagatagccgtttcctttacacaggtcggtcatggtgaatgtgaagaaaataaagctcagcagcaagataggatagagcgactggttcttcaagtcaatcttgttgatgattactaccgccagttttcccagcaggaatcctgaggcgccacccacagcaaactgaatcaggaatgaaatcagaatatcgtctgcccccatgcctgccgatgtgatgaattgtatcaggacgatagtaagcatatacgccatagggtcattacttccgctttccagttccagcatcgggcggaggttatgtttcaggttcatgctttgcgagcgcaggatattgaacacggaagcagagtccgtagaggacatggtagccgccagcaacatggccgtcatcagggacatggtaatgctgacattcgagaacccggaaatccaataaataaagaatccggtgaaaatagtagtaagcaacacgccgaaggtggaaagcagtatgccttgtggcaatacaggcttgatatccgaatatttggtatccataccccctgagaacagaatgatgctaagggccatcatgccgatgaactgtgcctcgcccgcatcatggaattggagtcccaggccgtcgcttccgaacagcatgccgaccaataaaaaaacaagtaacgtagggattccgaaccggtagccggtcttgctcactacaatacttacgaacaataggatagaacctatcaagagaatgttttctgcattaaatatcatacttctgtgatcttgtttaattttttaatatgatgtgccagcatcaggcaggctgtgataaatgctaaaagatcggatacaggcatactgagccaaatgccgttcagtccccaccaataaggcagcaacagcaggcagggcaataaatacaacagttggcgggacaaggagaggaagatagaaattttcgctttcccgatagattggaagaaactggaaatcacaatttgtattcccacgaaaggaaacatcaggactccgatttgcaacccagtgcgtgccaatgctgtaagttctttatcgtctgtaaacatattaacaaccaaattagggaaaagttcgctgaaaacaaatcccagcgaagtgatgcacccccctgcaatcatgcaatatttcaacgtctgcttcacccggccgaatttgtgtgccccatgattatagcccacaatcggttgcatccccatagtcagtcccatgataaccattacaaacaacatcagcagacggtttaatatgccgtatgctccgatagccagatcgcccccgtagagcagcaggctcttgttgaatataatgacaatggccgaagcgcagacattcatcaggaacggcgacatgccgatactgaaaatattttctacgatccgtttccttaatttgaatatccctttcttgaaacggatataacttttttcctgcatgaaatggctcagcacccatatcatgccggcaaactgtgaaaggatggttgccgtggctgctccgcggattccccagccgagccagaatataaagacaggagccaaaatgatgttgcaccccactgtcagcatggaggacagcatcgcttttcggggataaccggtggcacgcatgatattgttcagcccgatcattacataggtgacaggacttcctattaatataatctgcataaagtcgcgggcgtatggcaacgtgtcatggcttgccccgaagaagaacagaatctggtctagaaacagcaaggtgatgcctccgtagaaaatagaatttatcacacagagcaccgttacgtttcccagcaccttctcggcgccgtccgtatccttctgtcccaggcggatggacgatatggtagccccacccactccgaccaatgtgcagaatgccaccagcaggttcatcagcggaaaggagatagccagtcccgagatagccatggcccccacaccgtgcccgataaatacgctatcaataatattatacagtgacgtcagtgtcattccgatgatagcagggatagagtactctaaaagcagctttcctaccttttctgtacccagtatgtgcgggttgttttctttcattcgcgtttttattatttttaagctttgcaaagttaggaatatggaggattattcagacctttgcggcgttaaatcaaactaaaagtaatatgaattcaacaaaaagcattgcagctttattcgattttgacggggtggtggtagatacggaacctcagtatagtatattctggaatgaacaaggacggaaataccatcctgagatacccgagttcggccggatgataaaagggcagacattgacacaaatttataacaaatatttcgctggaatggaagacgttcagcgtgaaattacagaagatttgaacaaatttgaagaaaatatgttatttaattatatcccgggcgtagagggctttatgaaggagctgagagccaacggggtaaagatagcgatagtcacaagctcaaatgaaatgaaaatgaacaacgcatataaagcacatccggaactgaaacaaagtgtggaccgtatcctcacagccgaaatgttcactcgttccaaaccagaccccgaatgtttcttattaggagccactgtctttgataccgtgcccgagaactgcgtggttttcgaggattcatttcacgggcttgaggcaggaaatcgggcaggaatgaccgtgataggattggctactaccaaccctgaagagcagatacgcgataaggcaaaggctgttattcaggactttaatggatttagtttcgaaaaaatgaaggatataatgaggtaatgtcaactaaaacatctacctttgcagccgttttttataaattaaagtaaatatggcaggatatatttcaggcgatacacgcaaagtaacgacacaccgtttggtggaaatgaagcagagaggcgagaagatttctatgcttacttcgtatgattacacgacagcgcagattgtagacggcgcaggcatcgacgtcatactggtaggagactccgcttcgaatgtcatggcgggaaatgtgaccacacttcccatcacccttgaccagatgatttatcacgggaaatccgtggttcgtggagtgaaacgcgcgctcgttgtggtcgatttgcctttcggtacttaccagacttccgagtacgaagcggtgaccaatgcgatcaaagtgatgaagatcacacatgccgatgcattgaagctggaaggtggcgtagaaatcattgatgcggtaaagaaaatcatcgctgcgggtattcccatcatgggacatttgggactgatgccgcagtctatcaataaatacggaacttatactgtacgtgccaaggacgaggaagaggccgaaaagctgctgagtgacgcgcatctgctggaagaggcgggatgttttgcgttggtgctcgaaaaaatccccgcatcattggcggaacgtgtggccaaggaactgactatccccgttatcggcatcggagccggaggcgctgtggacggacaggtgctggttgtatccgacatgctgggtatgaccaacggtttcagtccccgtttcctccgtcgttatgccgatttgcatactgttatgacaggagccatacagcaatacgtggatgatgtgaaaaaaggtgattttcctaacgaagacgaacaatattaacaaagtttctgctgatatgtatgatgacttcttctttccgtatgagaaagcaaaactgtggaccgggaatatggttctgctatccctttcgaactttttgctttatgcctcgctatacatgatgcttcccgcactgcctttatggatggtgcggcactggtattgcagctatgcggaagcaggagcggctgtggctgttttcggactggctatgtttcttccgggagcgttcaacagctatcttatcgatacgttcaagcgtaaaagtgtttgcctggtcgcgatgcttctgttcgtggcgtccagcctgctgtatccatacgttgcgactgtagggttcatagccttggtccgggctgtccagggggggctgttcagtgtcattaccatgactacgggtagcacgctggtgattgacgtcaccgcctcacgccgccgcacggatgcgaatatcgccttttcgtgggtggggcgttttggaatggtggcaggtcttgcgttgggaatttacatttatccttactggaattttcaccatgttgtttatacctgtgtcgctttgggcacactggccttgcttctgattctggcggtggatgtccctttccgtgctccgctgcgcacctcatggttctcgttggaccgttttctgttgcctcgtactctgtggccggcactgaatatgatgatgctttccgctgttttcggcattttgatagcgcacatttataatgagttgttttacatttgcatcctgatcggttttatcatctccctgttgcttttgcgttatgtgctttcctatgcttccggccgttcggaggtggagctggggcaggccgcgatgataggcggactgttgttgcttgctttttccaacagcttgatgaacagttatatagccggtgtattgctgggcacggggatcggtactaccgtgtcacggttttttataaagatgattagtctgccgatgcattgcgaacggggtacgggaaacaatacttatcagctgatgtgggaagtaggtatgctgagtggttttctgtttgagaatatgtggaccgaaagtcatcctgatactatttattggatatgtatcggtatctgtgtcactcttttgctgatgtatgagttctttacacatccgtggtattacagaaaaatggaggaaaaacagtaggatgatgatttcaaatgttggtttatccagctgtcggagtaaaaatatagcaacttaaataaattaataatataaagaatatggcagacgacaaaaagattatcttttcgatggtaggcgtaagcaaagccttccaggcgaacaaacaggtattgaaagacatctacctatcctttttttacggtgctaagatcggtatcatcggtctgaacggttcaggtaagtcaacgctgatgaaaatcatcgccggactggagaaaagttatcagggagaagtggtgttctcgccgggctactctgtaggctatctggcacaggaaccgcatctggataatgaaaagacagtgaaagaggtagtgatggaaggtgtgcagagcattgtggacactttggcggaatacgaagaaataaacaacaagttcgggcttcccgaatactatgaggacccagagaagatggatgcactctttgcccgtcaggctgagttgcaggacatcattgacgctacggacgcatggaatctggacagcaaactggaacgcgccatggatgcgttgcgctgtccgcccgaagaccagccggtgaagaacctctcgggaggtgagcgccgccgtgtggccttgtgccgcctgctgttgcagaagccggatatcctgttgctggacgagcctaccaaccacttggacgcggaaagtatcgactggctggaacagcatttgcagcaatatgaaggtacggtgattgccgtaacccacgaccgttacttcctggaccacgtagccggatggattctggaactggaccgtggcgaaggaattccctggaagggaaattactccagctggctggaacagaagaccaaacgtatggagatggaagagaaagtggcaagcaaacgccgcaagaccttggaacgcgagctggactgggtgcgcatggctcccaaagcccgtcaggcgaaaggaaaggcccgtctgaactcctatgacaagctgctgaacgaggatgtgaaggaaaaggaagagaaactggaaatctttattccgaacggtccccgtctgggcaacaaggtgatcgaggccaaaggagtggcgaaagcttacggtgacaagctgttgttcgataacctgaatttcatgctgccccctaacggcattgtcggcgtaatcggtcctaacggcgccggtaagactactttgttccgcttgattatgggactggaaaccgtagacaaaggtactttcgaggtaggagagaccgtgaaactggcatacgtagaccagcagcataaggatattgacccggaaaaatccgtttatcaggtaatcagcggtggaaacgagctgatccgtctgggcaacagggatatcaacgcgcgtgcttacctcagccgtttcaatttctcgggagccgatcaggagaaactttgcggaatgctttcgggtggtgagcgcaaccgcctgcatctggctatggcactgaaagaagaaggcaacgtgctgctgctggacgagcctaccaatgatattgacgtgaacacgctgcgcgcgctggaggaaggtctggacgattttgcaggttgtgcggtggtgatcagccacgaccgttggttcctggaccgtatctgtacccatatcctggctttcgaaggaaacagcgaggtattcttctttgaaggatcttattcggaatacgaagagaacaagatgaagcgtctgggcaatgaggagccgaaacgggtgcgctaccgcaagctgatggaagactgatgggggcctccctgttctgataaggtccaaactaaaatgaccattccgaaaagtaacagattgtaattacaagacctgaaagagtcgtatcaagctccgttttgagtaatgatacgactcttttttttgcctttaaggaggttcaagtttcaaatcaaaacctctaattaagttttgaaccctcttgggttgtgtactctctctggggcgcggatagcggaagaaaccagaccagtcactgtaaattgtaaccgatttgtagcttgtatatcgtttctattagctatctttgcaacgtcttttaagacattaattataatattaattaattaaaaagtttatggtaaaaagaatgcgatctttttttgcggtggttatgttggtaatcgctgctgctgttaacgcccaggtcaccacttcgtcaatgagtggtaaggtggttgatcaaagcaatgaagccattatcggcgcaacgattcaggctattcacgaaccgtccggcacccattatggggccattaccaatgtggacggccgttattccatccagggcatgcgtgccggcggcccttacaaagtagaagtttcttatgtaggttatcaatcagtggtttacaagagcatcaacctccagttgggagagaattatgtattggatgcgaacttgaaggaatctaccgaattattggatgaagtggtgattaccgcttccaaaagcagcaacatgaaatcagaccgcgccggagcggtaaccaatgtcgatgcggccagaatgtcggaagtgcctacagtgagccgcagcatgaacgatatcatgcgtctgacccctcagggagccaatatcggtagcggtttctcagtgggtggaggtaactaccgccagtcttatgtcactgtggacggagccgctttcaacaatgccttcggtatcggctcgaacttgccggcaggcggttcgcctatctctctggatgctttggaacagatttccgtttccaccaccccctttgatgtccgtcagagcggatttacaggaggtgccatcaacgccgtgacaaagagtggtacgaatgagttcaaaggtacagcctatatgtacacttccaatacccacctcaccggaaacaaggtagaggactatgaactgacccgcaaccgtgaccacagcaccacctacggagcttctctgggaggtgcgatcattaaaaacaagttgttcttcttcgtgaacggcgaatatcaggataatgtgcaggcaggcccgtcgggcatagcgcgtagcggcgccaatgacgaatggagcaccaacggcattgtgcaccgtccgttcgagaacaccacaacggtaggcgaccgtaccttcgtagggatgaacaacatcagccaatacctgtcggaaaaatacaactataatccgggacgttatcagggatactctctggaaaccccttcttacaagatcatgggccgtctggactggaacatcaacaacaacaataagattaatttccgtttcacccatacccattccaagtattctgccaacccttcctcttccaccaccccgtttaaagattcaatcatttatccgggcggagtagacggcagcgcgggcaagagcagttcgggacgtacatcaaacaccggtctgtactttgaaagctcacgctatatgcaggaacagaacttcacctccatcgcttccgaatggaactcaaagtggggggctatcaataacgccctgcgtttcacttattcttatcagaacgaaccgcgtacatacgaaggggggacattccctacggtggacatccttgaccaaggctcgttgtacacctcattcggtccggacccctttacagaagggaacttgcgccaggtgaagacttttgtcattaccgatgagttcaatttctccagcggtatccataactttatgggcggtatccagtttgagtccaataaggcagtgaacggattcatgcaggcgggaagcggttattatgtctattcctcctgggatgattttgtgaacaacagagctccggctgccttcggtatcacgtattccaacaccggggacggttcccagttcctggcgaacatgaagtaccagcagctttctttctatctgcaggaccagatgaatatcacggacaacttcagactgactgccggggtgcgtttcgaactgcccatttatccggagctgaagaacaactataacaaaaatttcgcacagattgactttgacggatatcattacgccacagaccagctgccttcatcctaccagctgaccgcctccccccgtatcggtttcaactgggaccttacaggcgagcgtaagtatgtattgcgcggcggtagcggttacttcatcggccgtctgccgttcgtatggctggtttcggcagtaggtaatgccaattgcggacaaagcacttattattataacgagcagaaggatgccaagtacggacagccgggcttccataccagcgtggccgatatgttgaaagatcctaacctgaaccttccggcagctactgatcccgccgcaccttccggagccaccatcattgaccgcgacctgaagatgaacgccacctggaagtcttcactggctttggatgcaaaacttcccggagatattgactttacgttggaaggtattttcagcaaagagttcaatccggctactgtgaccaacctgggacgtaagtttaaaggagagcaggagatagctccgggtgatgtccgcagaatgtttgagtactccaattcgaacaagacggacgcttattatatcaccaatgcgggaaacagcgcttattattactcactcaccgcctcactggccaagacatttgatttcggcctgcatctttccgcttcctacacccgttcttatgccaagtcgtatggcgacggcatcggcgatcaggtgaactcggcttattacaacaaccgttactctgtcaacggaaacaatgacacggagaccggctatggtacgtatgtatcgcccaaccgtgtgctggcttccgccgcttaccgtattaaatacgccaagaatttcgcttcctccttgtctttgatttatgagggtatgaacatgggctatgccggaggatattccgccgcccgttattcctatacattcaccggaaacattgtaggcgattacggctcaaacaacttgctgtacattccggcatcccgtgaggcgctggataagtggaacttcgccgattatactgacagcaagacgggtgaggtgacttattccgccaaggagcagcgcgatgatttctgggcttacattaatgaggacagttacctgaaaggccgtaaaggcaagtatgccgaacgcggaggagccatcatgccctggcatcatcagctggatttgaagttcaatcaggatttcttcctcaatgtagggggcaagcgcaataccttgcagttcggagtggatatcaagaacttcctgaacttgctgaacagcgactggggaatttataagacggtgaacaatacttccttgttgagttataagagtggtgcttaccagttccagaagaacggaggaaagaaactgactgatacgtattccaatctgaacagtttcaattctacgtattccatacagttcagtgtccgttatatctttaactaagtgaaatagcctgtatcagacaatacaggaacaggatagagaggcgtacccatgaaggtgcgcctcttttgtatgcgtattcttccttgttttgaaaaaacttggaattaagaataaattaagtaccctcgccctccgtttcaaaggcgtgataaaacgtgcttacgagcagacggggcagatggttgccattctggtagacgaatatgacaagcccatgctgcaagccattgtgaagatttaacagaaacttaacagaatacagacatttttatgggtttgaactgtcttttcggaatatggctaaaaccacaaagcacttgtcaaggaatagcttgctataccttaaaatcagcacaatatacgttttgagagccaatatagatacaaatgactccaaaaatcggtggcttcggcatagtttctattccttttctgccgtttacccaataaaattgtgtaactttgcaaaacgatagcaaaaaagaatctcatgaatagaatcaaggagtttttagaagtgaaaggcattagccattagcacatatgctgggaaaaagtttcaatatggttgatctatatgcaaccaataaggtgcaacctcctatacctgtattatatgacattgccagcatattaacagtggatgtaagagaattattagttccttctaaaaaataaactaaatcatggcgtttgaagaagtatagaagataggttctcctgcttcaattttctttctcgtctcatagtaaataataattagcacaatgaaattgtttgaagattataaaaatgacgcaccaaatcaaatcactatggcaaatggtgcattttatcctgatattttagttcaagcatgtgaactatataagccggtgttagtatattttggtcaacttcttaaagtttctccttcttcagagatgcttcttaaagagataacaaagctaacacaaacttggatgagaattcaattacttcgcgtattcagaaaatacgtttctcctgatacttctgttgagatgcttaaatcaaagaataagattccgatggtttgcgtaactttcgggaaagattttagaccaattaatgttgtgcagaagaaatttaatgaaaggccgctaccagacgaagcgttatgtgcaatactttgggaatatagagatagaggacaaaaaggatattcattgacagaaacttttttcgatatgtttcagtcaaaatttccaaattataccatagagggtcccaaaagagcaggagctgatgttcagttgaaaaatgttttttctgattatccaaaccctacaagacctgttgattttgttattagagataataataaaaatgttttagctattggtttagctagatatgatagtgaccgaggtggcgcacaagaagatgacagaacaggtggatataataattgtgctaaagaaattttagcatacacatcctcaaaaggacttaaaacaaaagttatatttctaaatgatggacctggtttattactaggttctatgtgggatgattattcaaaattagaaaaaatcaattcagatagaataatggttttgactcttcgaatgcttgatgagcgtttaacagaagaatggttgaatttttaattcttttaaagaatggcagtcggtataacatcaaatacgtgttcaacgatatcatctatatcacttgttccacaagaccaaattcggtttaggtgcacaactgattatagtggagatttaatcaaaaggctatatcatgctgataatttagatgtacttaatagtcttattaaagatgaaagtgtatgtggtaaaattgacttgatatatatagaccctccatataatacaggtggtgcttttgaaacgagagattcaaaacatgcatataacgataattttaccaccgaggggtatataaaatttatggaagtcagacttattctgatgcataaattattatctccttcgggctcaatttatgttcatttagatagcaatatggtatttcatataaaaatcttgatggattcaatttttggcgagaagaattttagggggatgataacccgtaagaagtgtaagtcgaaaaatttcacaagaacgacttatgggaacatatctgactatatactcttctacacaaaatccgattccgcaaaatggaatagaccttatgagcagtgggatgacgagaaaatacttaaagaatatccatttatagaagaaggaacaggacgacgccacaaaagagttccatgtcatgcacctggtactcgtaatggagctacgggtggcccttggcgtggaatgatgccacctgaaggaaagcattggcaatatacacctgataaacttgatgagatggatgctagaggtgaaatttattggtcttcaaatggtaatcctagaagaaaagtttatctggatcaaagtaaggggatagctgttcaggacatttggttggactttttagatgtgaataatcaaaatactcatttgactggttatcctacagagaaaaatattgatatgttgaagcgaattatcaattcgtcctcaaatcccggagatattgtacttgattgttttgctggttctggcactactttagtagctgctgaagaacttggcagacaatggataggtgttgatattggggaagaagcgataaaaattattcaaaatcgatttgagaatgggactaaacctcttggggattatgtttcacagcgaaagaagaaagatgaagcatcacaatctctgtttgataatttagaacccgataatggatgtagtacattagataataatattacaaaatgtaatattcaatatcagatatttgaggaactttgatattacaaccgattgaattaaggacatacgtcaatgccacgtaaaatgctcgtaaacaagagcattttgcgtggcattgcgttccggatatacactgaccactaaaagcctctccaccgttctcttctgatctcctcgcactgccgtcgttgccatgcaggcattattttctccagctctttcagtttccatcccttcataaagcgtatctcgtccttttcctgctccgtgcacaggctgatgcgcagcagttcgggatagagcacctgtatatgaaaaatcttggctctccatagcagcatggacatctgccagggggtgagggcttggatgcggttcagggtgagcagcatttccagataatgacggtagaaggctttgtccacggtcatgagttggtttatcagatggttcatttttattattgttaaatgaaaagattagttgaatggagaagcaggaaatcaaagcggaggaaagaaacgctatctttggtaaaatcatccttggatacgctatctttgaagaagcctctttgaaaacaaacagttctcattagaaatcctatctttggtaaaagcttcctttaaaagcggtactccttcacagcatcaaaacaagggcacggcttcacgggattcaggtcatgatgccccactatcaatgctttggggaacaggaggcgcagctcgcgcagcaatgccagcagactccctttctgcatcagagtacgcgtatcggcaggtgtgcagtccgccaagagtccgccctcatagcagatgccgatagaatgccggttgtggttcctgcaatgcgctcccaccttttccaaggggcgtccgcggtgaatctctccgtcgcgggtgatatagaaatgatatcctatgtccgtgaagccccggtggcggatgtggtcctggcggcaggtctcaaaatccagcctccgcccctcaggggtggcggagcagtggataataatcaaggtgatggttctcatgagcatcagatgcaggcgttcagtccgagcgcgccggcaagggcggtggctacggtgatgattactttcagaatcagtgtccaggtgtttttctttgttttcaagttcatgggatttttgttttagtgggttgataataaatgaattacgatggaagccaagggcctttgccccaatgaaaacagcttgtcattaggacacattcagccctttagcatcgtgccttgcttccgtcgtaccgggggtccgtcaggcctgttgtcctccgttttccggctccttcgcctctccggtaaggtccacattggtctttccggctttcagcgccttcaccaccagtcgggccgccttgcgtgtggccaccagattgaacacggcatcttccagcagattccggaaacgtgttccggcactccagttcacattcagctttctggcgtggatggcagggttgtaggcggctgagctttcggcgcctatactgttgatgctgatggagaaatcccccaagtcgcccagctgtatcttctgtcctgccagaagctgttcgcgcatacagtccactgccatggtgaggatggccacgatgtccgcacgcttgtacacacagccgtggctggcgatgtgctcggcaaagcggttgatgtccatcacttcagcatactg

SEQ ID NO: 14473 - DNA, 123833 bp, Unknown
  gut microbiota DNA sequence
agccttttttgcggcatccgcatccatcggattgttacgcataacgatactgtaatttaccataatttgttaaaattaaaagttgataattgagaattaagaaacacgattgccggaggatgaagtcagccactggtcaccgaccgctaaaagaaccctatctttcacgtgtaagatactatatcttacagctgtaagattatagatctttcgccttcatcgtcccgacattacaaagatacgatgtgcggaaagggcaatgacgcgataaggtgcgatagggtgcggaatggtccgatttgacgcgatttgacgcgattcgctgttcataatgtttgacggtctgccggaaaaagggtatatttgtatcaaaacaaaacgaacatacatggagaattttcagataagaagttacgggaaaagcgaactggccctgtgctacagtcccgatattaccgagagtgccgcacggcgcaaactgatgcgctggatagaccgcaagccgggactgatgggggcgatgcgggctgccggatacaatgagctgtcacacactttcctgccccttgaggtgaaacttatcgtagaggcgttgggggagccctgaggatgctggaagagccacgggaatgccggggattctccgggagcacagagatccacgggaataccggcatcacaaccggagatgcgaaacgcagacgcagacgcagcagacgcaggtccttttttctcacacacgcgcacgtaccttacatatgcatgtgcgcgtgttttccttgttacctttgtttttttgagtagactcctttccctttcaccatcaccatatccagcgcgcctttttccctcaggcgctgtatccagctgcgtgcggtgttgaccgggatattcagcttctccgcttgctccatcaccatctgtttggtgaattcttgcggcagggccgcatacagcatctcacggtccgctattccccggctgttcagttccgtacttttgtccaggaacgaaagtatgtgcgtggcatgaaggtacaggggctcgcacaaagccagcacggcgcggaagtcctcatcggtgatggacaggttatgccgggtgatgataccgtccttcaggttttcggggtttatagtgggatccggtacggccagcgagggaatttccagactgcgcagcagcgccgtgatacacatcatgcggcacaggatggtccccatacgcatcaccgaagcagacatctcttcgcccgtcactagagaagagcggtagaacagggcgctgaagtgcccgttgaactcatctttctgctgctgggtgaatttcagggtgaacagtcctttcttcttcagctcgtccctgctggccttccattcgtgtcccatccggatgaactctgcttccacgtccagttcatcttcgccgaactggtctttccattcgcctacacggggcatgtaatagaatatgtttcgcgagaactgtccgttctccggcgaggagatgagcggctttatctgtgcgggcgtgcccgagaggagtacggacaggtaacaggcggtggtttccttgtattcccggtctgtgcggcggttgtaggacaggcggtcgtggtcgaacgccttgcgcagcgtgtcgctccagttgccgaattccgtccctatggccgtcgatacggtgtccgcctcgctctcgcagataatccccgttccgtccgagtctatcaggttttgcagcagtcccgtacccgtgttgttgccggggatgatgaacatgcggttgggcggcgccacgggcggctccttgtccttgcgtgccttccccagcgcttcgtaggctcttagctccttgcggtaagctttcatgctctccgccacctgccggcgtatttcctcgtgtatgggctctatgagtttgcgtacccataccagtacactcttccctgcggcggcatggcccgtgatgaaggtctgcaggcagggatactgccatttgtccccgtacttgcagcgtacgatgtgcgacagtgaggcgcccagcaccgtcattgctcccagcaggagcacatcatgctgtgccggggtcttggcaaaggagaggatgctcttcagcggttcgggccagtcgtgatcttgcggaaagtagggtaggggagagaggggttccgttcccttcatttccttttcctcttcctcgtgcttcttttttcctgtttctttttcttcattctccaccttattatatcgcgcgcacgtgtgtgagaaaaaaggacctgcgtctgctgcgtctgcgtctgcgtttttgtgagagggggcgactctcactccgcacatttccgccaggtggaacacgcttcccaggtggatgtcgcccttgcaggtgtgcagggcgttgctgaacagtttctccgccgccgcactgtcatgcttgggcgagaggctgcacaggctcatgaaatccgcacggcccgcctcgccgcagtccgtggcgatggcaaatgccagttgggtgtattccagataggtgggcgcgatgtccgcgtgtgatgcctgtaccgcctccgtcaggcggtgcagttcttccaaaagattgtttttgtaatgattcatattcctttttatgttaatttggtttcggtataagaatacctcgtttctgaatgattctgaataagcggcccgttggcccgtgtgctgctatgcccgttggccgcgttctgttccgcatggggattggcacattagcccatgggcgtcttgactctcatcaaggccctttcgtcatgcgacaggaagcaggcccgcaccaggtctttgcccgagtagtccactcctttgcccttgtctttgtccgagcagtcgccatacctcaggcgggcgtactccatcagccagtagatgttctcggccgcattctgtttcacgtcgcttgtccggccgaggtcgtagggcacgaaagccttcacgccgtgtcctccggggcttacgaacaccagttcgggcagcaggaaagggtcatcgaacaactgccggcgcatcctttcggcctcctcgcggctgtccagatgatccagatccagtatgctcaatcccgaaggagccagcagccggtcgctccggcggtagctgaaagttccgcagggggtgacgtatggcagggtgctctgtttcagcctgcggtactccttctcgtcaccgtatgcggcggctgcggcttcggtcagtttcttcagccgcgggctgccggtgactatgttccatacttcctccaaggtcagttccttgtgagggacgagcgtggcaggcgtcacgtttttcccgttagcgtccttcaccggcgagatggggggaaggaaaaaagatagtttacgttcttgattcatgattcgttttatttaaaaagtattaattttgcatccgcattttttttgcgtcctctgaatttcttcccgaaggtaggaagaacggattaaatgacgggatggaaggtgtaacggctgcgagaggccggaaaggtagtatcacaaaagactttttatcatggggaatactgtttttataaagattccggcattggcaatcagtagcttatgcacgggccgtgttaatgggttgcatcgtggaaacgtgcccgtaacctcttgtaaaggcatcctgctttttcttctttcagtcccattgtgaagtaacgtgaaaaaaaagaggtttatttaatattttacaacttaaaacaaatttaaaatgtctaatgcagagtgcagtttccccaaattgggagagtttttagagttattgatgaatcggttgaagataacgaaggtgcgtgttctcggagatgagcatgtggggccggatacttacgcctccctaaaaagggggtggatttgaaagtgagttattatattcattttgccgaccatctgctgaaagcgaagggcgaggaggtgttccgccgcgtagtgcaggagggagtggatgcctatatcaataactggaagcggaaagaggcagccgaggaaaaggcgtacgagctgaagaaacaggccgagaagctggaggcgctgagggagaggatgaagcagcataaggatatcctgtaaggctgtttttttcgttttctttttgctctgtcattggggaagtgagagagtctgaatgaaaatgacctgttgtcttgctgtagggggcggcctgatttgtccggaccggcggtcacggcccatttgccccctacagtaatcatgtggcagttgctctggaatttccgggcagttttcccctctcctgaggcggctctttgtccctttcttaacataattgtcatattccgcctaaaaagtacccttttcgtttaaatagtctaatataaatgcaatttatatgaattaaagttttatctttgtctttcctattgggaatgaaatactaactaattaatttaaatcaaagacaaaattatgagaaatcatctaaagcatttcctcctgttggcagttctgacaatctgtttcactgctacggctgttgcgcaaggaacagtaaaaggtaaagtagtagatgccgagaacaatgagccattgattggtgccactgtatcggtcagcggtacgacactgggtactgtaacggatatggacggtaactttgtgttgaaacttacctcttccaaggctactcttatattcaagtacttggggtacaacgaaattacgcatcaagtaaaaggaagcaatacgatagacttgggtgaggtcaagatgtctcctgatgctattggtttgggtgaggtcagtgttattgcctctattataaagagtgaccgtcagacccctattcctatttctaacgtgaaactggccaagatagaggagaaaataggtaatctggaattccccgaattgctgaaatcagttccttcggtgtatgtaacccgtgaaagcggtggttatggtgattcccgtatcaatatgcgtggttttgattcgtccaacctgggcgtgctgatcaatggtgtgcccatcaacggcatggaaaacggtaaggtttattggtctaactggtccggtttgtctgatgtgagccagtttatccaggtacagcgtggtttgggtgcgtcagctttaggtatttcttctgtgggaggaaccatgaatatggttactaaaagtaccgaagcccagaaaggcggatcagcttatttcggtatcggtaacgacggtttccgcaagtattcggtttctttctctaccggattgatggacaacggatgggctattacattcatggggtcgctgaatacgggagatggttacgtgaaaggtaccaattatgaaggatggacttattttggaaatatctcgaaggtaatcaacgatcatcataaattgtcattgacagctttcggagctccccagtggcacaaccagcgctctaccatgcactatatcgaggattacaagaacagccccgacggcggacgtttcaataacggatatggttatatcaacggtgaagcggtaggtagcggttacggctataattattatcataagccccaggtttctttgaatcattattggactatcgacgagaaatcgacactgaccacttctctatacggctcaatggctacaggcggcggacgccgtgcccgtggcgcgatgagcaattggctgactattgataacaacaccggccgccctaaagacggtgcgatgatgactccggacggtttgttcgactacgagcgtgctatggctgccaatgcggcttctcagaacgggtcgcaggtgatctttaccaatgctgtcaatgaccatgactggtatggcatgctgagttcctataagaatcatctgactgagaacctgactcttacgggaggtattgacttacgttactataaagggtatcatacagaggaaattgatgatttgctgggtggtgagttctatctgcagacctcgccgctggcattccaaaccaagaaccagctgctgaaagtgggtgacaagttcaattactatagcattggagagatattctggggcggtgtttttgcacaggctgaatataataccgataagtggtcgggattcctgtcggcatcattgaccgaagaggcttatagatacgatgaccgtggtggtacggattcaagatactctgccacgggtgcggataaactggacagagtgtccagccttcagaattttctgccttggagcgtgaagggtggttttaactataagttcaatgacaaccacaatgtatttgtcaatgcaggatattttacccgcgcgcctttcttcaactctgtctttgcaagcaatacggcagctcccgaaaaggatgtaccctacgaaaagattactacgttcgaattgggttatggatttagcacggaacaggtcaatattgcattgaatggttattacactcaatggatggataagtccttgcgccgtaagatcggtcaggaatatgccaaccttacaggattggacgcagtccacatgggtgtggaactggaagcgacttaccgtcctgtcaagtcctttgaattgaaaggtatgttctctttaggcgattggaaatggaaagatgatattcatttcactatgtatgatgaagcgaataatcctatcggaacatacgacgcttatctgaaagatgtccatgtgggtaactccgcacagctcacttccgcattgagcgcctcttgggaaccgttcaaaggatttaaaatctcggccgactacaacttcttcggcaagaactatgcagacttcgatcctcagaaccgggtgaatgaagcagacgccggtattgactcctggaagttgccggattatggtacgattgatttgggtatgaactatcgtttcaatatcaccaaagatatccgtgccatcgtatacagtaatgtatataatttgactaatacggaatatatagccgatgccaaggacggtacgaaccatgactggaaaactgcattggtatattacggcttcggtactacatggtctgccggttttaaagtaatcttttaatctctaaaatagtcaataaatatgaagttaaaatataatttaattgcatggtctctgttgggattctttgctgcggcatgtgatcccatggacgatatttataatgaaatcgatgcggaaggtacaacgaacacccagacgatggcggaatatgtactgactgatgccgattacgaaacgatcagctctgcggcggcgaaggctgccacttcggatgctgaaaaagcattggcgaatgccgtcaagacggataaggctttgaacgagtttgcatcggccgagaagtatgttccttccatcatcgcgaagatgttgccttcatgggggaaaggctcttcggtaggagtgacctataactatcagaatactccttccgattacgtactggagtataggacagtaactaatacttctttgggtgataaggattatgaggccctgtggggcgaaggctctcccgtgaagttcctggctccggcacatgctccggctaccgtattgcccgagtggctggccggtctgtataaggatgcggcaaaaggtgatcttgtgctggtagattacaaatatgacgatgttgatcctgaatttacaggggaggacttgtactctcaggactttgagtcggttacggccaatgaggatatcgtgttggaaggctgggagcaggtgactctgaaaggcgatagaaaatggcagggaaaaaactatagtagtaatggttatgcacaattctcggccaatggctttgagggtgaggtggatacttggcttgtttctccggcagtagcagtgacgagcaaagatgccggactgtctttcgacataaagttcggatactataatgcggattgtctggatgtattggtttccgatacatatgcgggaaatggttcgattgatatggcacagtggactagcgtgaaagaccagtttactttccctgaaggacctgccaacggttacaatgataattttgtgaatgtagggaaagccggtctggaggcatacaatggcaaaagcgtttatgttgcgttccgctatgtaggcgaggggcccaaggcgaaaaccacgactgttcagctcgataatgtaagtatttcatcggctgtattggctccgacgaatgaaaagccttataatgcattgtatcagtttgacggaacggattggaaggttaaagaagatagcagattggttgtagtgactcctgccgattatgacgctatgggaagcccgggcagtcatgataacttcagcacttcggatgctccggagaattatctgccccagttcctggctcagaaatttccatatgcccaggaaggggattcaaaagccgtcatgtacaaatattataataaggtaacgacgatggaggtggacgagtatttgttcaaggagggtacatgggttctgaataacaatattgaactgaaagaaaaagtgaattttgtacataatggaaccgagtggttgtttgatccgacggtaacgaaatcattggcttccgaagattatttgattttggaaaattgggtgaaagcgaataaggatgccgggtatatggatgccaaatatggaaactcggaatactggttcggtggcagctcttattatgtaaacttcaatatccagttggctaaacgccgttcgaatgaccccgacggggtggttccggcagatgataaagaggctgagacttatttgttgtctatggttcaggagggtattgaactgatcttggcaacagagtatcctacagccggcgcgcaagtaagtggggttgattgtttctatgtcatttctgcaaaagtgtataatgggcttgaaacatttacttatacttatactttcaaaggtttaggaaatgctaaatttgaactgcaaggtgaacctgaagtaacaaaataaggttttaaacttgaagataaataaagtgggtgtcaaaaactcagtttttgaaaatatgaacttataatctgaaatttgagcatcctaaaagactaaagaaagggtcgtatcattactccatacagagtttgatacgacccttttaagtgttatagttactatctgtaacttttcggagcagtcattctagtttttggacacgtttctttattgttgcttacagtttataagtagagaatgtgaactcattttggggggtagaaaagtaatgatcttaaatctgttgaatgatatttctttgaatatttacagactgtaagttaaaaacataaggagttgaccggcggaacagccctttttcttttttattacgaaactctttatacagttatttccgtctttgtataaacgctttccccctatagaggtgagtgacatattggaacattaacaatttattagcagataactttcttgaaatccgcttttttttcgttcctttgtattgaactgctttcaacagagttaaaacaactttaaatatcaaacgcttatgtgtagtgaaggattgcgtgaaagatatgtaaatccctatacggactttgcattcaaattattgtttggaaccgacttgaacaaagaaattcttattggcttcctgaatgccttgttcgacggcaagcaggtcattgaggatgtcacctacttgaacacagagcatctgggcagcaaagagactgaccgccgggctgtctttgatgtctattgtgaaaatgaaaaaggagaaaagattctgatagaaatgcagagaggggagcaacagtttttcaaggaccggagtatttactatgctacctatcctatcagggaacaggctattaaaggggaaatctgggactatgaactgaaagcggtgtatgtgatcggtattttgaattttgccttggatgatgtttcgtcttccagcttccgccatgaagtgaagctgatggatacaactactcatgaagtgttttttgacaaactgacttttgtgtatctggaaatgcccaaattccataaaaccgagcaggagttggatacgttgtttgataaatggatgtttgtgctcaagaatctggcccgtttgatggaacgccccactgcccttcaggaacgtgtgttcaaccggctgtttgaggctgccgaaattgctcagttctcaaaagagaacctttatgcctatgaggagagtttgaaagtatatagagattggaacaatgtgattgatacagctattcagaaaggcattgcgagagggatggaggaaggacttgtgaaagggatggaggaaggacttgtgaaagggatggaggaaggcattgcgaaagggatggaggaaggcattgcgaaagggatggaggaaggcattgtgaaagggatggaggaaggcattgcgaaagggatggagaaaggcattgcgaaaggtgaatggatgaaagcccaaactattgcaggaaatttaaagaatgccgggctttccatagctgaaatcgcaaaagttaccggactttcggaagatgagataaactccctttgattcttcggataagagcataaaaaaactcctctgatataatcagaggagctgttctttttgaagtaaaatgagttatgcttcagcaggagcttcagtagtttcagcagcaggtgcttcttcagcaggagcgttagcggcttctgcttcagccttggcagcagcttcagcagctttcttttcagctactttcttggcaatttcttcatttactttcttttcagcttccaaacgagctttttcttcagctttctttgcttcgtccagtttagccttcaaagtagccagaccggattgtttgttgtttttccaagcttcgaatttagcttcagcttctgcttctgtgaatgcgcctttggcaacaccccccagcaagtgctttttcatgtaaacaccttcttttgacaggatgttacgtactgtatcagtaggctgtgcaccgcacattacccaatgaagtgcgcgttcaaaattcaaatctactgtggcaggattggtattagggttataagtaccaattttttcagtaaatttaccatcacgtggagctcttacgtctgcgataacgattgaataaaacgcatagcttttgcgtccgtttctttgcaatctgattttagttgccatttctaaataatgtttttataattaatgatttgaattaatgctaataacccgtattagcgggtgcaaaggtaagacttttcttttgaaccgcaaagatttggatgagataaaatataatttttataaaaaggtggacagacatagtgttaatcgctagaaaaattatatatttgcaacagttacaatttaactaaaaataaaagaattatgatttcacaaaaattacaagacgcaattaatgctcagattgtagccgaaatgtggtcggccaatctttatctttccatgtcttattttttcgctgcgaaaggctatgaaggttttgcttcatggatgaaagcgcaggctcatgaggagaatgatcacgctgatatgttggcgcaatatgtgatgaaacgtggcggacaagccaaggtgggggctgtggatgctgttcctcaggaatgggcctctccgctggatgtgttcgagcatgtatacaagcatgaatgccatgtttccgaattgattgacaaactggtagatgttgcttctgctgaaaaggacaaggcttctcaggatttcttgtggggatttgtacgcgagcaggtggaagaggaagctaccgttcaaggtattttggacaagatcaagctgggtggtgatgtggctttgtatcacttggatattcagcttggcgcaagaaaataagcgataagagaaacgaatgcctgtttttttgtcttctgcagataaagatgcaggtgtttattggaaatagaaagtgggtgtgtcccaattcagtttttggaaatatgaacttataatctgaaaattgagcatcctaaaagactaaagaaagggtcgtatcattactccatacagagcttgatacgacccttttaagtgttataattactatctgtaacttttaggagcagtcatttttgttttgacacgcctccttgcttttttacagtatttctctcagccatttttctaattctcccgtccattggcgcttataggtaaagctgtcgcggaagccccagccgtggccgccgataggataggtgtggagggaagcagggactttattctttaccagcgccaggtaatagctcacgctgttgctgacgggtacagctccgtcatcgctgctatgcatgatgaaggcgggaggagtgtcgcctgttacttgcagttcattggagtaaagtctcactagctcttctgacgggctttttcctaaaagattgtcacgtgagcccttatggcagttggacagatccatgcttatgacgggataaaacaggatctgaaaatccggacgcgttccggctgtatagtgggtggctgccgtactggccagatgtccgcctgcagaggcccccatgatacccactttttgaatatgccattcgttggcgtgttctctcatcagccggatagcctgatgggcgtcgctcaacggtacatcatggtgtccgtttggcatacggtatttcaatacggcgtatgtgatgccttgtgcgttgaaccagtctgccatatcgtgcccttcgtgattcattgccaggcgtatgtatccccctccgggacaagccacgacggccagtccgttcggtttggctgccggataaacggtaagggtaggctcgctgacattggaaatccggttgttctctaatttctgctcgggggtggtgatgccgttggagttgggggcgccatcgggccataattccaactctacaggtttctgggcagacaatgcggtagagattgcaagtaaactcattagtaagattcgtttcatatagcttttattttcacggtatttgaaaaagggttattttttcttgatatgcatactggctttaaccagccatatgatcaggaggatataggcgactattgacagtacttcgctcaacgggttgctcagccattcttcattgaccagattgataccgccaaagcgcatggcggcactgacaacccccatcaatgcgcctccggctatgaatccggatgccagcaaagttcccttctcgccacgttcggcgttcaccgcctcgtctttgctgcgggtagtgacataccagttcaccgctccgcctaccagcaacggcaggttcaattccagtggaatgaacatacccagcgcaaaagccagtgcgggtactttgaagtaggtcagcaccaatgccagtacggcgcctattccgtaaagcagccagggagcgcctacaccgttcatcaacgggtctattacggctgccatcgcgttggcctgcggagctgccaatgcgccggtggagaagccgtaggtcttgttcaggatcatgatgacgccgcccacagttgctgccgataccagtgtgccgaggaatttccatgtttcctgtttggcaggagtactgcccagccagtaacctattttcaagtctgtgatgaacccgcctgccatagagagtgccgtacaaaccacaccacccataaccagtgcggcaaccatgccggtagcgccttttagtccaacggcaaccattactaccgaggcaagtatcagtgtcatcagtgtcattcccgatactgggttagtgccgactatggcgatagcgttggctgctacggtggtgaacaggaatgcaatgccggctacgagcaggatggctacaatgctgtgtaatacatttccatgcatcacatcaaaaaagaagaacagtaagatcagcaggatggtgaagatggaaccgaaggcgatcactttcatggaaaggtctttttgcgtgcggatgacgtttgcttccaccttcttgccgcccatctctttggcggccagtcccacagcactctttataatgccccatgagcgcacgataccgatcacaccggccatggcgataccaccgataccgatacttttggcatattccttgaatataagttcgggtgacatttcgctaatggtttgtgtcaaggccggattccatgcattcagcacttgatcgccgaacaacagggccatacccggaacaataaccagccataccactaatgaaccggcacaaatgatagccgcgtatttcaagccgacaatatagcctaagcctaatactgccgcaccggtgtttattttcatcaccagtttggctttttcggcaaccatctcaccccagccgcatacgcgggtggtgaagttttcattccaccagccgaatgtggctacaatgaaatcatacagacctcctattagccctgcaaaaagcaatggctttgcctggcttccgcctttctcgccggaaacaagcacttgcgtactggcagtggcttcggggaagggatattcgccatgtttgtcgctgacgaaatatttacggaaggggatgaggaacaggattcccagaatacctcccagcagtgagctgacaaacatctgaaagaagttgactgtcatttcggggtatttgtcctgcaatatataaagggcgggcaatgtgaagatggctcctgccactatgactcccgaacaggcaccgatggattggatgatgacattctcacctaacgcgtttttacgcttggcggctcccgatacacctacggcgatgatggcgatagggatggcggcttcaaaaacctgtcccacttttaatcccaggtaagctgcggccgccgagaataataccgccatggcgataccccatagcacagaccataggtttacttcgggatattttttgtttggtgacatgatggggtgatattgttcccccggtttcagaggtcggaacgcgttatcgggcaatccaaccgatttttcttcttcttgtttcatgtttctctatgttattatttttgaaatttatcataataaatgcccaaaaatagtgaaaaaatagagaaacatcctcatgatttgattagaatatctgaaatttcaatccaaatgatagtctcagatagtcatcgggtttcaaataactgttgttgaacgcactggcaacgtataaatcgcatgtgctgatttcgtagaatgcggtgatacttttagagaacttccggtacttttcgggcacgtcgaaacggacgcgttgtcccagaaagatatgggtgcggatacgggtggaaaatccgtagtatccacggggatagcgctcgggttcgcttgtccagaaatcatcgctgaatacggtgttgaaatagattccggtagtcagcggttccagcgagaagtctttgcccagccagatactccacgggatataattctgtttcaaggtcatggtcatcttgaaatgtttggatgagtagcgggggatgaagcccaaaagaagatcggtttcccattggcctctttttccataatcccagcctatgccccaggataacaggcccattccaccggcgtactgtaatttggtgtgggtggggatcaaagcttcccacgcacgcctgtaacggtgtacgcgcttgtcgtatttatggtgccggtttggcatttgggttacaatatcttcctcttggttttgaacggaaggagaggggacaagtatgctgtctttggataagatggagtaaagtgtattattttcttgggcttgtgccgtaaaaggcaatagtggccacaataggttcagaaatatctttttaaaattcaactgtttcataatcgtaggttccatcttctttaatggtgaataataagtagatgcgtttatctatgcaggggcattggaaatacagaactccgtcgttgaatagatcatctactgcgaatttgtgttcatggccgtaaagacagaactggactttggggaactggttgacgtatagttggaagatttttgctacattgttgttgaatacaaattcaaaaggttttacgtgcattgcgaataccgttttttctatttcaggcgacaggttgttcagttcattttctataaagttgaaatcgggaaccggttctgaataatcatattccatcgcattggtattgaggcagataaagcgtacatttccggctgtgaaggcgaagttgggatctccataaatggccctgtatgcgtcttcacctgtacccagacagtcgtgattgcctaaaaggcatacgtagggcatctggaatttgttaaatatgtcccgcatccatatgaattcttttgtgacgccgaagtcggactggtctcctccgtgaatgacaaagtctatgtcaccacgggcattgagggcttttacaacatcctcggtagagttgtaccatcgttgggtatcactgatcatggcaaagcggattgtttttttgccttgcattttgttttctatcaactggatgtttttgttgttcagttctctttctcctgtaatatgtacatcgtatggatgggtttccagcatgtcacagccactgaaacagagggccagtaggacaaagaataatagcttgtttgtcattgttctcttaaatttgctgcaaagtacgttattttaatcagaataagagtggcttattattggggaaaaatgttctttttttcttatttttttgtttttacttgcatacaggcaggcggggcagtgttttccggatataaaaagaggatgtatcaaactcgaatcttcttttgttttgatacatcctctctcttatgatgtgagaattctattcggcagctgtgcctttcggggtcatgtcaccttctatataaagacgtgtcatctcatttttcccgtttgtgcggatagtgattgatttcttgaaatgtcccggaaatttgccggctccattataagtcactgttatctgtccgctttcacccggtttgatgggctctttaggatattggggaacagtacatccgcaagatgcgatcgcttgatggatgactaggggaccatctcccgaatttttgaatttgaaaacacaggtaactttcgggcttgactcgggaaatgaaccgaaattatgtgttgttttctcaaaggttatttctgcttctccttgagattgccatacggctgcgtatgtggttaaccctataatcaacaataatgttgaaagcaaaattttcttcattagttccactgtttaaaaattatcggggctaaattactgttttttttataaaaggtctttaactgttagtgaaataaatggtaaattaacacctttaaaaataagggacaaagattatcaaccctatgatggcggcaaatatggcgcaaatcagtacggctcctgctgctatgtcctttacgtctccggccacaggatggtagtccggggataccaggtttaccaggcgttctatggctgtgttgaatgcttcggcagccagtaccattgcaaagcacaggaggatgacaagccattcggtgcgtgttatttccaaccggatgcctgcaatggttacggcgatgatggctgtgcaatgtatccaggcattgtgttccttacttaaaaaactacatacgcctttccaggcgtatgtaaagctttttagtcgtttatgcagttcattcattttttttaagcttgggatgggtttatcctctgtttacctgttttactccttttactgtctttatcttttttactaatgattccagctttgaagtgtcatctaccattacggtcatcatgccgctgaacagcccgtcgtgcgagtcgatgctgatggaacggagcaggatatcgttttccttattgataatggaggtgatatttgtcacaattcctatatcatcatgaccgacgatgcgcagcgtgatggggtattgtttgccgtggctttttccagcccaacgcgcctttacgatacggtaggcaaaacgtgattgcaattctcgtgcgttagggcagtcggtacggtgtattttgattcctccgctgatggttacaaacccgaatacatcatcgccatagatagggttacagcatttggctaatttgaagtccagtcctttcaaattctgatcaatgaccagcacatcctctttgaaggtcttgtcatcctgtgctgtctgcatgctgaaattctcggcgctgcgatagacaatatcttcccggttttccgtttcctttttcttcagttccaggtatttttcgatgatgtcgtttgcatctcttgtctcgttggctatgtcctggtagaactcggttacggttttgtatcccagcttttttatcaggcgcatcatcactgcttcgtcgtattccagcttgcggttcttgaatttacgttctatggtctctttggcgaactctgtctggcgggcttctatctctttgatggcctggcgtattttggttcttgccttcgaagtggtgacgatgttcagccagtcgcgtttgggtgtctgggtgtttgaagtcatgacttctacttggtcgccgctgttcagcgtttgctttaattgtgcgttctttccgttcacctttgctccgatacacttggaacccagtttgctatggatggcgaaggcaaagtccagtacggtcgctcctttcggcatcttgtacaagtcacctttgggggtgaatacgaatacttcgtcttcgtataattccagtttgaactggtccatcacttccaggtcactgtcggcgttctccagtgtttcccggatggaggtcagccattcatctaaaccgctttctccttttacgcctttgtaacgccagtgggctgccagaccacgttctgctatctcgtccatgcgttcggtgcgtatctgtacttccacccatttgccttcaggccccattacagtggtgtgtaaggattcgtatccgttacttttgggtacggagagccagtcgcgcagacgtttgggattgggcatatacatatcggtcacaatggaatatacctgccagcattcttgtttttccttgtcgacgggagagtccagaatgattcggatggcaaacaagtcatacactccttcgaagggacatttctgtttcttcattttctgatagatggaatggatggacttggtacgccctttcatgtggaactttaatcctgcttcttccagcttgtgctgtatcggttcgataaaggcggctatgtatttgtcacgggaggctttcgtttcgttcagtttgtcctttatatgataatatacgtcgtgttcggtatatttcaaggaaaggtcttccagttccgatttcagtttgtatagccccagcttatgtgccagcggtgcgtacagataggcagcttcgttggctacttgggtgcgtgcttctatattgggagtctcctttatctgtctcatcaggttcacgcggtctgcaatgatgatcagaataacacgcatgtcttcggcaaaagagagtagcaggttgcggaaattttccgattctatggtagggcttttggagtatagctcattgattttcacaagaccgcgtatgatccccgctacatcctctccatattcctgttgtacagatgctaaggtgcataaatggttctttaccgattcgtgcagcatgatccccaggatggaagcccgtttcatcccaatttcttcggccacgatgacggcggtctgcatatctttgatgataggattcatcccgaaacaatttcgtggcaggttaccttcggcaactgcttttatgaggtgtatttttaacttatggcaatcacccttctgcaaggtgtcgccggataattgcagcaatcgtttatagagggcgaacagttgctcacgctctttggctgtgaaaaatgctttttcttccataacacgtgaaatcttttcgagggtaaaggtagtttttttctttatttattaggtagtgttctcgcatttttttgtatttttgggcaattaatagtgaaagaataaggtaacaatttatttaaaccatataaaatcatgtacttatgttaacacctgaagacaaagacttattagtgaaaaaaggaatttccgagcagcagattgtagaacaactggcttgctttgaaaagggtttcccatttttgaagctggatgcggccgcttctgttgaaaagggaatcatggctcccgccgaaattgaaatgaaaaattatttggaagcatgggatacatataaggaaggtgagaaaaccattgtgaagtttgtacccgcctctggtgctgccagccgcatgttcaagaatttgttcgaattcctgggggctgattacaatactccgaagacagatttcgaaaagaaatttttcgaccatattcatagcttcgcattctacaatgacttgaatgcggcttgtatggataatacaggaaagaatattgatgctttgatggccgggaaggattataaacctatagtagccaatctgctggaagctgccggcttgaactatggggcattaccgaaggggttgttgaaattccatcggtatgcggatggtgtgcgtacgccgctggaagaacatttggtggaaggcgcgttgtatgcggcaggcagaaccggaaaagtgaatgtgcatttcaccgtttctacggaacatcgtgaattgttcacaaagctggtggaagagaaggttgccgtttatgcaaagaagtatggagtagaatatgatgtgtcattttctgaacagaaaccgagtacggatacggttgctgccgatatggagaacaaacctttccgcgataaaggcaaactgttgttccgtccgggagggcacggcgcgctgattgagaatctgaatgacctggatgccgatgttatctttatcaagaatatagataatgtggtgcccgatcgcttgaaagaggatactgttacgtataaaaagctgattgcgggggtactggttactctgcagaagcaggtatttgaatatttggaattgctggatggcggtaaatatacacatgcgcagctggaagagatcattcgtttcttacagcagactttatgttgccgcaaaccggatatcaaggatctggaagatgccgatttggttatttatctgcgtaagaagttaaaccgtccgatgcgtgtatgcggtatggtgaagaatgtgggtgaaccgggaggcggcccgttcctggcttataatgcggatggtactgtttcactgcaaattttggaaagttctcagattgacatgaatgatccggccaagaaagagatgttcgagaaaggtactcactttaatccggtggatttggtgtgtgcggtacgcgattataaaggaaacaaattcgacttggtgaagtatgtggataaggctacaggttttatctcttataaatcaaagaacggtagagaactgaaagcattggaacttccgggcttgtggaatggtgcgatgagtgactggaacactgttttcgttgaagtgccgttgagtacctttaatccggtgaagactgtgaatgatttgttgcgtgaacagcatcaataacccctttttattgtagattacatggatttatacagatcggaagatttgtgtaaatccgtgtagtttttttgtgaaattaatttatatacccttgattactaacctataattaaaaagaatgaacctgctgacctttattgctccactggctgtggcggcaacttttatgatgccggccgatgccgcaaatcacaaagaattaccggcattgggaaatactcatattcaagtattcgacaagacccctgtttgttttcgtcccgactcttttcctaattatactcctgccaatgctgacggagtgatccgtctggtaaacgggcgtattattttaaagaaaataaccttgcccgattacaaaagagatgtggatgttgccctgaaagtaactgtagcttccaatggtgaccgttgggataaatctggctcttgttttgtgcttcccaaagaatcggtgatcaatctgatgaatatagccgaaggcaagagggcgtttcctgcggtagacagtgccaaatatgaaaaaatgattggtattgttccgggtaaggattatgtgcctacccttgaactgatgcgttttatgaccccgttcggtgtggggtattatagttcggataatgattctttgagcagcaagagacgtcctgtatatatcccgaaatgggaaaagagtgtgacttgggtgcaggatattaccgatctttatccggcattggagagagaggcatacgtgggaatttatattgatacatggactgccgaggggtatgtggccagcatggaattggacgtgaaggagagtaagatcacttgcgacgtgatgccggagcgccgtgtgaagcctttgatgaatacggtgtattatatcggacagacttatccggatattttctcacgcaaagatgtggtgatggattttgatatgtcgaaagctgccaagaatgttcgtttgaagtatattgttacaggtcacggggggcatagtggcggagatgagtttgtggagaaacgaaacattgtgtctgttgatggcaaggaggtgttgaatttcattccttggcgtgacgactgtgcttctttccgccgttttaacccggctacgggagtgtggctgataccacgagttgccgcatatataggtgataagggttatacgacaaaagagattgaagaacctttggcttcttcagatttatcccgttccaattggtgtccgggtagcgatgtgatgcctgaggaggctgttattggtgacttgccggccggtaaacattcttttaaggtaagtatccctgaggcacaacaggtagatggcaataaattgaatcattggctggtttcagcttatttggtttgggaggaataacttttcccaattattaatagctgctggagcagtttgaatctttccgaatatgaatggtgaatttctttcggaaggattcaaatcctctttgcggtaaataatgaacattatttgttttttcttttcatgctgcggatgatttctttgtcctccgtgcttacccgataagattctatgattttttgtagcgctttattgtaggtaaagtcatctaaatgattttccttcagatagttcaccgtcttttgaggaaatttgacataacatacggataaagcccatgctacagccatcttcacataatatccttcgtgactgatccggtccatccattgcaatacgttgtttatatactcttcgtcaatataatgagccattgccattactactccgaaacgtatctcatattctttgtcggatttcatccagttttccaaaaatagccagacccttttcttgttcttgtcaacaaaccgttgtttgccgtaaaagtcaaaagtgtcacaaacagaccaactgttgatgatggtaataaaccgggcaaccagtgaaagatatgcttctatgtctttcattctcagattgcttattaccataccttgcaacatacgttcttccatataataagtatccgcagtctgtagataactctcccagtcatctttggcaatttgtgctcctaaccgccttagggcagggatgcggatacccaatacattttctattcccggatgcagcgattcggtgaactttttatttccattttctgccagttgcagcaaattttcttttatggtcaatccgttgatacgatattcgtccattttgtttttgtaagatagggttagattttcagtcccatgatataatcgttcatataatatccgttgcctatatggaaatctccttctgcaactttttccattcctaaatgttggtagaattgtaaagccttattgttacggtttacattcaagtgcatttcgcaaggtccgggatggatttctttaattgctttgacggcctgctcaaatagtgctttgcccaaccggcaaccttgaaaacgaggaagtacatagattttctgcagatgaaataaatgttctctttcgggctgtatggaaacatatccggcagcttctccatctttgtaagctatgtaatagatgtgcccttcttcttctatttgtttacgcagatttttcggagagtacatccagtccatcatgtaatccaattgttcttttgaaagaatttcctggtaggtggccggaaatacaatctgagccatctcgttaatcaactgaatatcattggttgtcgctttttgtatggtaaacatgatctttatatctttttagggttataacgagagacaaagataaactttttacaacaaaaaaaaggggacttcctttcttttacttgtttaaatattaatttatgcaaaataatagatctatgcaatacaaggtaatgatataatacatatatttgtgccaaacaaagtattataaattatgaatgtagacaatgtacgatctcagatgcgcaaaggaatgctggaatactgcattttattgttgttgcacaaagagccgtcatatgcttcggatatcattcaaagattgaaagaagcccggctcattgtagtagaagggacgctttatccgctgcttacccggctgaaaaacgatgacctgctctcatacgaatgggtagagtctactcagggaccacctcgtaaatattataatctcactcctcagggtgaaatattccttagcggattggagactgcttgggaggagttgacgaatacagtgaatcatttaaaaaacaattaaaaacaggatacaatgaaaaagactttaaccataaatttaggaggtaccgtttatcatatagacgaagacgcttaccacttgttggataattatttagctaatttacgcattcactttcgtcgtgaggaaggtgcggaggagattgtacatgatatggaattacgcatatctgaactgtttgctgaccgtttgaatgagggcaaacaggttattaccattgaggatgtggaagaaatcatagcccggatgggtaaacctgaagaactctctggtgaagggaatggagaaacatccggttcggaaaagacaaaagggaccactgtacgccgtctgtttcgtaatccggacaataaagtgctgggtggtgtggcttccggattggccgcttatatgggatgggatgttacttgggtacgtatcattctattggttcttggcttctttgttcatggggtgatattggcttatatcatagcgtggattattattcctatggcgcgtactgcccccgagaagctggctatgaaaggggctgctattaatgtggagaatataggcaagactgtaacagacggatttgaaaaagtaaatgattatgtacgctcagatcgtcctagaagtatcttgcaaaagataggggaggggattgtgtctgtggcggggttccttatcaaattcctgcttgttttcattgctatttgctgtgcgcctgtattgtttgtattattgattgtcttttttgcattgctgatggcggctacggggctgattgctgcattgccggcagtgctttatgaggtgctgcctgcagttaattgggctacggtgggtagctctccggggttgactgtcgctatgtccgttgcaggtattctggttatcggtattcctattataggactgatacacatgctgatgcgtcattttggaggttggcaacccatgtccattgtaaccaaaattatatttatcgtattgtggctcatcgctttgggagtgggtgttttctttgtactgaatgatccaaatattgcttcaatgatatcgtatagtttataaaatacactatctttgcagatggaaagttgggaatcaagaggtgtcttgttctcaactctccgttttttgtaaggaatatcaaacatatataaatactatgactaagaagattttattgctgggttccggcgaattaggtaaagaattcgtcattgcggcaaaacgtaaagggcagtatgttattgcttgcgactcttacgcaggtgctccggccatgcaggtggctgatgaatttgaagtgttcagtatgcttgacggtgatgcattggatgctgtggtagccaaacacaagccggatataattgtgcctgaaattgaagctatccgtaccgaacgtctgtatcatttggaacaggaaggtatccaagtagtgccgagtgcccgtgctgtgaatttcacgatgaaccgtaaggctattcgtgatttggcagctaaggaattaggattaaagacagccaaatatttctatgccaagtctctggaggagttgaaagaagctgcaaaagaaattggtttcccctgtgtggtgaagcctttgatgtcttcatccggtaaaggccagtctttggtcaagagcgcggatgagttggaacaggcatggcattatgggtgtgaaggcagtcgtggagatatcaaagaattgattattgaggagtttattcagttcgatagtgagataactttgctcaccgtcactcagaaaaacggtcctactttgttctgtccgcctatcggacatgtacagaaaggaggagattatagagaaagtttccaaccggcacatattgatcccgaacatttgaaggaagcgcaacgtatggctgataaggtaacggcagctctgactggtgcgggaatctggggagttgaatttttcttgagtcatgaaaacggagtttatttttccgaactttctccccgtccgcatgataccggaatggtgactttggcaggtactcagaatttaaatgagtttgagttgcatctgcgggcggtgttaggacttcctattcctgaaattacacaagaacgcataggggccagtgcagtgattctttctcctattgccagcaaggaagctccccgttatcgtggtgaggaagaggtttgtaaggagacaaatacttatctccgtatttttggtaaaccttatacaaaattgaatcgccgtatgggggttgtggtttgttatgctcctaatggcagtgacttggacgctctgcgtgacaaatgcaaggctgttgctgcaaaggtagaggtgtattaatatcttgtattgatggatataaaataaaggtccgggctttcccaagtccggactttttgttgttccgaagatatgcttccctggaacaaggtgttatagtctctcttttgtgactaacattacagagaaataataatagagagaactccacatcaatggttacggtataataagataaattctttttggcaaaattgcaacatttaataatctcagacaatacctacaaataatgattttgatagataccttttctactttcgtttattatagctataaatagggatgtctgactgtccagaatacctatatcatgcgattgcacagacagatggcaaaccttatctttgcattgtaaataagtcatataaaaattacgtaaaccacaagttagttattagttagtagtctccctgcgaagtgattcgcggggagtgcttcttttatggggtaatttcctttttttatagtgtttcaggttctttgtccaagttggtttctatttgtttcggaaaggatagtttttcattgatggatgagggctatccgtttgcgtagctatgcattcctcctaacagaaaattcactccgaagtaagtaatcagtactgttataaaagcagttatacagaaaacatgaaaaaacatggtgcgatgaaaccatggcagtgatctcggatgcagtgccaaggcatataccagcatggtgattaaggcccatacttctttaggatcccatccccaatagcgtccccatgatacgtttgcccatacagcaccaatgaaaataccgatagcgagtaagaaaattgccggataaagaattatttggcttattatctgcaatcgttctatttgttctttgcattctttctgtgattggtggagtatgaccgctgttacaccattcagcatgataaatgccagcagcgaataagcgatcatgataactactacgtggatactcaataatggagattgcagaaccggcatcagttgtgtgatttgtgggtttgattctcccagcatggataccatcagcgtaagtccgcaaagcaggaaaccgaaagggagcaacattgcgaatttacgttgtagcagaaaagtgagcaatagcgtacaccatgccatgaactgcatggtttcgaagccgttggacaatggcagatgattgctcacataaccacgcaggcagatagcagccgacaaataggtaaaaacaatccatagcaaaatattcaatattatgattgccttccggcttgttctcttttgcgatgccatgcaatggcaataatagataaaacatatcaggccgatgcaaatacatgccatggcgacagatttgctataatcaaattgattatatattttctcagccttgaatttattatctgcaggaagcagtccgtcacactctttctgctggtatttcttgattttttctaataacaggcaggcatcattgtactttttcatcacaatcatttcgtttacataactcatagatttacgaatgaatacccatttgtcattatccatatcttgaggtaattggtcgctttgcgaataccattccaatgtctttccggctatattgcgacaagggaatattttcatcatggcaccggtacatactaaattgatgatattgaatttctcatcagcttcttctatgcctcgtttgtcagtcacctgttctcctgaacggatatggttcatcattttttccagcttgtattcattaatggtactgatatagtctttcagcctggcgtaattcccttctatttccagtaatttacgggcttcattactcttgattcgtataattggttcatttttccaactgtcataataaaacagccatccggtaagtacttcttctggtgtcagtcctttatatgaggaactaccgtaaagtttgactgtaaaatcacgggcaaaggtttgtaaaggacagatacggttgttgtataaaatatataaatctccaaaatgttcggctacttcgcgcggaagcaccttgggggatgtactgtttgctttgagaaaattactgttgagactgaatgcgaataaaagcaagatgactgtcaagcttctgtgtagcaaagggcttttcagcagttggcggaaccgactttgcgggctgaagaaaaagaaaacggtggaaagtagcaataaagtatatcctgcataagtgattcctataccataaggatcatgagatacactaaatacgcttccttcattatcttcactgtagcctgattgataaaagcgatagtgctggtatgaaaatatatgattcatggaaaccttcccctgtatctggcggtggcagtctttgtctgctactgaaatatgactgataaagtccattggagccaaggttcctttgtaataaataatttcaaattggtttagtgtgatgctgaaaggtagctggtgggaaattcctttggaatcggtgaaagaggtctgttgttctccttggcggacacgcatagtgccttgttctccatatatccatgtggtgaatgcccctgccaatataaagagaagagaaagatgaagcaaaaaaataacaggctgacgatgcagtttgctttttatgatgtataataaggaagtaattgcggttactccccataaaatgacaaaaggtacggaactgtagatatactcgtttacaaagtccgtaccatatattttttccaatatagtagctatagtaagaatcagaagtaatatgcctagcagactgaaggcagttcgttttaataatttcatgtagttataattttctgaaagataaccagaaggtgaatcttgaatttgtctcatccccctgaatgtcctgtcatattattggtgataggattcaggagggagacaatctgtttcattgcttaaatggcatcaataaatttgacgatggcgtcacgatcttctttactgagttcgcggaacttgtcaatgctccagcgtgcgtcactatttgaagctccatgccacataatggcttcaatgacattacgtgcacgacagtcatgcaaacggtcgctgtgtccggcacagattaaggaaagtccgcgtccccaaagaggagtggtacggcaccatcccgtgcggatattgttcttcatttccaggcggtgttgaaccatatctgaatatggccagatagtttggtgtggatagcgtggcagacggctgtcaccatctttgaagtatccgttcggatcgggataattatcgtctcctgtagtccatgacggacgatggcaggtagcacagcctatttcacggaataatttgtgacctctctgaactgtttcgtcatccagattccgtgcggcaggaactgccagtcctctgtgccatatcatgaagtttacataatcttcgtctgtcatttccaccggaagttccttattcatcagatagttgtatatatcttgttctacattaccggtctgtttccattcagggaaatagttataaaaatctttttgtacatccgggtctttggaggctgttttggcatacgtgtcagtcatgtagtgataacggcggtcactacgggtaacattggtgatgttccagattgcattggcaccgggaccatcctgtatggaagatctggtcaaagcgtaagtataacgtttgggatattgtttacctgtaagtcccttatagagtgaagtccactctccgtttgcgaagatggctggattcaattttacacctgctttttcctgacgtgcatattctgctttcaacgaatcatcgggaatggcatctagtaatccggttccgtagataccaatggtagattccagcaaaactactacatcagagtagttgacaggggtgacaacttgattataagtagcttccaaaggtacgtagtatgcatcttgaggaatagtcacttccggatagatcagactgtatgtttctccgtcaggaaatttatttccccattcgtctgtgtaaggcagccagtctatttttatcttatcttcatctattggtgctttgaaaggggctacagctttggtttgaggcattcccgttaaagaacttaggtagttatcctttccatcggtcacaacaagtagatatccatttccccagtcatcagcacgataacggtctacccgtttgccatgaccgtatccggggtggcagttcatacatgaattgcggatataaagcggtcccaaaccattgaaaggtttggaattctgcgtataagaacgttcaaagaaatattccccatatttgaatttgtcggtcatacctgcattttccgttgcaggagtaggatcttcataagcagaagcggaattgttgaaggttgtacccaattctccgcctgcataggtctctacatttacgttgatatcaggattgacttccggagatttgttttccggattgtcatcgtcattacaggctgttagcgagagcattgtaaggccgcatagagcagcaagccagtgtattttaaataacttattcatataagaatgtttaaagttagttacttttcaaatttatataccaaagaatctacataaggttgtcctcccccggtctttttcactatcatgtctgttgtagaggggacatccggcagcacaaagccggtgcttggagcgaatgtaaaatcaccatctacagcaaaagatagtacaatagaccttttccggacaccctcttgcagatcctttgtggtcattggggtaaacagttctttttaattgtttcttaaagctgttttaacatcagacaatatggcatcaagatcctgacaagctttaattgcttcacctgcacttggatctttaatattgtttacaaatggagctgccatggtattgattttggtcagagcattgtttatggcatttacaacttttgtatccagttctttatctactccagcaatatagttgtgtagtgagttggtttcgtcacgttcattttctataccgcccatgtaagcattctgaatactgatgatgttgtcataaaagtctagaatggacttgtgactgtatggtgattctatataagcagggtcttctccgctataaggttttcctattttagaagttcctacttcatctgcgatagtcttgcagccgtcaatgatagcttgcatggctaatgtccagctggcgtatgtgctacctgcttttcctgcattcagcatattctcaccataagaatattcaccactgtttacagtgtaaggcagttctaactcatttgcgactttagcgacacggtcggcattgacagcactttcgcctctccatgaaagttccagctgccagcaacggttacgcaaatcaccagctacagctacggcgtaagtcagatgtaagtcactgattttagaaactgatttggggctaccatcttcgaaaaggatgtattcaataccatgaaatcctaataaagaattacccaatttctcgccggcataaatatctccgtcttcaccacccattgcttctacctgttccgtatttttcagtgcggtctgtaatccgtccaagtccaaaggccatgagtcaatatgcgggtcgataccgaaatcggtagctgccccatacaggaaagcttcactcttttcccaccatgcacgtgcttcaaggaaggtttcgcaggtagcttttacatttgcatcagtcttgctgctttttaatgcttgtaaatcttttactagctgttcggtttcatcagccaggttcttgtaagtaacatataccgtgtgatcaagatactgttttgcgattgcttcgaattttgcatctgtttcagacgtaccggtatccggagtcggatcatcgttatcactgcatgcgctgaaactgcaactcatcattgttgctacagcaacaagtaaggggaattttaacaaacttttcatacctatttaattttaaaaaatgaataatcgggtttatttaatgaaaaatcctgcataagctatgcccaatgaaaaagagggttcgttattatactggcttttcaagaagcgttttgagtattcggcttttactacgatgtctttcataggatagtagttcaaaccgacggccatgcgttgttttttagtccattcatatttgctgaaacctttagcagccttatgatatgagtcatagtattcatatcgtccaaatacatatagttttttaccattgtctctcattttctttacttgagaaaaaatatcatatcctgcctcgattccggcggcaatggctgtcttgcccacggctgtgtgaggataaggggactgtgtgctattgtcttggcttttgttgtgagtggagatcagatcagcgtctcccagatggccataatcaaaattgccgcgtactacccagttatgatcattataatcaaagtcgaatgcacctatgaccactgttcctttcacatctttatatttggtggatttttcatctttaataatgtcgttttggaaactgttacctatatagccgcttattcccatacgcaatcctttgacagagtaattgtcgatacgtgccgctcctgccagattgttggctactttaaattcataggctgatgcagaaccatcatgaatccatccgctatgattgaacatattagcattcaatgcgggaataaccattgcctcataacgccagtcacctatacgcccccatacactaagaccggtttcatgccatgtgcaaggcattattgtgttttcaccttcaggacgatatactgtaaagaactgagtgggaagatgggcgttgtttatttgtcctatcggcacgatgatgtgccctgcgcggatattgaagcccgagcaaaaagatttctgaatccagaactgctccaaagccacttcacccccacgttctatttctttttcaaattctccggcttcttcgtcttctacttctatagccgattctgttcctccgtgttcaaactctatttcactacccatgctccatccttttccgaaatcgtagccaatcatgattactacatgaggtaagtctacgcgtccgtgtccgtcagagtctttgtaactgtctgctttagaatagcggtacatattgtcactataaaagttacgtgtgtacactgcttctccgtaacctcccaatgttagccgggatttttttttaggttcttcctccgtagttttctctgtgttatccttatctatacttattgctttttctgcataactgtttgcaagacaggccgacaagcataatgagaacaataaaacctttcttttcatttttgctttaatttttataattttaaatcggtgcaaagttatgggaggttaaaagggtgggcaatacctaaaaatgggtattattttatgaaaattggtaatgagtaggtattaaagcttgaatgatgctgtccggaaaggtttattaccctgtttttcagttgtaaaatgatgcattaaaatttaagatggcaaaataatagtctgttttagtctttccacatatggccagatgcatatcttcttgccacatgcttttttacctttttaaaagaagggtgttaggggatttttctctgtaaagagtgcaagccttgtaatcagattcatccttaaaagatcttgtttgtatccctaaccctttcctgccgtgtggttaaggtttttcttcctgcttgttttatctccgcaagcctttggagttatctccataagctttggagttaactccatagtcttgggagataactccaaaggctatggagatagaatatatctgtataaaaaggtttaatctgaagatagaaaagacttatacaatagggaggatatgaacattcatttaattccgttagcgggttattgcttctttcagcccttccggccctttgaacttcatggtggcggaaagattgatttagtcattctttttttcttggtccggattcgtaatgacttcttcgttttccggatgactgctgttgtcttcctcttcctcgtcaatgaaaagttccggttgttgggggcctttgtgtctgaacaatatggctgcggctattccggccgccgcgccccccaagtgtccctcccaagaagtggtggaggaggcgaactgcgggaacatgttccataccagactgccatatagaaaagtgacaagcaacgacagggctactaaagggacgtgtttgcggagaatgccactgaagaacagaaaaaaggcgagtgaataaattatactgctggcacctatatgccatcccggcttgcctattataaatgtaagtattccactgactatccagatgaaaaaaagtataccaatgcccaaatcacgataaaagtagagcagacaccataataaaaaaagaagaggaaaagtgttcgcaaataaatgtccccaatcagcgtgtatcaatggagaagtgaaaatccccattattcctttggtttctctgggatatatgccccaggtgataaaatcccaattcatgacactttccattgtacgcagggtgtacagaatgaaaagaagtaataacggaagagcaaaagccaatagaattttttgaatttcaagtttcattttgtcataattatgctgatttctgtgcaatactacggatatttgagcgaaaaatgaaaaatattttgctatttaattttgctttatccatttaattactaattttgagcgttgcatacaaaaataatatgtgacataaattgatatggaaatttgatttataaccttaaaataacaactatgagttacttacgatttgacaagactcttatgacgaacctcggggaatcattaccgaaagaaattctccgcacaaaccgttcaggggcttaccattgtacaaccattgttgattgcaatacgagaaaatatcatggattgcttgtcattccggtgcctgaactggatgatgaaaaccatgtattgctatcgtcgttggatgaaacagtgatacaacacggcgctgaatttaatctgggacttcataagtatcagggcgacaattacagcccaaggggacacaagtatatccgggaattcgagtgtgagaaagttcctaccactatatatcgggtaggtggtgtgattctgaagaaggaaaagcttttcgttcatcatgaaaatagaattttaatccgttatactttgttggaggcacattcggccactacgttgcgtttgcgtccgtttctggctttccgcagtgtccgtcagtatactcatgagaacgcacaagccagtcgtgactatcaggaggtggataatggaattaagacatgcatgtatccgggctatcccgaattatatatgcaattgaacaagaagaacgaattccactatcagccggattggtatcggggaattgagtatcccaaagagcaggagagaggatatgattttaatgaagatttgtacgtcccgggttattttgaagtggacataaagaaaggtgaaagcatcgtcttttcaggaggtgtgtccgaggccagtacccgtacattaaagagaacctttgaagaagaggtggaagaacgtactccacgtgataatttccagcactgtctgataaatgctgctcatcagttcttgaataaacaaggaaatgagttttatattctggcaggatatccgtggtttaaatgccgtgcgcgcgatatgtttatttccctgccgggactgacattggcgattgatgaagtggctaagtttgaaatggtgatggaaacggcccgcaaggcaattcatgactttattaatgatgagcctgatgatgttaaagtgtacgaaatggagcatcctgatgttttgctttgggcggtgtggtgtatccagcaatatgccaagatggtgtcgcgcgaccaatgccgtgagaaatatggtacattgttgcaagacattatggagtaccttcgccgggagaatcatccgaatcttttcttgcattccaacggtctgctatatgccaacggcacagaaaaggctatcacatggatgaattctaccgcaaacggacgccctgtgattcctcgtacaggctatatcgtagaaattaatgctttgtggtataatgctttacgctttacaagtgaactattgagcgaaggtggaaacaataatttggctgatgcgttaaatgtattggcagaaaagacggggaaggctttcgtggatactttcttgaatgagtatggttatttactggattatgtggatggcaatatgatggactggagcgtgcgtccgaacatgatatttactgtagcattcgactattctccgcttgatgcccgtcagaagaaaggggtgttggacattgtgaccaaagaactgcttaccccgaaagggctccgttcgctcagcccgaagagtggtggttacaacccaaattatgtaggtcctcagatgcagcgtgattatgcttatcatcaaggtaccgcatggccctggctggcaggcttctattttgaagcttaccttcgtatttataagatgagtggtataggatttgtggagcgtcagctgataggctacgaagacgaaatgacttctcattgtattggctctatacctgaactgtttgatggtaacccgcctttcaaaggtcgtggagctgtatcattcgctatgaatgtggcagagatattgcgagtattatatttattgagtaaatacaattattgaaaggagggacctgtatgaaagtattaatgtttggatgggaatttcctcccaaaatatatggtggtcttgctgtagcatcttacggtataacaaaaggtttgagcctgcaaggtgatatggaaacaaccttctgtttgcccaaaccttgcggcgacgaagaaaagtttctgaacattataggcatgaaccaagtgcccattgtgtggcgtgatgtgaattacgattacttaaagtcacgtctttcgacttcgactccggaacagtattatgctttccgtgatcatatctattctgatttctcgtacatgcacgtcaatgacctggggtgtatggagtttgccggcggctatccgggaaaccttcatgatgagatcaataatttttctattattgcaggggtggttgcgcgccagcaagaatttgatattatccatgcgcacgactggctgacttatccggctggtgtgcatgccaagctggtaagtggcaaacctttgtgtatccatgtgcatgctactgattttgaccgttcgcgcggtaaggtgaatcctacggtatatgctatggaaaagaatggcatggatcatgccgattgtattatgtgtgtgtccgagctgacccgtcagacagttattcaccaatatcatcaagacccgcgcaaatgttttgccatgcacaatgccgtttatccgctttcgcaagatttgctggacattcctcgtcctgatcattcgaaagaaaaagtggtgactttcctggggcgtatcacgatgcagaaaggacccgagtattttgtggaagccgccgcattggtcttgaagcgtacccgtaatatccgttttgtaatggcaggatcgggagacatgctggatgccatgatcaatctggctgcggaacgaggtattgcagaccgttttcacttcccggggttccagcgtgggcgtcaggtttatgaagcatataaaaacagtgatgtattcgtaatgccttctgtgtcagaaccttttggtattgctcctttggaggctatgcagtgcggaactccttctatcatctcaaaacaatcgggttgcggtgaaattttggataaagtaatcaagaccgattattgggatatcaacgcaatggccgatgccatctattcaatttgtacgaatccttctcttttccaatatctgcaggaagaaggaaagaaagaagtggatggcattacatgggagaaagtcggcttgagaatccgtgccctctatgagcaggtgttaaaaaactatggtaaataataaaacaataactaggatatgaaaacaatatgtctttattttgaaatacatcaaattatccatctgaaacgctatcgctgttttgatataggccgtgaccattattattatgatgattatgaaaatgagcgcggcatcagtgatatagccgaacgctcgtatattcctgcgctgagtgcgttgattgaaatggcaaagaatcacggtgatactttcaaggtggctttgtctatctcgggtgtggcgctggaacagttggaagtgcatgcgcctggtgtaatcgagttgttgcatcagttgaatgagaccggatgttgcgaattcttgtgcgaaccttattctcacggtctttcctcattggctaatgaagattgtttccgcgaagaagtggaacgtatgcgtaccaagattaaacaaatatttggcaaggagccgaaagtattccgtaactccagcttgatttattcgaatgatattggcgctacgatagctgatatgggctttaaaggtatgttgactgaaggtgcaaaacatattttgggttggaagagtccgcactatctgtatcattgcgccatgaatccgaacttgaagttattgcttcgcgatttcaaattgtctgatgacatcagtctgcgtttctctaattccgaatggaatgaatatccgttgtttgccgacaaatatatagattggattgcagctttgccggaggaggaacaggttatcaatattttcatggaactttctgctttgggtatcgcccagccattgtcttccaatattctggaatttatgaaagcactgcctgtctgcgcaaaagaaagaggggttactttctctactccgaccgatatcattaccaaactgaaatctgtggatcaggtggatgttccttatcctatgtcatgggtagacgaggaacgcgatatcagtccgtggttaggcaatgtgatgcagcgtgaggctttcaataaactttatagtgtggcagaacgtgttcatttgtgcgatgatcgccgtattaagcaggattgggattatttgcaggcaagtaataatttccgcttcatgaccactaagaataccggtatttggttgaatcgtggaatttatgattctccgtatgatgctttcaccaactacatgaatattttgggtgattttataagtcgtgtcaattcgttgtatccggtggatatggataacgaagaattaaattcgttgcttactaccattaagaaccagggcgaggaattggtggctttgaacaaggaagtggagagattgcaggctaaactggagaaagctgaaggcaagaaggcttctgccgtaaagaaagaacctgctgccaagaaaccggcggcggcaaagaaagcggcggcaaagaagccggttgccaagaaagctgcttcgaagaaagaagaataacagaaatagtataaaggacttaagaattcaccgttgtgctttcggaaaactggttttaaggttggaagaggcggaacggtgtttttctatataaaagtttgctgcattgaatattttatttacctttgccaatctcagatacgaaaaaatatgaaacaattgtgccagaataaacatacgatacgtttccgctattggaaccggaagaagtacgctatattttatagtttgggcaaatgtgtaactattggtaacctgaaaaaggagattgccgatgtatcgttgggtaaacaggcaaatgtttgcacggcattctctgtttgctcttccgcacggaaagaggatgctggagaggaatatgaagaaggaatgccccctgttgaatctatgttgcaaatgcttcggatccaactgcctcaaccacaggtggctgatgtgatttgtcttttttatttgaataaatattgtttgccggaaagatgtgccatgcatcttttcggcttttttgtcttaatatgaactgtatatgatgctgaatgaaataagaaacaaagtgctgggcggtgagaagattaccgtagaagaagcctgttggctgtcctgcaaggcagagaaacaggatttgtatgatgcagctcatgagataacacaggtctgggcttcccggaaattcgatatgtgttccatcatcaatgctaaatccggtaaatgtcctgagaattgtaaatggtgcgcacagtctgcacattatgaaacaaaagtggatgtttatgatttggttgggaaggaagaatgtctgcgccatgctttgtataacgaagcgcagggagtatcccgtttttctttggtgaccagcggcaggaaaccgggtagccggaacttgaaccggctatgtgagacaacagaatacatgcgtgcgcattcgcatattcagttatgcgcttctttaggattgctggatgaggcggaattgagacggctgtttaaggcaggcatcacccgttatcattgtaatctggaaacggctccctcttatttttcatctctatgttctactcatacacaagaacagaaattagaaacgttgcaggcagcacgcagggtggggatggatgtatgcagcggaggaatcatcggcatgggcgaaacaatggaacagcgtattgagtttgcttttacactgagggaattggaagtacagtctattcctataaacctgttgcagcctatacccggcactccattggaaaaaatggatcgtcttgcagaggtggagattctgacaaccatcgctttattccgttttatcaatcccacagcatttcttcgttttgccggagggcgttcactgatgagtgtggaagctgtaaagaaagcattgtatatcggtattaattctgccattgtgggagatttgctgactacattaggttcaaaagtatcagaagataaaatattgatagaagaggccgggtattcgctttgatacattataaagttattataacaataaggaagtaatatatggaaaattttgacagggagcatttatggcatccttatacatcgactactcatccgctgcccacttataaagtaagacgggtggatggagtatatatagaattggaggacggaagatgtttgatagaagggatgtcttcgtggtggtgcatggtacatggatacaatcatccggtattgaaccaagcgctcaaggaacagatagaccgtatgagccatgtcatgttcggcggactgacacacgatccggccatcgaattaggcaggttgttgttgaagattgttcctccccgtatgcagaaaatattttatgctgactccggttcggttgcggtggaagtggcattgaaaatggccgtgcaatattggtatgcgcaagggaaggaaaagaaaaataattttgtaactattcagtccggatatcatggagatacgtggaatgccatgtctgtttgtgatccggtgaccggtatgcatcatatttttggccctacattgcctgtgcgttattttgttcctgctccccggtcgcgctttgacggaatctggtatgaagaggatatagagcccttgagggaaatattggaacagcatcatgaagagatggccgcattgattctggaacctattgtacaaggggcgggcggaatgcgtttttatcatcctgagtttttacgccaggcagagaaactttgcaggcaatatcggctgttgttaatctttgatgagatagcgacaggtttcggaaggacggggaaactgtttgcttgggagcatgcgggtgtccagcccgatatcatgtgcataggcaaggcactgaccggtggatacatgactttctctgctgtccttgccagtgatgatgtggctgatacaatttccggcggttatccgggagtctttatgcacggtcctacttttatgggaaatccgttggcttgtgccgtagcgaaagcatccgtggaattattgctttcctatagttgggaggaaaaggtaaaggccattgaatcacagttgaagagggagctggcccctgctgctttattgccacaagtggctgatgtgcgtgtattgggagctatcggggttattgaagtgaagaaaccggtagatatggctttcatgcaacgtcgttttgttgaagaaggggtatgggtacgtccttttggaaaactggtgtatatcatgccgccttttataattcagcctggagaattgagcaaattgacgcattcactggtgaagatagtaagagaattaaaagaataagtgatagtactgagagaaatagaaaaaatgaattcattaacagattgggaaagggaattagccctgcttgaaaataaaagtaatcttcgtaagttgcctgttatccgtcatttgggaagagaggtggaggtgaatggaaaagtgatgcttaacctttcatccaacgattatctgggattggctgcttatctgccattacgtacggaattcttgcaaagtcttactcccgacacctttcttccttcctcttcatcctctcggctgctgacaggaaattttgatatctatgttcagatagaggatttgcttgcccgactgtatcggaaggaaagcgcgttggtttttaatagtggttatcacatgaatgccggtattcttcctgcagtgagcgatactcgtacattgatccttgccgataaactggtacatgccagtattattgacggcattcgtttatcggcggccaagtgtatccgataccggcataaccggtacgaacaattggaacagttgctggtttccaatcatgccgggtatgatagaataattattgtaaccgaaagtattttcagtatggacggtgatgaggccgatctccgtcgtttggtcactttgaagcaacaatatgataatgtattgctgtatgtggatgaagcgcatgctgtaggggtgcgggggatgcatggcctggggtgtgcggaagaacaggattgtgtggctgacatcgatttcttatgtggaacttttggtaaagcgttagcctcggtaggaggctatattgtttgttcgaagaccatccgtgattatttggtcaataaaatgcgtacattcatatttacaacggctcttcctcctgtcaacttgctatggacattctttatcctggagcatttgaacagtttcagcttccggagggaaaggttgaagaagatatcctctcttttgaaagacgcgttggtaaagaaaggctacgcttgtccttctaccagccatattctgccaatgacgataggcgatagcggtgatacggtgttaaaggccgatttcttgcagcgtaaaggtttttatgcgttgccggtgcgtcctcctactgtgcccgaaggaacatcgcgtatccgtttttcgttgacagcggatattactgaagaagaaataaaaagtctgatagaattgatatgaaacattattttatacaacaaaattatcttccccgattgacacttttttttgccggttggggaatggatgaatgtcctttcatggattattgctccggaaatagcgatctgttggtttgttatgattatcgttcgctggattttgatttcacgctgttgcagggttatcaggagattcgtctgatagcctggtctatgggagtatgggccgcgtctatggtattgcaggatatggacttgcccatttgtgagagtgttgctttaaatggcacggtaactcctgtcgatgatttgaaaggtatttcgcagcaagtttttgaaggaacactggaaggcttgaatgaggttacgctggaaaagtttatccgcaggatgtgtttgaaaaaggagaatctggaaacattcttgtcgaaacgtccgcaacgtgcggtagaggaactgcaagaagagcttcggaggattggagaacaggtaaaatcttgcgctgttcccagttttgcatgggaacgggctgttataggcaagaatgatttgatttttacggcggtcaaccaaagaaatgcatggaccgggacggaagtggcagagtatgatattcctcattattcagaagaaataatgagagatttgctatgcccgtctgtcatttaaaatgaaaacgtatgattaataagcaattgataacccgtcgcttttcccgcgctgtagagagttataaccgtgaggcggtggttcaaaagcagattgcataccgcatgagtgatatgctaaatcattatttgccccgtccgtgcggccggatattggaaattggtagcgggacgggctttcttacccgcaggctgatggaaaccctccatcctgaaaaactggtgttgaatgatatttgtcaggagatgagtacttgtttcaccgatttgttgggaagcgggcgggctatctttctggcaggggatgccgagtcccttccttttccaaaaggacaggatttgattgtatcatgctcggcattacagtggtttgtttctcccgagctgttttttgaacgttgtaatactttgttgaagcagaaaggatattttgcttttactacgttcggcagggataatctgaaagaagttgcatcggttaccggcagcggtcttcactatcgttctttagaggagttagaagaagcactgcgcatacactatgagattgtgaaggctcatgaggaacgtatctgtctgacttttggcactccgctcgaagtgctttatcacttgaaacataccggggtggctgctgtcaggcaacaagcgtggactaaaaggaatttgcaggatttctgtgacaagtatgcccgtttgttcagtgatggtcgttcggtgactttgacttatcatcctatttatattattgcaaagaaaagacaatagaaataaaaagaatcatgaaacagaatgtatttttcgtaagtggtattgatacaaatattggtaaaagttatgccacggcctatctggcacatctttggaacaaacaaggatgtcgtactattactcaaaaattcatacagacaggaaatccggaaggttattcggaggatattgagttgcatcgtcgtctgatggggacggagtatttgcctgaggatgagcagggacttaccaaacctgaaatattttcttatccggcttctccccatttggcttcacgaatagataaccgcaccattgattttgataaaataaagcatgccacggaggtgctgagtgagcgctatgatgctgttttagtggaaggagccggggggctgatggtgccgttgacagaggagaacctgactatagactatattcaggaatcgggttaccccttagtttttgttacttcgggacgattgggaagtatcaaccatacattattgggttttgaggctatagaacggagagggataaagcttcatacagtgatgtacaatctgtttcccgaaggagaagataaaatcattcaggcagatacagaggcttatatttgtcgttatatagagaagcatttcccggatacagcatttgtgaaggtgccttgcttgtaattcatctttcttgtttatgatgtgtctacctaataaaaagacaggccttgtttcgcaacaaagcctgtcatgcaaacttaaaacaaccaacaaaagaaatagataatttcgggcaattatctaataaaaagcaattctctgtatttaggtaatgtccacatctgattgtcaacaatcagttccagcttgtcaatgtgataacgtatctcttccagcatgggggcgatagtgtcatgataggcgattgctttctcccgttcactttctatcttgttagccaccttacgtgcttccaccatggcttccacatgctcggtgatgaagatggtgcgttctgcaatctcttcaataagtttcatattctcggcagatagtcgggacgctttttctgcagggaataattctttcattttatatacattgtcaatcagtttgctctggtattcggtagccacgggaataatgtgattcatagctaggtcaccgagaacacgagcctcgatctggattttttttgtgtacatttcccacttcacttcgttgcgggcttccagctctttgcgcgtcatgacgcctgttgcttcgaacatggcgatgctttcgggtttcaggtaattgtcgaatatcagcggacaactggtttcgcagtccagaccgcgtttggcagcctcagctttccattcgtctgagtaaccgttgccatcgaaccggataggtttgcattccttgatgtattggcggatgatttccacgatggcggagatttttggctctcccttttcaatcaatgcatccacatcctttttgaatcttgtcaactggtgcgccaccgccgtgttcagtgcaatcatggcactggcacagttggcttccgaacctacggcacggaattcaaagcgattgcctgtaaaggcgaaaggagaggtgcggttgcggtcagtgttatcaatcagcaattcgggaatctgagggatatccagcttcattccctgtttgccagccagcgaaataaggtcatcatttgcactttcttccatgtgatccagcacttgtgtcagctgtttgcccaaaaaagaagagatgatggcgggaggtgcctcgttggctcccagacgatgtgcattggtggcactcatgatggaggccttcagcaatccgttatggtggtaaactgccatcagggtattgacgacaaaagtaatgaaacgcaggttgtcttcggctgtctttccgggagccatcagcaggataccggtatctgtacctaatgaccagttgttgtgcttgcctgatccgttaactcccttgaatggcttttcgtgtagcagcagacggaaaccatgattacgggctactttgcgcatcagtgacatgatgagcatattgtgatctacggccagattacattcttcgaaaatgggagccagttcgaattggttgggagccacttcgttgtggcgggtctttacggggatgcccagttccaatgcttggatttccaggtctttcatgaaagctgccacacgggtagggatggccccgaagtaatggtcttccaactgttggtttttgctggcttcgtgtcccatcagggtacgtccggtcagtaataggtcggggcgtgcggcgtacaggccttcgtctactagaaagtattcttgttcccatcctaaataggccattactttctttacttcgggattaaaataatggcagacatcaactgctgctttatttacagcacttaacgctttcaacagaggggccttgtagtcgagggactcgccggtgtaggcgataaatacggtggggatgcacagggtgtcgtctactacgaatacgggggaggaggggtcccatgcactgtagccacgtgcctcgaaggtattgcggataccgccattagggaaactggaagcatcgggttcctgctgtacaagtagtttgccggagaattcttccatcattccgcccttgccgtcgtgttctacaaacgcgtcatgtttttcggcggttccttcggtcagcggctggaaccagtgggtatagtgggttactcccagttcggttgcccagcgtttcatgcctgcggctacttcgtcggcgatgctgcggtccaaaggagcgccattgtccatagcatctgtcagtttggcatagacattgctaggcaggtatttgaacattttttcacggttgaatacatacttggcaaagtattcaccgggcctttgggcaggtgtttctactgttgctgctttcttcttgaaagctgtttcaactactcggaatcttaattttgacataatacctaaatttgtttagttgttaatttatttagagtgaatgattttctctttattattttgattcaaaatgacttttagttgtatgcagattcgccatgttcataaatgtcgagcccttcttcttcaattctgttcgggacgcgcaaaccatgaatcttgtccaatcccttgaagatgaggtatcccatacctgctgcccagcaacctactactgttgtaccgaacagttgtgctagcaggaagttgtaaccaccaccatagagcagtccttcttcggtggcgaaaagtccggtaagaatggtaccgaggcaaccacaaacaccatgtacagaggaggctccgaccggatcgtctattttcaatatgtggtcaatgaagtctaccgagaaaatcatgacgatgccgcagatggcaccgatcatgactgctccgaagggggaaacgagatcacatccggcggtgactccgaccaggcctgccaatacaccgtttaatgttaatgacaaagaaggttttccatattttatccagcttgctgtcaaagcgaagaagccaccggcgcatgctgccaggttagtggtcaggaatacgtgagagataactgtctgatcagtaccggtagctgctgccagttgagaacccggattaaaaccaaaccaaccgaaccaaagaatgaatacacccaggcaagccaatgtcaagctatgtcccgggatagccttagacctgccatctttaccgtatttaccgatacgcggtcctagaacggcagcacctaccagggcaatccacccgcctactgagtgaacgacagtggaaccggcgaagtcatggaaggtggttccgaatatgtttgtcataaaagaattttcttcaccattcatcagccatccgccaccccacgtccagtgtcctgataccggataaatcagtacgctgatgaagatggtgtataccaagtacatggagaatttagtacgttctgccatagctcctgatacgatggttgctgcagtggcacagaatacggtttggaagatcagaaacccttcaatgggtagtccgttgtcaatgactttgtccattatgtcaaggttgaaaaaatgtggcgtgcctacgaaacctcccacaccgaacatcaatccgaaaccgatgaaccagaagaggatggagccgaacataaagtcaatcagattcttcatcagtacgttggcggtattcttggtgcggataaatccagcttccaccaaagcgaatcccggttgcatgaagaataccagcatggctgccagcagcatccatacagtattcagaccggttacaatttcattgatggcttctgtgtccgtgctcctgacaggagtttccgatagtgcgtcttgtgcccaaaggctggctgggaacagaaataaaagtataaagagtcttttcaggtatagtttttccataccttttctattagttgtatccataattttttcgcttaagttgtagtatgatttttactttgtagagtagttttgaccggggtgtgtaatgagttatttctcttgttctgcattgtacaaggcaatatctccacgttctcctgtacggatgcggatggcatcttcaacgggtatgacgaagatacgtccgtcaccgatctcgccggtatgagcagccttgagaatggcatgaatggttttgtccacattcttttcgcggactacaatggaaaccaggattctctcaatggaactggtgtcataaaccactccacggtaaatgcgtccttgacgtgttttgccaatgcctcttacatcgtaataggaaaaccattcgatttcggcttcgagcaacgcttcttttacgtcctcgaatttggtcttacggataatagcttcaatttttttcattgttgtatttgtattttgtatataatgtaatctttttaccttctaaaaaactgataccttgttgttatccttgtatttatgctctttatgattaaaaacttagcccgaaaacgaaataagccccttcagtgcgtgggtttacggtgacttttgcaaaagctggaacggaaaatgaatcggtgattcttatctccttggcggctcccaggctgatgtcgcatacggcgaaaccgttggaaccgttgcatacagggtcttcggaatagttgtaaaagtctgtggcccacggagtcgctcctatttccgctgtccattccagtcctgccagtgtgaaaggtacggtagccgagatgtaggaagaataggctctgtctccttcgttattcactccgtcggttccggcgaaattggtataccagttcaaggccagcggtccgaagtcataacctatctgtgcctcgaaggtatggttggtattgtgtgagccgtaatggaaataccccggtcctccattgaaccagtaatctgtgacggagatactgaaccctcctgtggtgtagcctaatgtgaggtcaatctcttttgtatcttctttttcgatacctgttgttccccatgcagacaatgagaaccctttgtaagaaactgacaacgtgggttggatactgacaccccccaaatcctggccacgccagatgtatccgcttacaaagtcggctcctacgctggcttctactttgtcctgcgccatgcccattgccggaacagctattgccaaggccgacagaaatgttgtttttctaaaactctttttcattgctttttaccttttaaattcataatagtgagtttgttatatctcgtatgtatttgtttttcttgtaatggtttgtgcttgttatgtgataaatgttgtttataatatccatcgcctgattcgtttcattgcctcttcacagtccgcgcgttcgccgaaggcggtcagccgtatgtaaccttctccactgggaccgaatcctactccgggagtacctaccacattggcttcgtacagcatttgttcaaagaacttccacgagctgattcctcggggagccttcacccataaataaggtgcgttctcaccgccgaatacttttagtccggtgctttccagtccttctttcatgatgcgggcgttggtcatataatagtggatggtggcttttatctgttcctttccttcagggctgtaaatggcctccgcaccgcgctgggtaatgtacgaggttccgttgaacttagtgcattggcgacggttccacaaccggttcagcgggatgcgttttccttccaatgtggcggcggtcagctccttgggtactacggtgtagccgcaacgcactccggtaaagccggcggttttggagaagctgcggaactctatggctacctttttggctccttttatctcgtaaatggagtgggggatgtcggggtcttgaatgtaggcttcgtaggctgcgtcataaagaatcaatgtgtcgttctccagtgcgtaattcacccatttcttcaattctgctttactgataaccgtaccggtggggttgttggggtaacatagatataaaatgtctattctgcggtcggggatagcgggaatgaaattgttttcactcaggcagggcagatagaccacgttgctccatcttccgttttccagcactcctgctcgtccgcacatgacgttagagtcgatatataccggataaatagggtctgtcacaccgatgctgttatcgtggcggaggatgtcccctatatttcccgtatcgcttttggcgccgtcactgacgaatatctcgccggattccaaatgtactccgcgtgaggcataatcgtttttcaagatggcgtcgattagaaaatcatatccttgctcgggaccgtatccacggaaggtttctttgcttgccagttcgtccactgctttgtgcatggcttctatggatgcttggggcaatggttgtgtcacgtctccgatgcccagacggatgaggtctttttggggatgggaaactttgaatgcatttactttcttggcaatgtccgaaaacaggtaattgttgggcagttttaaaaaatgttcgtttactaatgccataattgctgttgttttatagtttgtctttactgatttcttattcctgttaaatttctatctcaccatcgaaaacttttactgcgggacctgtcatgtacacatgtccgtctgtttcgttccaatggacttgtaaatcaccaccatccatccttacccgtgattttcttccggtcttgtggttcaggtatgcggctacggcagtggcacaagctcctgttccgcatgccatggtgatgcccgagcctctttcccagactctcatccttaaggaaccgtccggcaatacttcaacgaattctacatttgttcgttcgggaaaaagcggatgattctccagtttcggacctattgccggcaaatttacattttttatatcatctatgaaaattactaaatgtggatttcccatacaaacaaatgttcctttgtattcttttccatctactgtgattgtttttgccaacattttgccgtccggggtatttatttgtctggagttggtaagcaggggaagatccatgtctactgttacttcttctaccagcccgttctccgtatgcagttttaggatcttgattcctgagagcgtttccagcgtgatgacttccttttgagtcaatttgttgtcatatacatactttcctatacatctggaggcgttgccacacatcatagcttcagaaccatctgcattgaatatgcgcatactgaaatccgctttggttgattttccaatcaataccagcccgtcggaaccgatccccgtgtgacaagaactccatttgatggaagttctcacggggtctgctatggggtgtctcagggtgtttacgtatatatagtcattacctgctccctgcatcttcgtgaacttgattgttgttgccattttgtctataacttcttctgttattatttccttttgtcttattttggtgcaaatatatatctttttgatgttttataaacaatggtgctatctatattcttatttatttttattctaatgataaatagaaagctattttaggtgtttttctttcaaactgaaataaaagtctagttatattctttttaattgtaattcattaagtctgtactctgttatggaacatatagtttaggtaatattttgttggttattcagtgttgtataatcggtatcgtatataattaaggtggatgatcgatgtaacaaaatgataatatattatcgcattgctatattattttgttacctttgcatcctgttggataaaaaagagatttgtaatgcagaatattattgcgatagaaaatggtgtgacccgccatccgctgtaccggatgaaggaaccggtgaatatgacacttgccgccggagaacatatagctgttgtgggaagaaacggggcaggaaaaagtatattggtagatacgattacaggtcggtggccgttgttgatgaacgaagtgaaatatgatttctctccctctccttcgaagatggcatacgagaatataaagtatattgctttccgtgattcatacggagatgccgatggaaattactattatcagcaacggtggaatgctcatgatttggatgaaactccactggtacgtgatttgttgcccgaagcgaccgattcaggcctggaaaaggctttgtatgaactgtttggcatggagaggatgctggataaacatatcattctgctttccagtggtgagttacgtaagtttcaactgacaaagactttgctgagtaatccgcgtgtactgattatggataatccctttatcggactggatgcgaagacgagggacctgcttcatacattgttgggtgaactgactaaagtaacccatttgcaggtaatccttatcttgtctaagtccgatgatattcctgcttttatcactcatgttattcctgtggaagacagggtgtgtggtaaaaagatgactttgcaggaatatttggcggtccgtaagccgataccggaacggatgctttccgaagaaaaggaggcacggattctgaatttgccttacggcggtgatttgtatcacaccgagcacgtagtcgatttgaacaaggtaagcatccgttatggcgagcgtaccattttgaaagatttggactggacagtgaaatgtggcgagaaatgggctttgagtggagagaacggttcaggaaagtctacgttgctgagtctggtctgtgcagataatccgcagagttatgcttgtgatattaccttgttcggcagaaaacgcggttccggagaaagtatttgggagataaagaagcatataggatatgtcagtcctgagatgcatcgcgcttatctgaagaaccttcctgccatagatattgtggcaagcgggctacatgattctgtggggttgtacaaacgtccgcgtcccgagcagatggtggcttgtgaatggtggatggatatttttggtattgcaaatttgaaagaccggaatttcttgcagttgtccagtggcgagcagcgtctggtgttgttggctcgtgcttttgtgaaggatcctgagttgcttattttggacgagcctttgcatgggttggacttgtacaaccgccggttggtgaaagatgtgatagaaactttctgccgtcgtaaggacaagaccatgattatggtgacacattatcaggaagagttgcccgcatgtataactaactctcttttcttgaagcggaattaaaagttctttttcaaaaggtacgttccgggcagacggaagacgacaggttaaacgatagtgccctgtcgctttccggacaagccggggtgttggactgagtacaaataattctactgttcgtttcataaatatagcattgaaattttttaaagaaaacgaatcatggaaaacacattaaaaaagcctatgacaggcattattcctcctttagtgactccgttactggataatgacaaactggatattgacggtttggaaagattgatagaacgactgataaaaggaggagtgcacggattatttatactgggtaccactggagaggcgcagagcatcagttaccggctccgccatgaaatgataaaggaaacttgccgtatcaatgccggaagacttccggttctggtttgtatttccgatacatcaattgtagaaagtattcatctggcacatgtgggggccgagtgtggtgcttcagccgtagtttccgctcccccttactattttgctccggggcagcctgaactggccgaattttatgaagaccttatccctcagttgccgttgcctatcttcttatataatatgccgtcgcatacaaaagtgaattttgctccggctacgatacagtgcattgcccgtaaccctcaggtagtgggattcaaggatagttcggccaatgccgtttatttccagtccgtgatgtatgccatgaaggaccgaccggatttcgccatgctggtgggaccggaggaaattacggccgagtgtgtgttactgggtggacacggaggtatcaatggaggtgccaatatgtttccggaattgtatgtagacctgtataatgccgccttggcacgtgacatggaaacggtgagccgtcttcaacccctggtgatgcagataagcagcagtatttatactgtgggccagcatggttccagttatctgaagggattgaaatgcgcgttgtctttattgggcgtttgtgatgattttgttgcggctcctttccatcgcttcaatgctccggaacgcgagaagatacgcaaggcgttggaggcactccctttttgtccggagttgaaaccttaaatgctcggtctgtatgcatatcattgatataatcgtctttttgctgtttaccggcggagtcgtggccttcggttgttctttctttaagaagaaaggtacttccgaggagttcacttctgccggcagaagcttgcccggctgggtggtggggatgtccatctttgccacgtatgtcagcagtatcagttatttgggatatccgggaaaggctttttcgggagattggaatgcgtttgtattcagcctgtctatccctatagcttcttattttgcggctcgttacttcgtgcctttttaccgaagccaggacagtatatcggcttatagtttcctggaaaaccgcttcggcccttgggcccgtatatatgcctcgtcctgttatctgctcacccagattgcacgtacaggctctattctgtatttgttggcattgcccatgaatgtattgctgggatggaatatccagaccatcattattgtgaccagtgtggctattgtactttattccatgctgggcggcatgaaagctgtcatttggacagaggccatacaggggattattctgattggcggtgcgctggtatgtatgttcatcttgctttttgacatgcccgaaggtccggcacagactttctccatcgccatggaagatggaaaattcagcttgggaagttttggaagcagtttaagtgagtccactttttgggtgtgcctgatttatggcgtatttaccaatttgcagaactatggtatagaccagagttatgtgcaacgttatcatacggcgaagaatgagaaggaggctaagttctcggccttgttcggaggatatttgtttattcccgtttcggctgtcttctttatgatagggaccgggctgtatgcgttctataaagtgcatccgggggtcttgcccgacggagtgggggcggattatgtctttccgttctttatagtcaatgagttgccggtggggttgacaggcctgctgattgcttctatctttgccgcaggtatgagtaccattgcgaccagtgtcactagttcgtctaccatcattctgacggattattaccagcgtttccgcaagcatgccggaaacagggaacggatgttggtgctgaaactctctagtgtgggagtaggagtggcaggaattctggtggcctttgcctttatgagtgtgcaaagtgcgctagatgcttggtgggcgttggcgtctattttcagcggaggcatgttgggactgtttctactggggtatatttcgaggaaggcacgtaattttgatgcggtactgggagtcgtttgtggggtaattctggtttgttggattgtgatatccccttttgtacatgctaatctggctatcgtattcggaacgttgctgatatttttggtgggattcctgagtgctaatttgtttaataagagaaggtgtaagtagaataacttaattttatgcattaggcgtgtcaaaaccaaaatgactgctcctaatggttacagatagtaattataacacttaaaagggtcgtatcaagctctgtattgagtaatgatacgaccctttcttagtcttttaggatgctcaaatctcagattataagttcatatttccaaaaactgaatttggacacatccacttttatgtatttgtcggttacaatctgtaatctttagaatgttcatcttgtttttgattcattctccggtttttttgatcgtttcattgtccgcaccatcagataaatctttgcaactcattgaccctgtttaatgcggcattgaaatcttccaccagttctttcatcacttcatccaccgtctgtaatttatgtatgcaggatgcgacttgtcctatttccagttccccttcgaataaatctccttcaaagattcccttttttgcacgtccttttcctaacaaagtgcgtagttcatccgttgtcgcgccacggctttccgcttcttccacttgtttgaagaaatcatttttgaccagccggacgggagagagctgtttcaatgtcagttgggtatctccttcgttcagtcgcaggcatcggtctttgaatgtgaaatgagcggaactctcttcggttaatgcgaagcgcgtgcctatctgcaccccgtcggcccccaatgccatagcagctagtatactttctcccgatccgatacctccggcagccatcaacggcacagtggtaatctgtctgacggccggaataagacatagggtggtcgtttcctcccgtccgttatgtcctcctgcttcgaatccttcggctacgatggcgtctacgcctgcttcttcgcatttggcggcaaacttggtgcttgccactacatgggccacaatgatgccgtgctcatgcaggtgttctgtccaagtctttggatttccggcagaggtgaagacgattctcacaccctcttctattaccatattgataaggatgtctatttcgggatacatcagcggaatgtttactccgaaaggcttgtctgtcgccgctttgcatttccgtatgtgctcgcgcaaggtttcgggatgcatggagcctgctcctatcagtcccagccctccggcattacttactgcggaggccagtctccaaccgctacaccataccattcctccctgtatgatgggatactttattccaaaaaggttgcaaattctgttcatatataataatttaataatttgcacattattcattatacaaaacaactaacttttattgaatgttttagggggaaagtagtgaaaaaaggaaaaattcttagaaattttaaggtttgtagaacagaaatggtctatctttgttctcggaattaaaattgtatatttataaacggataaaaaccatgttattgcaattgctatttgtacttgtcgctattattgtaggtgcccgtttgggaggtatcggattgggagtgatgggaggtgtaggccttgccatattgacttttgtcttcggacttcagcctaccgctccccctattgatgtgatgttgatgattgtcgccgttatctctgccgcctcttgtatgcaggctgccggcggactggactatatggtgaagttggcggaacggctgttgcgccgtaacccttcgcaggtgactatcctgagcccgttggttacttatctgtttacttttgtcgcaggtacagggcatgtggcctactctgtgcttcctgtcatagccgaggtagctacggaaactaaaattcgtcctgagcgtcctttaggcattgccgttatcgcctcgcaacaggctattaccgccagccctatctctgccgctaccgtagcgttgctgggcctgctgacaggatttgacattactttgtttgatattctgaagattaccattcctgctacattaatcggtgtgctggtcggtgctttcctttcaaaaaaggtcggcaaggagttgttggaagatcctgaatacctgcgccgtctggaagccggaatgattgatacaaaacatgtggaactgaacgatgtgaagaatatgtttcacgcccgtatctcggtgattatctttattgctgccacactgctgattgtattattcggctctatccctgctatgcgtcctgtgttcaacggtgcggctttggatatgccttctattattgagatcttgatgttgtgtgcggcagctattattcttatcatttcacgtacggatggaatcaaggctacacaaggcagcgtgtttcctgccggaatgcaggcggtaatcgctatttttggtattgcatggatgggggatacgttcatcaatggaaacattacagaactgacaggttctattgaagggattgtgcgtcaaatgccctggctgttcggtctggcattgtttgtcatgtctattttactttatagccaggctgctacggtgcgtgctattgtaccgttaggaatagcactgggtatttctccgatgatgctgattgctttgttccctgccgtcaacggatatttctttatccctaattatcctacggtggtggcagccatcaactttgaccgtacaggaacaacgggtattggaaaatggattctgaaccattcgtttatgatgcccggaatggtggctacccttgtttctattgtggtaggcctgctgctgatacaggtattctagaaaggaaagggataggtgcggtcaggcttgaagatgagtaatctttcatctgtaacatgagtaatcttctgcctgtaacatttataatgattcgatgtgcacatatatatcatcggcgcatcttcttcctctgtgtgtgaacaaaatttccaaataattattatagtaataaaacctaaacttgaaaagattatgaacggattaagaaaactcagccttatggcggcaatgctggtatgtaccacattggctgctgtcgcccaaaagcctaatatccatatattggctacaggagggactattgccggaacaggcgcttcggctactaaaacaaattatactgccggacaggtggctatcagcacattgctggaagcggttcccgaagtgaacaaaatagccaatgtgactggggaacagattgtaaaaatcggctctcaggacatgaatgatgccgtatggctgacattggccaagcgtatcaacgagcttttcagccgtggagatgtggacggtatcgtgattacccacgggactgacacgatggaagaaaccgcctttttcctgaacttgactgtgaagagtgacaagcctgttgtattggtaggagccatgcgcccctctacggccatgagtgcggacggaccgctgaacttgtataatgcagtagtcactgccgccgccagggaatcacggggaaaaggtgtcgtaattgccatgaacggtttgattttgggagctcacggagccatgaagaccaatacggtggatgtacagactttccagtcccctaactccggtgcgttgggatatgtattgaatggtaaggttttctataatatggaatctttgaaacgccataccaccggttccgattttgatgtaacccaccttgacaagctgccgaaagtaggtatcgtttacagttattccaatgtagaagctgatatcatgactcctttcttgaataatgggtatcagggtattgttcatgccggtgtggggaatggcaacattcatcagaatttgtttccgatgttggaaaaggcccgtcaacaaggtattttggtagtgcgttccagccgtgttcctaccggaccgactacattggatgctgaggtggatgataataaataccaatttgtggcctcacaggagttgaaccctcagaaggcacgtgtgttgttgatgctggcgttgactaagacaaaagactggaagaaaattcaggaatatttcaacgtatactagtccatccggcactttttctttttatctctttttcttttgcgcgcataaaagaaaaagagaatacattacaacctaaaactttgacttatgaaaagaataatgttagtatgcctgacagcctttactgtctcaggcacttaccctttatatgcccaatcttccggaagtgatttcatggccggtgacaaaagcctgtttgaagaagtcaccggtatcaagaagaaaacggacaagttcaatctctatcttaatatgcacggtgatttcaatatgaaatggaacgactccggatttgatcggggcgcattcgaaatgaagcaactccgtatcgagatgaagggagatatcaatgactggttgagctatcgttaccgtcagcgtctgaatcggggtaacgatggttccggcaatatagataatgtacctaccagcatagattgggcgggagtaggcatcaaattaaataagttctcattttttgccggaaagcaatgtgcctcgtatggtggtatagaatttgatttgaatccgattgatatttacgaatatagtgacatgatagagcacatgagtaacttcatgaccggtttgaatgtggcatacaactataatccttatcagcagatacaatttcaggtattgaacagtctgaacgggccgtccgaggagatgtacggggatttggaacgtaccaaactgccgttggtttataccttgaactggaatggtaattttctggatgtcttcaaaacccgttggtctgcctctgtcatgaacgaaacgaaaggcgagaagatgtattattatgctttgggtaatgagtttaatttcagccctaaatggcacgcctattttgactggatgtattctcatgaaggggtagaccgtaaagggattataactagtatagtaggaactgataatcaggcacacaatgcttttaatgccgaatatatgtcctatgtgttgcatgtgaattatcgttttgccccgaagtggaacttgtttgcaaaaggaatgtatgaaacggcttccgtttataaggcaagcgatgaagtggaaaaaggtaaatatcgcacggcatggggatatgcaggaggaatagaattttatccgatggagagcaatctgcacttcttcctggcatacgtggggcgttcctataaatataccgatcgtgcgaaggcattgggtgaggacaatttcagtacccatcgtgtgtcagtgggattcatttggcagatgcctgtattctagctcatgttttccttttttgtttgttattctgcattgcgttacctcctcttggagatagcgtaatggcaggatgaagacgatggaagggcagaaagaatatgtttgtttttgtttgggagcgatccatttattcttgagccagactttctaccgatttgatgaaagcttcggcacgtggtctgagataatctaccaatgcggcatcgcaataggcaaagtcttcgtagtctccactgtgccgtttgtcaaacaagttgctgaatgtgctgccatgttccagactcagtactcctgtgcgcacaaagtgataggacaacattatttttactccattgtgggtgcctgcctcgattcccttagctatttaacaaaccgatggctgcataaaagcaggtataataaaggcggttgatggcggcgttaaaataatttcccacacgcatatagtcagcttcttccaaagtcttatacactcgttcaaaacggtattgaatcaaggcaacgcggtgctcgggggatagttcctgcttcataacactatcccttcattcattacgttcagcgaaaacggagtctgaaagggacggttctcccataatctgcgcagcataatcattgggctgataataactcccgattttacttccagttcataaagcggacggataatttcctgttcgtattctggagtaagctgtggctcatctacaagaataagcagatcgatatcactgtctgggcgagcctctccgcgagcttccgatccataaagtatgatttgggcatttggtgctactttgtggaggatactgcgtatcatatctacaatttcggttcttcgcatgatttttctcctttctctattttatagtaacaaagataatgaaaaaatgtcaacttgttactgccctgtttctaaaaatatctttttctttctggccttatttagttcgataatgctttttctattgtataggccggaggtctttcttcccgaaaaacttatcaataatcaatgcgatagccccatcgcccgtcacattgcaagcagtgccgaaactatccatggcaatgtaaagcgctatcatcaaagcctgttcactttctccgaatcccagcatggaagccaggatccccaatgcagccatgatggctcctcccggtactccaggtgcggctaccattgtaattcccagcataaagataaatcctgcaaacatggggaaatcaaaaggcattccttgcataatcatcagtgccagtgcgcaagcgacaatcttcagcgtgcttcccgacagatgaattgtggcgcatagcggaatgacaaatccggctatatcctccgtaaccccattcttgatggtctgccgcaaagtcaccggaatggtggccgccgatgactgtgtgcccaatgctgtgaaataggcaggcatcatctttcccagtagtttgaacgggttccggtgcacaaacagcgctgcaatggtatattgaaaaaccagcaggaagatgtgaagcaggaaaattactccgataattttaatgaataccatcagaatgttatatacctgtccggaatgagtcatattcaggaatataccgaatatatagataggcagcaggggcagaatcaccgtctggatggtcttgactatgatttctttgaaatcgttacatacgtttttcagcgctgtactatccagatgtgcgatgcccagacctagcgtgaaggccaggatcaaggaagtcatcacattcatcaccggaggaatgcctacggtgaagaacggagaaatgtcatgcgcttcactgatttgttctatcggcgctcccggagcaatcatggaagggaataaagtcactccggtgaaataagacaggaatccggagaacaaagtggcgccgtatgccaccaacgttgtgattaccagcatctttcccgcctccttgccgatatcggcaatggcgggagtgacaagcccgagaataatcaacggaatgatgaaacccaggaactcgctgaagatcccgttgaaagtcacaaatactctcaccagttcgccgggaagaacgtttccgaatcctatacccaatgcaatggcgatgataatccgggctaataagccgatttttaacctcttcatgataatgtgctattgttcaaattgcaaagatagaattattgaacaaattacctattaaattgttaaatataaaaagaacaatttatggaaaaggcagatataggattaatcggattaggcgtgatggggcagaaccttgctctgaatctcgctgacaagggatggaaggtcgtagtatggaaccgtaccgttcccggaaaagaagaaaatgtagtagataactttatagcaaaccgtgccaaaggaaaaggtatcataggcagtaatgaactgacggattttgtcgaagcgctgaaagctccgcgtgtcatcctcttgatggtacaggcaggtccggctgtcgatgaactgatggataagctgcttcctttactggataagggcgatatcctcattgatggagggaactcttattatgaagatacggaacgtcgtgtgaaggaactttatgataaaggaatgtactttgtaggttgcggtatctcagggggtgaggagggtgctctgcatggagcgtccatcatgcctggtggtgcgcaagaggcatggccggtcattcagccgatgctgaaaagtattgcggcaaaagccgaggacggcactccgtgttgcgaatgggtggggcccggtggggcaggccactatgtgaagatggtgcacaatggcatagaatatggggatatgcagttgatagctgaaagttatttcgccatgaagcatctgctggcattgaagaatgaacagatggcggatatttttgaacaatggaacaaaggacgcctgcacagttacctgatagagattacttcagccattctgcgtcataaagaacaaggaggcggttatttgctcgacaacattctggatgctgccgggcaaaaaggaacgggtcgttggagtgtcattaactctctgcaactcaatacgccgctggacgtgattgccgaggctgtttttgcccgtaatctgtcggcggagaagaacttgcgtgtgctgatgtcccagcattatatgcatgtggagaatcatccggtatataattatcaggatacggtggccggattggagagtaccttgtatgccgcccgtctgataggttatgcgcaagggtttgctctgatgcgcactgccagtgagcaatatggctggaaattggatctttccaccatcgctctgttgtggcgtgccggatgcattatccgttccgctttcttgaacgacattgccgaggcctatcgccgtgcgccgggattgtcgcatctgttgctggacgagcatttcggacgggaagtaacggaagccctgcccgcgtggaagaaatacatcggcgtcatgttgaaagaaggattgcccgtacctgtactttccgcagcgttgaattattttctgggtctgaccaccaaccattccccggccaatatgatccaggcgatgcgtgattatttcggagctcataccttcgagcgtgtggacagtccacggggggaatttttccacgaacattgggaagacaactattgatacgtcgcaacacaaagcattatacattcatttttaaaagaaagaatcatgagtttaccacatagtttatttttggtcatcttcggtgcatccggtgatttaacccggcgcaaactgatgcctgccctgataaagatacataacgggaaacgtttccccgagcattttgccattatcggctgtgcccgtactgcatacacggacgaaacctatcgtgcttatctgaaagaagaactgataaagtccggttctcttacaaaagaagagatggaaacattggacgattttctctctactgtccattatcagtccatggacccggcggacgaaaccacttattctctgctgaatgaccgtctgaaggagctttcacctcaatatgagaataatgggaattatttgttctacctggccactccgccattgctttatgaactgattccgaaatatctgcatgatgcgggcttgctgaaaaagcccggattaaagcgtatcattgtcgagaagccttttggatacgacctggcttctgctcagaaactgaataagatctatgccgcttattttaaagaagaggatatttaccgtatcgatcatttcctaggcaaggaaacggtacagaatattatggtgacccgttttggaagtaccatttacgaaccgatatggaaccgtaactatatagatcatgtggaaatcactgcggtggaaaatatgggtataggtactcgcggagggtattatgacggggcgggagctctgcgtgatatggtacagaaccacctgatgcagttgcttgccattactgccatggaaccgcctgccaagtttgacaagaatggttttcgtaacgaggtgatcaaagtctatcagtcccttcgtccgctgactgatgagtatatccgtgataacgttgtccgcggacaatatattgccggtgacgaccgtatcggttatcgtgaagaaaagaatgttcatcctgattcccgtacggatacctacgtggcgatgtgcctgtatgtggacaactggcgttggcagggagtacctttttatatccgtaccggcaagcagatgcctaccaaggtgaccgaaattgtgattcatttcaaaccggcccctatgcagatgtttcaaatgaaggagggcttgtacaaaggcgaggaactgattatccgtattcagcccgacgagggaattcttcagcgcatagccatgaaagaacctggtgccggtttctatatgggaaccatggagatggatttcagctatgaccagcacgatcaggaaacgggggatgcgtacgtacgcctgttggaagacagtctggcgggtgatcctacactttttacccgttccgatgccgtggacgagagctggacttactttgacaagattctggattattggaagaagcatcccgaaactcctctttatgggtatcctgcaggaacatggggaccgaaagaagcggatgtgttgatcaaccgcagtcatgccgaatggacaaacccgtgcaagaatctgacacattccaatttatactgtaaattgtaagtcgtcatctgtgaatagtaaatttaaacagcaaactctgagtaataaatagtgaataagatgattgaccataacttgtatgcgtcgcctgtacaagcgtcgcaagccttgataactcatatattggaagcgatggataaagagcctgaacggccttttaccattgctctttccggaggaactactcctgccacactttttgaggtttgggagcgtgaatatgccgcatataccccttggccccgtatttatttctattgggtggacgagcgttgcgtgccacctggcgatgatcagagcaactttggcctggcccatcgtctgctgcttggcaaggtaggtattcctgccagtcattactaccgtattgtgggtgagggcgctcccgaagaagaagcccaacagtattcttccatagtcaagaccaccgttccgaccatggacggtgtgcctgtttttgattttgtattattagggataggagaggacgggcatacatcatccattttccccgaccatcaggaacttcttaccgccggggaaccgtatgaggtgtccgtcaatccttataataaaacagtgcgtatatgcatgacgggacgtcctttgatagaagcccggcatacctgttttctggtgacgggcgagaacaaatgcagtattctgaaagaaatacttgataaaaataaggaagaggtctatccggcatcctatatctggcatcatgcacgtaatccgcaactgtatgcatcacttgtatcataatatttcttttagatgaagagtttaaacgaaaataactttctagatgggaaatgaatcaactatggacgctatgtgtcctatagatataaaaaaaggagcaacgccttgctccaacctttgttaaccttaaatctaatactatgaaaaacacaatgcaaaagtacggatatttcggaaatttgcaagatattctcttcattttataggttgaaacaatgttatttaacatagaaaggtatcctgtttacagctatttgcaaaacaggatgccttcactataatccattaagactctttaataggcgtgtccgtcttgttccagttcctttgcggtaatgggcttgcggtctatggcacgccaagcataaatgatataggccagaacgaaaggtaccagaatggaaacgtatgccatggtgcgtagggtaaactcgctggagcaactgttggccaaagtcagcgaactttgtaaatcggctgtagacgggtagtaagctgtattattatatcctgcgcaaagtaataaagctaatacagtgagcacgacaccgggaccggcaaaccagataccattggtggcagtcttgctgaatacagcttttccaatgccccaaagaaccccgaccactccgatgaggaacaataccagcaataggggcatatccatcagattgaggaaatacttgtaaggttccatataaatttcctttgtttcgggatttacagcgaaaccgtcggctaataaagtgcggataacgaaagccagaaacaggataaggaaaggaatcgcatcggttataagctgacggcggcaacggggaatcaagtctttatcccggatgttattgataaaataaagattacccaaaagacgggccaggaagaatacggcgaatcccaagaccagattccaaggattagtcagcgcatccagtccgtgccatccgttggcccaactgctgatgacaggcatcagttcattgcccatgttgcctttattaaccaggaaattggagccggtaaagaaagtagccacggctcctcccagcaacaacggacccacaatgccatttataaccagaaaccattggtaagtgcgtttgcccagcagattgcccagcttggattggaactcgtatgagacagcctgcaatacgaaactgaaaagaataatcatccacaaccagtaagcaccgccgaagctggtactgtagaacagcgggaaagaagcgaagaaagcgcccccgaaagtaactaaagtggtaaaagtaaactcccacttgcgtcctgtggagtttaccagcaaggcacgttcttcgtcattgcgtcccagcgtgaacaataaggaattaccaccctgtacaaagagcaggaacaccaacagggctcccagtaacgataccaggaaccaccaataattttgtaaaaatatatagtccataatgttctaatttaaaaatggagaattgaatattgaaagatagaactgaagaaaccttagttctcaattcttgattccctccggccctttcttgatagccttcagcataatacctatttctgcaaagagcagaacggtgaacaacagaaggaaaataaagaaagtaagttgtacagaccctgtctgtaacttggagatggctgctcctacgggcagcatatcctgtatagcccatggctggcgccctacctcggctaccacccagcctgcctgactaccgatgtaggctaacggaatagtccacaaagccacccgttgcagccatcgcatatcggccagtttctcttttttcgatgcaatcaatacgatgataaagaacaggatgaaataacctcccagtcccaccatgatccggaatgaccagaaagtaagttccacattaggaaccagatgggtggggtccttgatatatccgtaaccaaaatatttcacgttttcgtccaatgtcttgcgagctacggcggcgcttgcttcgtcacctgccttatgcgctttgcggaatgcatccagagcggcgatggcaatctgtccgcgtttaattttctcttcggccgataaagccgttgtaccgtcgggcatctgataaccaccttccagcagattgttgatacccggtacatagccgtctatgtcgtgagtggcaagaatggaaagcattttggggattttcaaatctcctacaatggtgaagggcactccgtttccaccatcgtgtaatccttcggcggcggccattttcataggctgcactttggctacctgtactcccgaaatatcacccgtccatgcagtgacgagggaagcgaacagacctacggcggcggcaactttaatgctgctcagagcgaactccttctgacggttgcgcagtaaataccaacaacttattcctactacaaaaacggctcccagtatccagctgcttaacactgtgtggaagaacttggcgacagccatgggagagagggcgacagctgcaaagtccaccatttcatttcttactgtttcgggattgaaagccatccctacaggatattgcatccaggcattggcgaccagaatccaccaggcggagatcgttgctcccagtccggtgagccaggtggatgccaggtggaaacgcttgctcactttgttccagccgaagaacataacggcaatgaaagtggcttccataaaaaatgccaggattccttcgatggccagtggggctccgaaaatatctcccacaaaccaggaatagttactccagttggttccgaactcaaattccagaatcagaccggtggcgacacctacggcgaaattgattccaaacagtttcatccagaacttggctgtgttcttccagaattccttacctgttgtcacataaaaggtctccatgagtcccattatcacagccaatcccaaagtgagaggcacgaaaagccagtgatacatggccgtcaaagcaaactgcgctcttgaccagtcaattaacgaagtgtcaatgttttcaaacataactttctgatttatttaaatgtttatggatttgcccgttctattaactcttcacctacatactgttgtttctcttccgttgtcttgccgccaaggaaggaggggaaaaagaaaagtttcagaataaagaacatgatgaataatttgataagaataatcgcccagagggtacgtcccaaggtcatctcgcgaaagccgtcgcgatagaatatccagatgcgtgttaacaaagaatcattcataaatttatcttaaagttgtaataattacaaagaaaaacactttatcggtaaaaagcaagtttttgtccatagaaatcttccgcaaatctatatttattgctaaaaatatcacggtcctctacttttgtatcaacaaattaaatagtaaaaaggatgagacaacgagtagtatatttcgcaatgattttggccgcggttacttcggtttccgcccaagaagccaaaaaatggacgctggacgactgcattgactatgcattggagaaaaatatccaattgcagcaggataaaatctcattggaagagagctcggtagacgtgaaaaccgccaaagccgccctctttcccagtctgtcgttcagcacaggacagaatgtgacgaaccgtccgtatcaggaaaccagtaacacggtaagcggaacggagatcatcagtagtgatagtaaaaccacttataatggaaactatggtctgaacgcgcagtggaccttgtggaacggtaacaaacgcttgaatacgatcaagcagaggagaactagtcagcagatagcagggcttgccgtaaccgaaacggagaactctctgcaagagcagattgcacaaattttcatccagatactttatgccgacgagtcggtgaagattaaccggaataccttacaggtgagccaggccacatacgacaggggcaaagagctctttcaggaagggagtatttcgaaggccgatttggcgcagctggaatcacaggtaagcagtgacaaatatcagttggtgacctctgaaagttctttgcgcgactataaattgcagttgaagcagttgttggaactggacggtacggaagaaatggatttggttcttcccgaactggccgatgagcatgtcttgcaaccgctgcctgctcaggaggatgtttatcagcaggctttggcatcacgtccggaaatccaaagcagcaagttgagcatcgagaattccaaactggatatatcagtggctaaagccggctatctccctaccatcagtctgagtgcatctacggggagtatgacaaacagtgccagtgacaatagctggagcaaacaaatgaagtatggctggaacaatatgataggggtgaacataaacatcccgatttttgataaccgccagaataaaagtgccgtacagaaggcacgcttgcaatatgacagtagtctgctcgatttgataaacaagcaaaaggaactctataagaatatagaaagtctgtggctggacgctactaacgctcaagagcaatatgcggcggccgaaagcaaactgaaaagtagccaggccagttacgagatggtcagcgagcagttcaatttgggaatgaagaataccgtagagttgcttaccgagaaaaataacctgctcagtgcacagcagcaacgtatccaggccaaatatatggctatcctggaccggactttactgaacttctatgcaggtcaggatataaaattataatcataacgctatacatattatattatggaaaagaagaaaattatccttactacagcggtagccgtagtggtcgtggcaggcggtttctggatgcttggcggaccggaggggaaaagtacggtcgatttcgcaacggaagctgtaaccaaaggcaatgtcagcaatttcatcactgctaccggaaccatagagccggtgacagaggtggaagtgggtacgcaggtatccggtatcattgataagatttatgtggattacaactccgtggtaaagaaaggagaattgatagccgagatggataaagtgacattgcaaagtgaacttcagtcggcaaaggccacctatgacggcaataaggcagagtacgactatcagaagaaattatacgaccgtaaccgtaagctgcacgagaagcaattaatcagcgatacggattatgaagaaacggtttataatttccaacgtgcccaaagtgcattggagcaaagcaaggcggctctggcaaaggctgagcgtaacctgtcatacgcaaccatcacctcgcccattgatggagtggtgaccagccgtgatgtggaagaaggacagaccgtagcatccggtttcgagactccgacactgttcaccatcgctgccgacttgaccaagatgcaggtggtggccgatgtggatgaagccgatattgccggggtggaggaaggagcccgtgtaacctttaccgtggatgcttatcccgacgatgtgttcgaaggagtagtcagacagattcgtttggggagcacgaacagcacgagcagcagctcttcaacaaccaccagcaccactgtagttacttatgaggtagtgataacagctgataatcccgatttgaaactgaaaccgcgtcttaccgccaacgctaccatttatacattgaccaaggataatgtgttgaccgttcccaacaaggctttgcgctttactcccaacaaggacatagtgggaggccgtaagataaacgattgccagagcagtcataaagtgtggacactggataacaatacctttaccgcccatcctgtaaaaataggtattactgatggcagcaagacagagattgtgagtggcatcactgaaaatacaccggtagtgacagaaacggtagtgaaaggtgctatgcctggaatggaagaaccgtctgccggagaaggtgaaagaagtccgttcatgccaggccctccgggaagcaataagaaaaagaacaagtaataaaaggtaatgcttccgtttacattgaaagaataaatcacatgaaaaagataatcgaattacaaaatataaaacggaacttccaggtaggcgatgaaaccgtccacgccctgcgtggcatctcttttaccatctacgagggagagtttgttacgatcatgggtacttccggttccggcaagtccactctgctgaatactttgggatgtcttgatacccctaccagtggtgaatacctgttggatggtgtgtccgtgcgtaccatgagcaaacctcagagggctgtgttgcgcaatcgtaaaataggtttcgtatttcagaactataatctgttgcctaagacgactgccgtagagaatgtggagttgcccttgatgtataactcgtccgtatcggcttccgaaagacggaaacgtgccattgaatcactgatagctgtgggactgggtgaccgtctggaacataaatccaatcagatgtccggcggacagatgcaacgtgtggccattgcccgtgccttggtgaataatcctgccgttattttggctgatgaagcgaccggtaatctggatacccgtacctctttcgagattctggtacttttccaaaagttgcacgccgaaggccgtacgcttatttttgtcactcacaatcccgaaatagcccagtatagcagccgtaatatccgcttgcgtgacgggcatgtagtggaagataccgtcaatcctcagatcctttcggccgctgccgcactggctgccttgcccaagaatgacgaggactaaccataaaaaagaatcattatgaacggaacaaatctatttaaaatagctctccgggcccttgccaacaacaagctccgcgctttcctcaccatgttggggatcatcatcggtgtggcatcagtcattgctatgcttgccatcggtcagggctcgaaaaagagcatccagcaacaaatctcggagatggggtcaaacatgattatgattcatccgggagcagagatgcgtggaggggtccgccaagacccttcggccatgcagacactgaaactggaaaattatgaaaagttgagcgaagagtgtacttatctctccggcatcagtcccaacgtttcttcttcggggcaacttgttgcgggggccaacaactacccgtcttcggtgagtggtgtaagtatggattatcttaccatacgccagctcaccgtggaacagggggagatgtttaccgagaatgacatccgtacgtcagccaaggtctgtgtcatcggcaagaccattgtcgataatctttttcccgacggatcggatccgatagggaaagtgattcgttgtaaccaaattcctttccgggtaatcggtgtgctgaaatcaaaagggtataactcgatgggcatggaccaggacgatgtggtactggctccttatagcacggtgatgaaacgactgctggcacagacttacctaagtggaatttttgcttcggctctgacagaagaaatgaccgaggaagcagtagatgagataacgaccatcctgcgccgtgaacataagctgaaagaaacggacgctgacgactttaccatccgcacccagcaggaactgagcagtatgctcaacaccacaacggacctgatgaccactttgctggcttgtattgccggcatctctctggtagtcggaggtattggtatcatgaatatcatgtatgtgtctgtaacagaacgtacccgtgaaatcggtctgcgcatgtcggtcggggcacgaggggtcgatattctgagccagtttttgatagaggctatcctgatcagtattacgggtggcttgataggagtgattataggttgcggagccagctttatgattaaggcaatagcgcattggcctgtgtttatccaaccttggagcgtgttgctctcctttctggtatgtaccgttactggtgtgttcttcggatggtatccggcaaagaaggccgcagaccttgacccgatagacgctttgcgttatgaataagggcggaaaaggttttctgtatggagagaaatgccggaacatacgttcgggtttgcctccccacggttgtggagagcgctcctcataactatgggttgcgctctccataactgtgaagagcgcggcccatagctgtgggaagccaaacttgaacgtatgaataacagaataagagccgtagaaatcttatttctaacctaatctttcttatctttgcctatatgaaacaattattttcacagcgacgttttttggaactgagcatccatatcgtcagttggctgctcatatttggcttcccgttggtctttatggaccggggaagcggctttaacctggcccaattcttgcggcacagttgtgttcctctgtgctatttcgttatcttctatgtcaattacttgtggctggttccccgctatatgttcacggatgaaatgcgtaagtatattctgagcaatgccgtgctgatactctgcctgagtgtgcttcttcatgtatttctggaaagtataagtacgcctccgcctcctgaatttgcgcgtcatattccacctcgatggatattctatgcgcgggatatggggatgatgatattcgtcgccgggttgggtgcggccattcgtaccagtctgcgttggcgtcaggcggaagagcgtttgatggaagctgagaggcaaaagacggaagcggagctgaaaaacttgaagaaccagctgaaccctcattttctgctcaatacattaaataatatttatgccttgattgcttttaacagtgacaaggcgcaggaggcggtacaggaactgagcaaattgttgcggcatgtgctctatgacaatcagcagacttttgtcccacttgaaaaagaattggactttatccgtaattatgtagccttgatgcgtatccgtctgccacagcaggtagaagtaagtgtgaatttggaggcagactccggaggtgcgttgcagatcgctccccttattttcatatcactgatagaaaatgcgttcaagcatggtatcagccccacggtagacagttttatcaggatctctatctccgggcatacggatggtacggtgagatgtgagattcttaacagcaaccacccgaagtccggacaagataaaagcggaagcggggtggggctggaacaggtaagcaaacggctggaactgatttatccgggacattacgaatggataaaaggtgtcagtgaagacggacaggtatattcttctatattaaccatacagactaaaagcttatgatactgaattgcgctattgtcgatgacgaaccgctggctttggaattgctgagaagctatgtggaaaaaacttcttttctccggttggtagggaggtattccagcgcggtgcaagctatgacagaaattcctctccgcgaggaggtacatgtcttgttccttgatattcaaatgcccgagttgaacggtttggagttttcacgcatggtcagtcccgaaacaaggattatttttactactgcattcggacagtatgccttggatagttataaagtcaatgccttggactatttgttgaaacctatcagctatgtcgattttttgcaatcggtgaataaagcggtgcaatggtatgaactgaaacagaaggcagataatggtgttgatgctgatgaggcggatgattgtatatatgtaaaaagtgattataaattgctccgaattgctttagaccgaatactatatatagaagggttgaaggattatattaaaatacatgtggaggatgagccgaaagctatcttgtcacttgtcagtatgaaagctatggaagagaagcttccttctagtcgtttcattcgcgtacatcgctcgtttatagtgcaaaagagtaaaatcaaggtggttgaccgggggcggattgttttcggtaaggagtatattccgatttccgatagttataaacaggagttacagatgtacttaaatagtcattctgtttgaaaaagttgatatttgaacgataaaagttgatattttgtcgatatccttttgctaaaaagaaataatctttttatatttgcggcatagacaagggaagttgtgaaacttcttaatagaatagtttagttaagtctagtttagtttttgtgttgtaagtgctcccatcgtaagcgaacgaatgggagcacgttttttagatacctgtatgggagaagtgttctgtttctgcaacaaatccagagattggtttgttaatcatagtataaatagaaataattctccttatgaaaaaaataatccccatactgattgccatactcatctgttttggtgtaggctgtactgcttcttattttcagtcggaggccatactcaactggtatcctacattggacaaaccttctcttacaccacctgatatggcttttcccattgcttggagccttatctatctgtgcatgggaatttctatcgggttgatttggcatatgtggacaataagacgacaaatgattatcagattattcgggttccagctcttgtttaattttacatggagcattttcttcttttatctccggagtccgttgctaggttttgcaaacattttggtgctggatgtgcttgttgtttattatatgatagaaagttatccggtgaagaaatcttcggcatacctttttgttccttatcttttgtggttgattcttgccacttatcttaacggctatatattaatgtataattagaagactgtcactggctagttgaacgggaattatggggtacaagaaaaaatacctatttatagtgattgataaccctagtgattttccgtaactttgcggtcataaagagaaacaaaaaacataactatgtataaaacaagtaaatatactccgacggacaaaatgagttatcttatctgtgataactatacattgctacaggtaatgagccgttttgatctttcgttggggtttggagacaagactgtacaggaggtgtgccgtgaaaatggagtggattgtcgtactttccttgcggtggtgaacttcatgattgaagatagcgaccgaatggaggacgatgtgaaggacatttctatgccttcattgatgaattatttaaaacaggcacatcattatttccttgatttctgtctgcctactatacgtcgtaaactgatagaagctatagattgttccacggaaaatgaggttgcatttctcattttgaaattttttgatcagtatgccggagaagtgcgtaaacacatggattatgaagatatgaatgtgtttacctacgtagagaatctgatggcaggacgagaaacgggaggattccgtatctcacagtttgcccgcaggcatgatcagatagatgcgacactgactgagctaaaaaacatcattattaaatattatccggcaaaaggaaataaccatttgttgaacgccgtattattcgacatattcagttgtgaacaagatttggcatcccattgccgcgtagaggactacttgtttgtgcctgctgtacttaggctagaaaaggaggggaaatgaaacggacagaacctgtgcacgttgcggtggccgaaacgtcagtcattgtgcgtagcggacttgtggctgtgctgaagcgcatgcctgatcttacaatacagccggtggaaataacttctcttgaaggactgcagaattgtatgcagggacatcagccggatattctaattataaatcctactttcggaggatggtttaacgtggacgagtttaaatcgaactatccacaggcatctaccaagtgcgtttctttgctgtgttcagtcacagatacaaatttgttgaagggttacgatgagagtatagcgctgtatgatgacatcgaagttttaaataaaaagttagtagatctgatgaatcttggtgtggatgagacggatggcgaacaggaaacgttgagccagcgtgagaaagaaattatttgttgcgtggtacgtggaatgacaaataaggaaacggcggaaaaactgttcctctccattcatacggtgataactcaccgccggaatattgcgcgcaagctacagatacattcacctgccggattgactatttacgctatcgtaaataaactggttgaactaagcgaggtgaagatgaacttataatacctataaatagtgagtggaataagatagaatacctaaatgaagtgattgtggatgtggcctctaacctctatctttgcactataagttagtcatatagaaattacgtaaaccacaaagttagttattagttaaaagcactccctgcgaagtgattcgcggggagtgcttttttattagtaaggcttttacccacaatattatgtttttttacctattccgcttcattattcgttagaaatctcgttgttttcttaacaaatatcctctaactttgttatttagtataggacacatattaactaatgacaatgaaagtaggtttatttattccttgttatatcaatgcggtatatccgcaggtggggatagcctcgtacaagctgctgaaaagtctgggagtggacgtggattatcctctcaaccagacttgttgcggtcaaccgatggcgaatgcaggtttcgagaataaagcggtagatttagcccgccattttgacgaacagtttaagaattacgattatatagtaggtccttcggccagttgcgtcgtttttgtgcgtgataactacagtcgtttgttgaaagaagacaaacatcggtgcgccagcgaaggtaagatatatgatatctgtgagtttattcatgatatcgtcagaccttcttcgttgaaagccaagtttccacataaagtgagtctgcaaaacagttgtcatggagtgagattgatgaaactttcttctgccagcgaacttaatattccttatttcagcaaactgcgtgatttgctctctttggtagaaggagtggaagttgtggaaccggaacgtaaagacgaatgttgcggtttcggcggtatgtttgccgtagaggaagatgcggtttccgtgcagatggggcatgacaaggtgatgcgtcatatcgctaccggtgctgaatacattgtgggggccgacagttcgtgcctgatgcatcagaatggcatcattgcccgtgacaaacttcctatcaagacattgcacattgttgaaatcttagcggcaggattatgagtacgaaacattcaaaagcggctgcggagtttctgaaaaacaagaaacaggccgcatggcatgacgaaacactttggctggttagggcaaagcgtgacagactgagtaaagaagttcccgaatgggaggaattgcgtaatatggcatgtgctactaaactatatagtaacagccatttggatgaattattggtggagtttgaaaacaatgcgcgtgctaatggagcccatgtctattgggcaaaggacgcggatgagtattgtaatattgtctacaatattctgaaccaacacggagtgaagcattttataaaaagcaaatccatgttggccgaggaatgcgaactcaacccttttttggaaaacaaaggaattgaagtggtagaaagtgacttgggagagcgtatcttgcaattgatgcatctgaagccaagccatattgtattacccgctattcatatcaaacgtgaacaggtaggtgagcttttcgagcgagagatgggtacggagaaaggaaattttgaccctacttaccttacacatgcagcccggaagaatctccgtcagaaatttattcatgctgaggcggctatgacaggtgctaactttgctgtagcttctactggtgagattgtggtatgtaccaatgaaggaaatgcggatatgggtacttcccagcctaaattacagattgcagcttttggtatggaaaaaattgtgccggaccgtgaatctttaggagtgttcacccgcttgttggcccgttcggctacaggacaacccattactacatatacttctcattaccgaaagcctagagagggtggggagcttcacattattattgtagataacggacgtagtaagatattggccgaccaaaagcatatcaaaactttgaattgtatccgttgtggagcctgtatgaatacatgtcctgtatatagacgtagtggggggtactcttatacttattttattcccggccctatcgggattaacctgggaatgttgaaggcgccgttgcattattatgacaatgtgtcggcttgttctttgtgttattcctgttcgtttgtgtgtccggctaaggtggatttggcggagcagatctatctgtggcgtcaggatttggataaattgggtaaggcagaccggatgaaaagggtaatgtccggtggcatggaattcatgatgaatcgccctttgatattcaatatggcattaaaatgggcgccattggtaaacggaatgccacgttttcttatctataacggattgaatgactggggaaaagggcgtgagatgccgaaatttgctaaggagagtttcaatgaaatgtggaagaaaggtaaagtgaagtaattatgagcagcagagaagatatattgcagagcatccggcgtgctacacatgtaaaatatgagaaaccggatttaaagccattggaagatatggcattaacttatcccagtaaggtggaacagttttatctcatcatgaagcaggtaggaggggaagccattcttttggagaaagaggaggacgtgaatgatttcattaaaaaggcttatcctggagccaaacgcatcgcttctaatctgaagactattacatgtgcgacatttaatcccgatgatgtggaagaccctgcagaactgaatgggacggatttggccgttatagatggaaagattggggttgcggagaatggtgcggtatggatagaacaggatgtaaagcagcgtgccatttattttattgccgaaaaattggttattcttctaaacaagaataagattgtgaacaatatgcatgaagcatataaactgattgatacaggcgaatatggcttcggaacctttatttccggtccgtcaaagacggctgatattgagcaggctttggtaatgggtgctcatggggcacgtgatgtgatggtggtgctgatataagtgtattgtttcttatatataaaaaggagatgaggcgaaaattatagggctcatctccttttattttatagaatattattagaatattttgccacacaaacggaacttaagtaccggatagacagtaagtttgtctatgatatcagtgaaatcattatcagcttctgctgttaaatcagacaaatctccgttattggtatatactttgggagtgttatggaattgcacacccatttcgaacatgaagccaattcgtttcttaggaatcgctcttccgaaacctagtccaagataaggacggaatgaagaaaccttcaaaccaccagatatatttccgttctgatctacaggtatacgatagtttccgatttcaatacctacttcttgtccttctttaatcagttctgccaactcatcgctgtgccctttaatcttgatgagttttcctcctccgaaataagcaccaccgcatacaaaaaaactggatgatttgaaaggatatacattcagcaatatttcaccggcagtacgtcccattcctccttctacatctatgctggtaggtatatttccttcataagaaccttcaatatctacatccacatctgtagaataagtaaagttcggcataaaagaaactcctgcacgtacagccaagtaacttcctataggactggctacatcaatacctatacctgtggtacttgcactgacgcctacagctaatgaactaaaaataccaggactttcagaagagtcttgagcagccatctgatggttgcctacacacataatgtaagttaggcagagtaatagtagtcttttcatatttataataatttatgttttagatgcgaaattagataattttattgaaatgatgaaatatttccattgatttatagcaacatcttgtcttcagtatatttttaatttaaatatacggtattgaaatattcaccaaataacgttttggctgtttccaattgttttagagtattttcttttattccgtttagtttgtattcttttcccatggcttcatatttgtgtacgcctaatgtatgataaggtagtatttctactctttgaatcatttgataattcttgaagtgctctcctaatgcccgtatatcttcctcaaaggaactatagcctggaactaatacatagcgcaaccaaaaaggctttccgtttttttcaagccatccggcggtacgtatggtttgttcgttgctgcgttctgtcagttgccgatggcgcacattattaaattccttgatgtctaataatacgaggtctgtccattgtagcagttcctttacttcttcattccatatactgccgttggtatctatacagatgtggatgctttgttcttttaatcgctggattaacggaatcagtgcttttgcttgcaatgtaggctcgccgccgctgaaagtcacacctccttttttaccgaaaaaagctttttggctgacggccatacgcacaatttcgtctattgttgtttccgtactttcacctttggtgtcaattgtgtcggggttggcacaatagaggcatcggaaattgcatccttgtaaaaatacgactaagcgtaaaccgggaccgtcaaacgtccccattgactcgtaagaatggactctgatcataatggtttgtctttaaactggtaagggcaggtttaaaacccgcccctacgatgaatgtatatgtgatgttacattctttcgtggaaagaacggctgattacttccagctgatgttcacggctcaatttgatgaagtttacggcataacctgatacgcggatggttagttgcgggtatttttcaggatgttccattgcatcttccaacatttcacggttcagcacatttacattcagatgatgtgctcctttggtgaaataaccgtccatcatggttaccaggttctctatacgggtttcctggtctacccctagtgattttggtacgatagagaacgtgttactgatgccgtcctgggcatcacgatagcgtagtttggctacagaactcaatgaggcgatggcaccgttcttgtcacgtccgtgcatcgggttggcacccggagcgaaagccactcctttggcacgaccatcaggagtggcacctgttttcttgccgtacattacattggaggtgatagtcagcagtgacagggtagggcgggcatttttgtataccggatgtttctttaattcttcactgaagaaataaaccaaatctacccctaagtggtctacgcggtcatcatcattaccgaagcaaggatatgcattttcaatatcaaagccttcggtcaaacctatatcattacgtttggcacgtactttgccgtatttgatggcagacaatgagtcaatggcaatggacagaccggctacgccatatgccaaattgatacgtggatcggtatcaatgaatgccatttgagccttttcataataatatttatcgtgcatatagtgaatgatattcatcgcatcattatacacacgtgcaatttgcattaatactttcttataattagaccatacttcttcaaagttcagcaagtcccctgtcaatacaggaatatctttcaccattacagttcctgtattctcacaacgtccgccattgatagccagcaatagggctttagccagattgcaacgtgctccgaagaactggatttgtttgccgatagcctgataagaaacgcagcaggcgataccataatcatcacagttacgtacttcgcgcatcagcgtgtcgttttcgtattgtatagaagaagtgtcgatagaaacttgtgcacagaattctttgaaaccttccggcaattccggactccacagtacagtcatattaggttcgggtgacggacccagattgtatagtgtctgcaagaaacggaaggaagtttttgtaaccttggtacgtccgtcgttgaagcgtccgccgatagactcggttacccaggtgggatcacctgcaaagatatcgttgtatgattgcatacgcagatgacggaccatacgcaacttgataatgaactggtctaccagttcctgcgcaaatgactcgtcaattttaccatgatccaaatcatattgaatatagatatccaggaatgaagaaacgttgcccaatgacatagctgctccatcttgttctttcacggcagcaagatatgccatataaacccactgaacagcttcttgtgcattagtagcgggacgacccaagtcgagtccgtaatattcacccaatatctttatttctttcagtgctttgatttgttcggctacttcttcgcgcaggcggatacgggcatcggtcatcggactggtgatattgtgcaaatcttcttgttttgcttcaatcagtcggtcgataccatacagtgccaaacggcggtagtcaccgatgatacgcccgcgtgcataattatcgggcagaccggtcaggaaaccgagtgaacggaaagagcggatttcttcggtgtaagcatcaaatacgccatcattatgggttttgcgataatgagtaaagatatcctttactttttcatctacttccacaccgttttcatggcaggctttttctacgactttgataccaccataaggtttgatggcacggcgcaaaagttcatccgtttgaagacctacaatcagttcgttttcacggtcaatgtatcctgctttatgtgaggtgatggtagatactgttacattatcaagggaacgaactccgttattggcacgttcttcttctagtgccttgaggcattcgttccacacttttttagttcgctctgtggggcctgccagaaatgaggcatcgccctcataaggggtaatgttggtatgtacgaagtctgaaacattaatttccttactccacaatccatccttaaaaactttgttcatttccatactgttattccattattaagagatttagggctgcaaaggtactccttttttgtgagctatgcatcactattagtaggtataatgcgaatacttgtgcatttttaagtataaagtggtcaataaatgaaaaaacaataaggactctttataacaattccataaaaaataaagctaattggtgacaataaaccaattagcttctaaaagtagcggaaccgggaatcgaacccgagtttcagccgtgagagagctgcgtcctaggccactagacgataccgccatcagttagtcttaattctttttctaagacggtgcaaagttagaagtttgtttttaatctgcaaaataaaaaatgattttttttatgctattactattataaatcggaatttaatttctatgaagaagtatcatatgttttatgtagtaaaattgaaagtctaaaaagcacctttactcttcctcccgaaagccttgacagcaaactgttgaaaaatgaatataaaaaataagtcgtaaaattaatttacgacttattcgcggaagctgggggattcgaacccccggtacggttacccgtacgtcagtttagcaaactggtggtttcagccactcacccaaacttccttcttatcagaagcgttatctctcaaacgcggtgcaaagataaggggataaattgaaatatgcaaaccttttgctcttttttttagatatattttttgatggaaataataaggtgctgatagtgaagtgttaataggtggaattaatttttctcccaaaaatccaaacattctttagccacctttattggacaatggtgttttttaatatattcaatgctgtcggcggataattgagaaattttatttgtattggctaataaactctctagtttgttataaatgtcatttccttcggggcgtacgttgatgatagggcgaagtctgtcttcgcctaataagttgtaatgttcctcttctgcacctcccaccactacaattcctttgctcatggcgtataatgcatttaatcccggagaataagaataaagctgatctaacattacatcgcacccgtccataaaatgttcacattcatcatacggagtgaaaacggtttgtttgatttcgcatgcagatggatgtctgtaatataatttatagagggcgctataaagttcgtcttttcccttccattcttcacgatgatgttttagactgatatagaattttactttttctatttttttaaaagggatttgtgggtgaggcaatgattctatcgggaaaggaatgtatttggtttttccagagaaatagggttggtaggctaaataggattcgtaaagactggtgatgattccattacaattgttcgcgatgatacggtttaattttcctctgaatccatgcatccaatttataattgccattttgttgtcaatggtgtcacgaaaagtgccattggcataaaaatcattatatcggagagcgtttttatttaagcacatgtaaatccagtaaaaatcatattcaaaccctcctaaaaatatcttcttgttgttctttttaagatattggaatacgtactgaagcagttcgggctttaattctaaaaagtaagggttgacaagttgtaccacatcatatcctctgagttggggaagggttttcagtaaattgaacgtgtttttaagaactccccaacggattgatgaccggttgggatagagatagtcagagttgtttagccataaattgctgtgggataatacatcgactctatgtcccatatttcttaaggcttttgctaaagtccaatgtatattgctatactctcctattaataagattttcataaacagtcaatcattatttaattaaatagtttgtgcattggtagcaagtcgttttgctattcttatttttctatttaacaaacaagtgtaggctttagttcttattgtagggtgattttgcaataaaaaaggataatttgtcttctgttgtagctagtattgtctatgaaaattaaatctatcaaaaatatatcttcttgtattacagaaaaatgtgtgtagtggaatgattgaaaatgtatggtttgcaaaaagattttgtatttcaaaaaaatgaaaataagtccttcttcaattatgcatagcggtgagaaattgctaaaccttttcttttagaagattgttttcatacttatgtgaggtatggtgtccattttgatatggtcttttggggaatttattgagtaaagaatatttaagtgttaatgaaagaatataggttaagagttaaagaaaaaataatgaaggctgatttggcgacaatcaggagggaatatacaaagggtggtctcaaaaggagtgatcttcctgataatccacttgtcctttttacaaagtggctgcaagaagcgatagatgcggaggtaaatgagcctacggctatgttggtaggtactgtttctccggaagggaaaccggcaatacggactgtgttgttgaaagatttgcatgatggcaaatttattttttatactaactatggaagtcgcaagggtaaacatctggctcataacccatctatctctatatcgtttgtatggcatgaactggaaaggcaaattcatatagaaggtattgcggctaaagtatctccacaggaatcagatgaatattttagaaaaaggccttacaagagtcgtattggcgcccgtatttctcctcaaagcgaaccgatagaaagcaggatacaacttattcgtgattttgtgaaagaaaccacgcgctggatagggaaagagatagatcgccctgaatactggggaggctttgctgttatgcctgttcgtgttgaattctggcagggtagggtaaatcgtttgcatgatcgttttctctatatgcttcaatctgatggtgtttggaaaatagaaagactcgctccttaatcttcggaatagagaaataattccaggttctttttcaaactgagccgagaaaccttttgaatgtaggtgtaaataggaatacttttgagtaattgaaggcgttgctttttatatattatatgcaaaagggaataatccatagattattcccttttgcatatttatttttgaagtgatgaggaggttcctggcggattcgaaccgccgtacacggttttgcagaccgctgactaagccactcatccaaggaaccttattgttatcaatctttgtttctcgattgcggttgcaaaggtacgacattttttttaatctgcaaatattttgctatttttttcacacttttctgcatttttttcgcaaccgcactttggcttgttgtgcatagacttcatggcgcaatcagaattacagcattcacacggattgctattgttctttatgcgcttgaaatactgaaagatacgtatacttatccatattgtacagaggcatacgattgcaataactataatttgttgtaattccatgcttgataaacaaataattttaggtttattaaatgataatacttcctatttggaatacggtaaatgcaacaagccaagccaatccagtggtgtatcctgctgcgaatatggcccatttccaactgccggattcttgcttgattgctgcgaaagtggcaatacaggggaagtagatcaatacaaacaacatgtaagctaatgcaaccagtggagtaatgggaatacggtcagaaagattcacattttccacatctccttcatttgtgtataatactcctagtgtacttactaccaattctttagcgcctacacctgaaataagtccgattcctaacttccagtcaaatcctagcggtttgataacaggctctattgctttgcctatttgtccgatatatgaattttcttgttgttcggctacgctttcatgagtatcatgccgtggataataccctagaaaccaaataataattgaggcaatcatgataatgcctcccatctttttcagatattgtgctcctttttcccatgtatgacgcatgatacttttagaagtaggcatacgatagggggggagttccatcacaaatggagaatcttctcctttcactagaaatttactgaaaatacgggccattattactgctaataaaatacctgctgtatagatacaaagtaacataaagctggcgcagttagggaaaaaagcacctatcataactaaatatatgggaagacgcgcactacaggacattaaaggattcaccaacatggtgattagtctggactttcgatcttctatagtacgtgttgccattatggcaggtacattacaaccgaatcccataatcagtgggataaaggacttgccatgcagtcccatccggtgcattattttatccatgataaatgcggcgcgtgccatataccccgaatcttccaatatagaaataaaaaagtataatatgaggatattcggcaggaaaacgataacaccgcccactccaccgataataccatctatcagtaagtctttcaaaggaccttcagccatattgtttcgtatcaggttgcctaattggtctactagccattcaataccttgcataggatagtcacccaaaacaaaggttccctcaaacatgatataaagaaacaggaaaaaaataggatatccccaaatgcgatgtgtcacaatactgtctatcacgcgggtcgtttgttctttttccaaatgattgtcggtgaatgtttctttcaaagctccggtgataaaaccatatttagcatccgtaatagcttgctcgctgtcttcgttcatcactttacggatacgtaatgtttccttgttgcgtatcgctatgatttctttgccattaggcagtgtagagatgaaattttctatttccctatcgttttccagtaatttgatggataggaagcgggtggaatatttatggcgtatgtcttcgttttgactgattgctttcttgacttcttcgatactgcgctccagttcaggaccgtggttaatatgaatatgacgcatatatccgcgtgggcgggcatcttcctcttctttgtggcttccgaattcgtggtcgggtacgtaggttttgtgccagtctctcaggtcttccagaatttcagaacgtatttcgcccttttgtgacaggaaatctcctccttcgtaaataccgatgataacatggaacagtttgtctacaccttctccccgtcggcagacagtaggtaccataggcaccccgatcagctggcttaattgggtataatccaatttatttccgctggcttccagctcatcgtacatattcaaggcgataaccatacgcacattcatatcaatcaattgggtggtaagatagaaattacgttccaagttagaagagtctaccacattgataattacatccggagtttcttcaatgatatgtttgcgtacataaagttcttccggagtataggctgaaagagaataggttccgggtaaatctacaatacggaaatgataaccttggaagtcgaaaaaaccttccttggcatctactgtcacaccactgtagtttcctacatgttcgtgggcgccagatgcaatattgaatagcgaagtctttccacaattgggattacctactaaggctacattgattgtacggcgtttgccttttgccagtgccaccagttctgattcgggcacgggtacatcttctgttatggaaccatggtaagggttttgcatcgtgcgtgcttcctgctcgcttaccacctcaatcatatctgcctcttgtcttcggagggagatctcgtaacctagtagtctgtattttatagggtctttcaaaggggcgttcaagattacctctacggtttttcctttaataaaacccatttcaacgattcgcttgcggaaaccaccgtggcctaaaaccttgactattacgcctttttctcctgttcttaattcggataaacgcattttgttttaaattttttgcaaagataagttattacttagaagtatgcaaattatttagattgtttttaaataaagaacgggcactttgtttttgtcttgcagaactcttatctttgtgccatgtttcattggaatattcagaagtatatagaggagaaacaacttttcaccttgcatgataaggtgttagtggcattgagtggcggggcagattcggtagctttgttgcgtgtcttgcttgttttagggtatcattgtgaggctgcccattgtaattttcaccttcgtggtgaggaatccgatagagatgaaaggtttgtcaatgagttgtgtaaaggattaggagtggctttgcatgttactcattttgatacggtcacttatgcttcgaggcatcatgtttctattgagatggcggctcgcgaaatgcgctatgattggttcgaacaactgcgtaaggagagggggggggctgttattgccgtagcccatcaccgggacgatagtgtggaaacttttttattgaatttgatacgtggcgcgggaatcaatggcttgaaaggtattagtccgcataacggctgcattgtacggcctttgttggaggtgagccgtcaggatattttggattatttgcgttgtttgcgtcaaggttatgttacagacagtaccaatttgcaagatgaatatatgcgtaataaaatccgtctgaatattcttccgatgttgcgtgagctgaatccttctgtcagtgaaagtatagctgaaacatcaaggcgtctgactgatgtttctcttatatataataaggagatagaggcaggaaaagaaagggtgatggaaaagtccggtcatattcttatttctcgtttgatggaagagagtgctccggcggctttgctgtttgagattcttcatccgttaggtttcaattctgtccaggcaggagatgtattccgcagtttgtctgcccagtcgggaaaaaggtttgtttctgccggatgggaggtactgcgcgacaggacggagttgattattcgcaggaggaagctggcggatgaggaagtggaggaaaatgtgcccccgttccggcttgcaatggaaacgcaggaaataatgccagactttgtcatccctaagaataaggatacggcctgtttggatgcagacaaggtggtgctacctctcacggtgcgtaaatggcggcagggggataaatttgttcctttcggaatgaaagggaaaaagaagatcagcgattatctgacagatcgtaagttttctcttttccagaaagaaaatcaatatgtggtttgctctgcaggccagattgtatggctggtaggagagcgtagcgatgaccgtttccgggtgacggaagatacgaaacgggtacttattatacagcagttgtgggataagtagaattttttcctttcctgctttttcatgaatggcagggaatgctccctgaaatcttgtagcaaaaatccgcgaatcatgcaacaagatttcagaaatcacgtagcaagattcgcggattttggatggagctttccggtattatttgcaatacttctgtatcagtccgtctaccacttcatcgcccagttcttttgctttggcaaagtttgcacaggcttctttgtttttctttaattgtatctggcagtatcccagcatgcggtatgcggctgcggctttcgggtctaaagagatagccttttccaatgcttctattgcttcgttatgttgccctacacgtagatgcaccgaacctttttccacccacatggctacatcctcaggagtcatttctactgctttattaatgtcattgatagcttgctgatacatcttacattgtatttccgcctgttcgcgttgcagataaaaggcggctgtaacccgtccaccgatagcatcataaaaagtatcataatctattaccgcttcacggtatttacctgtctgggtttttatttctgcccgttcatagaaataaggagcagcttccgatgtataaggcttggtgaaacgtgccacagcactatccatcaaggcaataacctcgttcatatctgttccttcaatcagttgtttggttttggctgccgagtaaaatgtagcggcagaggctatggaagactggttcactttctcataagcggcgtatgcctcaggatatttcttcatagcaaacagaatatctccctccaattgtgtgtaaatgggttggttgtcggcttgcatggcatcatgaatgatggagagagctttgtcgtaactccagtcaccgtatggtttcttgtcacctaaagagatgatgtacgaataaattaatttagcgatattatattgcgtctcactcttgttggtagtcacttccagtgctttcttcaggtcagcatctgccaaagcgttgtgttcatcatcactaaatcccatataagtagtggcacggcgtatatatccgtctgcgctgttgggatattgttccagaaaatcgtttaatgtggtgatatattcgttctgattttgttgtgaagatgccatgaacaggtacaccagtgcttggtcttctgtttcgggcagtccttttttgatgccgattttattcagtgacatgtcgttcaaagaaagggcggtgatgctcagtgaggcaccgtatgtagctccgatggcataactttccttggcctcatccgatgcgtttttttggattaaacctaatacttctccattggcattcataatagggcaacttacggttttttcgttggttgtcattgccagtgtataataatatgccttgtcgccaatggtgtctactttggtgacggtccctgtctggcaggttgccgctttttgagtcgagtagggtagcagatagactgtttcacctactgatgccggctgtgatgccgattttaatgctatggtctttttatcggcttcagtattaaattttacgatgtcatacatggagttggctcccaagatacgcaatacaggtaattctttactgtccgcgttaatgattactgcgcgttcggctccttcaaacagggtgtaatcagataatgccgttccattttcattgatatagaatccatttcctgtattcttgattttgttatctttatcgtatgtaacgatggaaaaaacggcttttttagctttgtcggcccactttggggttgcttgtgcatagcttagctgggtagctatgccgcatgccaatatcaaaagtactttcttcatgatatagttaattgtttgttaacgatgatacggtattttataaagcggatgccgtcttgtcttctgtgaagccgcgttgttttacagcttcataaatcagaatacctgcggcaaccgatacgttcagtgattctattttacccattaacggtattttgatccattcatcgcacagagaaaggtgctcgtagggaacacctgtgtcctcggctcccataatgatacatacagggtctttatagtttgctttggtgtaatcataatcccctttttccgtagctgctacaatcttgaatccgcagtctttcagatacttgatggtattagtcaaactttgttcgcgacatacgggaagagtgtgcagagctcctgcagatgttttcattgcgtcagcattgacactgacactgtttttcgagggaataataatggcatctgcaccggcacattcgcaggtacgggcaatggctccgaagttacgtacatcggtaattccatccagcatgacgaataagggtgtttttccttcttcaaacaagaaaggtaccagattttctgttttctggtaggtgacagaggagatgaatgctacaactccctgatggtttttccgggtgatacggttaatacgctccacgggtacacgctgaacagggatgagggtatttttcaaacaggcaaacagttctttggacagttcgctctgtatatctttcttcaccaatactttatctatctctcttccggcttgtatggcttcaataacagcgcgtacaccgaaaatcatttcattcttttctaacatgtctaattagtggttaatggttagtgacaggtggttagtggtaagtgattaatgtctgcaatatgacagtccataaatcacttggcactagccacttatcagcgcctttgcattgttcagggctgcctctgtcaaggtagctccacttagcatattggctatttcttttactctttcttcatcagtcaagcggcggatgtagctgttggtgcctgtttccgtatcttccttatatactttataatgagtgatgccgcgtgctgcaatttggggcagatgggtgatactgatgacctgacggttttgttttcccatttcctgcatgatgagtgccattttctcggcgatggaaccggaaactccagtgtctatttcatcaaagatgatagtaggcagtttcacagctccggctatcatggctttcagcgaaagcatgacacgggcaatctcaccgcccgatgctacggaagctacattttgtaatgttccattcttgttggccgaaaacaggaatgtcacactgtccatccctttactgtccggttccttgcgcggattcagttccaccacaaagcgcacattgggcataccgagaggaaccagcaggctttgcatctgtttctcaatgttcttacccgattgggaacggagctttgtcagcacagcggcttgctttatcactttgtcatatagcgtttctttttgggcggtaagttctgctatacggtcgtcaaaagaagtgatggcgttcagcttctcatggtagtcggtttgcacagctatcaattcctctattgtttgtacgtgatgtttctgttgcagagagtagattaagttcaggcgttcatttacataatccagacgggtggggttgaactccacttcctcctgtgcgcctgctatttcatgcgacagatctttcagctctatgtaacaactgtctaaacgccctatccattcctgggcacgtgtgtacactctcgctatgttatgcagggtttgcatacattctttggtagcggacaacaggctggcatcttccgaagacattatttggtccactttgtacaagcccgcttttatttcttcggcatgactcaaagtttcggcttcctgttccagttcggtttgttctccttcctgaaggtttgcatcatccagctgttccagttggaaccggatgtaatcttcatccttccggctttgctcggcttgtgttatgaaatcggccagctgtttgcatacgttcttgtactcggtataaatatttttgtatgctgaaagttcgttgtcattttgtgccaggatatccaatacattcaattggaatccctcactgttgagcaacaggttttgatgctggctatgtacatctatcagtttctcgcccagttccttcatctgcgccaatgaggccggcgtgtcgtttatgaatgcgcggcttttgcccgatgcatataactcgcggcggataatacattcattcggatcatattccaaatctctttgggtaaagaaaggctccatctgataggcggagatgttgaaacgtgcttctacaatacatttattggcgcctttcttgatagctttgatatcggcccgttgtcccagtaacaagccgatagcgcctagaataatcgatttaccggcgccggtctctccggtgatgacagagaaaccgggggtgaaactgatatccaatgtatcaatcaatgcataattttgtatatagatagattgcagcatattcttgctcctttttaataatttgctggtttgtcaatttgctaatttgttgcgctgtattccgcatggtaattagcacattgacaacgtggcaaattaagaaattatttattatttaccagtctgtcaataatatctcttgctacttcctgtttgcttttcagcggataaggagttactccttgacggtctataatcgttattttgttggtatcacaacgaaaccctgctccttggtcgttcaatgagttcagtacaatgaaatcaaggttcttacgttccagttttccttgtgcattttttgtttcatcatttgtttccaaagcaaatcccactaatatttgtccgtcctttttccggcttcccagtgcggcggcaatgtcttgtgtgggtttcagttgcagtattaaattatctttctctcttttgattttatgaccggatacggtttccggggtaaagtcggccactgccgcacacaggatgccagccgaagctgtaggaaactcgcggatggcggcttcgtacatttctccagcactttccacatctatgcggcggatgttagggtgatgggcctgaatcgttaccggtccgctgattagtgatacttccgctccacgtgaagcgcattcttcggcaagtgcgaatcccatttttcctgaagaataattgccgataaagcgtaccggatctattttttcgtaagttggaccggcggtaatgactactttctttccggccatgtcttgttgtttggcaaagaaagcttccagtatttccactattttttccggttcttccattctgccttttcctaccagatggcttgctagctccccttctgccggttctataatgtgatttccgtaagaacggagcgtgtccagattcttccgggtggaagggtgtgcgaacatatccagatccattgccggagctacgaatacgggagctttcattgacagataagtcgtgatcagcatattgtccgctattccgttggccattttaccaatagtggatgcggtagccggagcgataatcatggcatccgcccatagtcccaaatcaacgtgactgttccatgttccgtcacgttgagcaaaaaactcgctgataacaggtttacttgttaatgcagataaagtgataggtgtgatgaattctttgcctgcgggggtaatcacaacttgtacttccgctcccttcttaataagtccgcgaatgagtatagccgctttataggcggctatacttccggttatacctagtacgattttttttcctttcatactcatttcatcattcccgattcacgtagtctgatttttgtcagtacgtttttcgtgttcagcgtaaaatcaccgttcagtatccagctgtagtagcccggatctttttgtaacacttcgctgacagacattcctttgtatttcccaaaattaaatacttccacgcctttgtcatcataaacaatgcgtccggcgaaatctacattcttgttgaaacttgagtattcggctagaaatgccatatcattttgcagttcttccggatagcggtccaattgggatttcagtacttcgtatgtggcgcgtgtgtcggcttcggctgtatgggcatcttccagattcttgccgcaatagaatttataggcggcagacagggtacgctgttccagtttgtgataaattacctgcacgtcaatgaattttcgtttcatcatgtcaatgtctactcctgcgcgcaggaactcctcagccaaaaccggaatgtcgaaacgattggaattgaaaccggccaggtcacatccctcaatgtcccgggctatctcttttgccacttccttgaaggtagggcagtctgccacatctgcgtcataaataccgtggatagcagaggattgttcgggaatgtgcatttccggattgatacgcatggtcttcgtttcttcgttgccgtttggatacaccttcagatagcatatttccactattctgtctgtgtttatatttgttcccgttgtttccaaatcgaaaaaaacaataggattcttcaagttcaatttcattttcagcttgtattatatattgtttttccaccacatggtggcgtgtcgtttttagtcgttcagcatcataggcatcagcagcatcagcaggtcttcgttctcttcctgctctacagggacaataacgcccgcacgtgaaggatcagccagttcgaaaagtatttcctgtgctgagatattgtttaaaatatcaatcaggaatgttgatttaaagccgatgctcatgggacttcctgtatattggcaagtcagtgtttcttctgctgaggtggagaaatcaatgtcttgtgcggagatctggatctgattttcactgaggcggagttttatcaaactgcttgcttgcgatgagaatacagatacacggcggagcgcactgatcagcgtcatgcggtcaatggtggccttgtgaggattatcctgcggaattactgagttatagtttggatagcgtccttcgataagacggcatatcatactgtagttttctaatgtaaacgtagcgttacggtcgtcaaaatcaatttgcacatctccttgttctttcggtaacaggttcttcaacagggttgccggcttcttgggcagaatgaaagcggctttttcatcgccatgtgccacaaatgttttattgcgtactaatttgtgcccgtctgaggctacgaaagtgatgtcttcggtagtgatatcaaaataaataccattcattaccggacgtaactcatcatcggcagtagcgaataaagaacggttgataccagccagcatcaccggagcgcccatcgttacgtgtaccgcatttgcgcctaatgcgggagcttgtggatattcgtcggcattttgtcccatcaggctgtatttaccattctgatattgtacggtgatttccaggttttcagtatttaccaggaaagtaagtggttgttcgggtatttctttcagggcttcgagtatggtttttgaagaaacggcaaagcgtccgtcaccgtcactttcatttacttccagtgaagtggacagggtcgtttcgctgtcagaagcagtgagagacagcgttccgtcagttagttccatcaaaaaacaatcaagaataggtaacgaatttttagagttgataactcggctaatagcttgtaaatgactgaataatccagtacttgaaacgatgaacttcatagttttatattattatatttatattctatatctctacattcatttaactgccaaagttacgaaaagattatggttcaagcgcaaaaaatggcgaaaaaattagtttactcgcaaggaaaagtgtactttcgtggcgaatttaaataacgtaatatggaattagcaggaaaagtaatagcagtcctcgaaccgagaggaggagtttcaaagacaggaaatgaatggaaagtacaagaatacgtaattgaaacgcatgatcaatatcctaaaaaaatgtgttttgacgtatttggagcagataagatagcgcaatttaatattcaggcaggtgaagaattgaatgtgttttttgatgtggatgcccgcgagtggaatgggcgttggttcaacagtatccgtgcgtggaaagtagagcgtgtgggtgcccagggacctgttgcgctggatgctccgtttcctcccatgaatgctgctcccgctgcaccggtagattttgccgcgacagacgagaaggatgatttgcctttctaggggatagaggattcccataaacataaataagccggcaggatccgtgaaaaggattttgccggcttattttatatagtctgtttttatggtcattctcaatcatggtgtgaagtgttgatgggatatttgcgttccatgaatttccatttatcatccggtgtggtatgattacggtggagtaaattaaacaggcggaaactatattgctgtagttgccgcctgttctttatttggttaaataaaaaagtcttaaaatgtagtgtagaagatttgcattttcagcttattctcaggattcgttccaccttttaacatagcgctttccatacctaagctgttggatatttcaactatttcattgtttgaattggatactgctttgacaggtatgatgacaactctgttccagtccggatttttagcgtcccatttttttccgtcttcttccttttcaggatctccacctgctgctgttatgccttttttccgttcctcaatgcagtaagtgattaagggagcgatgttggtaaaggtgtatgtattgttactgctgctatatgaacttaagaaagaagtcttgttatcgataatcttgttttcttcaaagaacgagaacatatctttctttctgaccatcaatacatattgggggatgcccattttgtatttggactctttctcgttgtagcgtgtgaacgatacatttacaccatttagcgtatctcttttatgttcattgtaaatctctgcaatggggaaagtcgcttctgtaaaaatacctgccggacttttgaggtaagtatggtccggatcttgggctaactcttccaatctgctaccgttactgaagtggttggcttgtatcacttccttggttgctccaaagaaataggacttgtaaaccaacgaatcccgcttgccggaagaactttctatcagggcttcaaaattaagattcaggcttaaaccgtcaatgtataaaatggttccgtcgccatgagtacagcgaatgtaaactccctttaatacattcttgataaaactttcaggagtcttgaaatactctttgttctccttgtatttgttgaagatgtgatcgcctaatgaattgggcaatttgatagtctgtataattgttctttgcttgacaccgctgcttgtggttgtagtttcatctttgcttgtagacggacctactgccgaataggcttttacagcgataggctttcctttttcgttgtaataatctttaggatccacactggtataaaaagtgcttagttctttttcaggaataaccttgtccaatgtgtcaacctgtaagcgcatggcattcagtgagtcgccaaagaaagacccgtattgcagacttatatttactccgatgactttggtcagctcttcttcaaatttgaagttgtccatacaggtgaactgtgctataaaatcggcagtaaattctccaaattgctcatcggtatatcgtcctaaatatgcagtactggtacgtgcataaacggagtcggccaacagagatttggtggtaaactcataactgtctgtatttgccggaatcttatctccaccggggataagatcggtcccgatgccggttgttgaatcatcgcaactataaatcagtgctgccaacaacaatgcgcataagtatttgattttcatctttattattcttagtgagttatttcttttcaaactcccatactttgtcatagaactcattgaaagcatctacataggtatcggcaggctgatagtcgagcacaggcacacccgattcacgggcgaacttcatgacattctcattcactttctcgctgttttgtatcacaccatcagagtaggcaatggccagtttgcacagttcctcgtaatttgccggagatttgacgatgctttccacatcattcttttcaatgcctttcagcatgagtttttcagtcagattaccttcgcagttcgatttgaattcatcctcaaacaccgaaaatactacttttgagtctctgaatgacggctcatcttgataagccttcttaatataaaggggcacaaatgcactcatccacccttgacaatggataatgtccggacaccagcgtaatttctttaccgtttccaatacgccgcgtgcataaaaaatagcacgttcgtcattgtctttgtattctacaccattttcgtcagctaccatttggcggtgctggaaatagtcgtcattgtcaatgaagtaaacctgcatacgtgcagcttggatagatgctaccttgataatcagcggatggtccgtatcgtctatgattaaattcatgccggacaggcggatgacttcgtgtaattggtttctgcgctcattgacattgccccattttggcataaaagttctgatttctctgcctttttcctgaatagcctgaggaagaaatcttcccatgtttgccatttcggattcgggaacgtaaggggtaatctcttgtgtaataaataaaactttatttgccttcatcttaactttttgttgctcataatcattttgcaaagatataaaaaaaatagatgagagtggcaagaaacgaggaataataattccttatgatatgttaagtggctggtaattagtggttagtgattggcggttaatggtcaatgccttgcggaattaggtgaaaaatgggaaagaacaagtggctggccggtagctgaagagggcttattgcgtcatatctgcaaggtattaaccacttattactaaccactcatcattaattaaaattctttttttcttcgttatctcccaaataatggtttactttgcagccgttttaaatgaaactactcaaacaaaagagataaaaagatgaagttagttcaaacaatcaaagagcttcagtcagagctggatgccctgcgcagtgagggaaagacaataggtctggtgcctacaatgggtgcactccatgccggacacgcttcgttggtgaaacgtgctgttgcagaaaatgatgtagtggtggtaagtgattttgtaaatcctacccagtttaacgacaaaaatgacttggcaaaatatccgcgtacattggatgccgattgtgaattgttggaaaaagtaggagcggcttttgtttttgctccgtctgtagaagagatttatcctgagcctgatacccggcagttcagttatgcgccgctggacacagtgatggaaggccgtttccgtccaggacattttaatggagtatgccagatagtgagcaagctgtttatgattgtaaaccctacccgtgcttatttcggcgagaaagacttccagcaattggctattattcgtgaaatggtgaaacagatagggttcaacggactggaaattgtaggttgtcctattgtgcgtgaggaagacgggctggcattgagcagccgcaatgcacggctttctgcggtggaaagagagtatgcgctgaatatttcgcaaactttatttaaaagttgtacttttgcaaaatctcatccggtcgctgagactcagaagtttgtagaggatgcgattgctgccgctccgggtttgcgtttggaatattttgaaatagtagatggcactacgcttcagaaaataacggattgggaagatacggattatgcagtaggttgcattacggtattttgcggagaggtacgtttgatagataatataaaatataagggatagtgatcgttaaccattagaattatgatgattgaggtattaaaatcgaaactgcattgtgtccgtgtaacggaagccaatttgaactacatgggtagtattacgattgacgaggacttgatggatgccgccaacatgattgccggtgagaaagtgcacattgtggataataataacggcgagaggtttgaaacttatattattaagggtgagcgcggttcgggatgtatttgtctgaatggggctgctgccaggaaggtacaggtgggtgacattgtgattatcatgtcatacgccatgatggattttgaggaagctaaatcgttcaagccgacggtggtttttcccgattcggcgatgaacaagattgtataacgatatttttgttcggtaatccaaaagcccggtagacgtgagtctgatacgggctttaatttttgtatccgcaatcatagggcaataaaccttctttattatccggtggtatgattgcggataatcttttatatagatttctccttgataagtcctgtccggtaagccaccagcaatttctttaaatcgttaatctgtgtcaccagttcccgtcctttgtcagtgtcctttaccatcatgcgttgggtgctcatttctactatctgggtgctcgatttgatatcctgcccttcttcaatggctttttgcattgaggtgaacggttcgtgctgtaccagttggaatccgcgcgaatggtataccagtgtatatccggcaattccggtttccgaatgatacgctttagagaatcctccgtctatgaccatcatcttgccgtttgcttttatcggattctcaccttggatggtttttacgggtacatgtccgttgatgatatggcggtgtgttcctatcactccgaactcgtccagcagcatatcacatactttttcttcattgcgcaggctgtaatagtgaccttttacttccttgtgtaactctttctcttttaaaaagtaacgttcaaaagtagccattttgtctttgtcgaaagcaggggagtctttgccacaccacaagtaccatacatagtctacggcaaagggtctgtcctcgttgtcttcctcagcgaagaaggcggtacggatcaagtgccctaccttttccagcaagacttttcctttgtacatttttccggctatggacacatctttcagcgtaccgtcggcattcaggggtatggaggcgtggaacagcagatttgagttgctcaccgtgtacatacatccgtaacggaacaggcagcggatatgttttttcaatttctcactgctgacaaacgaacgatggagtttgttcataatctcccgttcttcgtctgtcagcttataaggatcggcaggatttaccgtaggaagaaagctgtctttcagttcatattcttttccattgggcattgtgatagtcttacgctcaaaatctatacggtgtagcagcatacggtcgtccatctcgaaatcggggcggcgcctgataatctctgcttccagcttgaactggataacactgattgctttgtgcatctggcctatcatgcgcagtgtcttggcattgtaagtacagtcttctttctctactttcggtccgaatagggtgcagggatcgtctgcgtatgtttccatggcaaaggtggccaaaggcagaaggttgatgccatatccatcctccaaggcggcaaggttgccataacgcatggccaggcgtagcacgtttgccatacagcagtcgttgccggctgcggctcccatccataaaatgtcatggtttccccattgtacatcgaaattatgataatcgcataatatgtccataatgcggtggggggcgggaccacggtcgaatatatcacccagcacatgcagtgtgtctatggtgagccgttggatgaggttgcataaagcaatgataaagtcatcggcgcggcgggtagaaatgatggtgctgatgatgacgttaatatacgcctgcttgttgggaaccattgagttttcgtgcaacaattcctgaatgatatacgagaattctttgggaagtgatttccgcactttggaacgggtgtatttggaggatacattctggcatacacgtaccaactggttcaacgtgatgacataccagtcgtccaggtccgtttccactgcttttaccagatccagtttttgttccggataataaatcagcgtacatagttcttttttttcgttctcgcgcagggtattcccgaatatttcatttacttttcttttgatggccccggaagcattccgcaatacatgctggaatgcctcgtactctccgtgcaggtcggcaaggaaatgttctgtacctttaggcagattcagaatagcttccaggttgattatttccgtactggcatcggctatagtggggaaactatgcgacagcagttgcaggtatcgcatatctttctgtatggtttccggggtgattgaattataagcgttcatggctggaaattatataaaaaacatgagtattaattgggctataatgacccggctgaacatggacagcggatatacggtggcataactcaccgccggattatcaccgggtaacgtgtcattggcatagttcaatgccatagggtttgccatgcttccacacagcataccacaggtgcttccgaagtcgaggcgggtcatgcggagggccactaatgccatgatgactaccgggataaaggtgatggcgaagcctatagctatccagatggctccttcggggcgcatcactgtctcgaagaaatgtgcacctgcatctagtcccaggcaagccagatagagagataacccgataccgcgcagcatcaggttggcactccgggtggtataagtgatgaggtggaaacggggaccaaagcatccgataagaattcctactacgataggtccgcctgccaggcctaatttaacgggagtgctgatgccggggatggcgatagggatggagcctagtatcaatcccagtacaatacctataaaaatggcggcaagattaggatccttcagcgttttaaccgcattgcctaatactttttccacattctctatggctttggcttctcccaccacggtcagccggtcgcccagttggaggatcagccccggtgtggcaagtagttgtaccccgctgcgcatcacacggctgatgttgatgccatagctgttgcgcagacgtaaagagcctagttttttcccgtttatttcggggcggctgataacgatatgtttggaaatcaattggctgtctatggcattccagtcgatgtcttctttattccaatcctggctttcctgttcgccgaaaagaatcgtgagcgagggagcgtccttttcggtggtgataaccagcagacggtcattctctttcaggattttttctgaagtggggatacttaccgtgccttcccgccataaacgggagataacaaatttaggatagcttaataaagctacttcttttatgcttttattgaaaatggcgggattgtgcactttgaaggtggctatgaatgtctgattggtgtcctcgtgttcgtgaatgtcgatatctgagggacgaacaaataatttgcgtaccagcaacatggccagaataacacctaccactcccagcggataggttacggcgcaacttaacgctgcgccactggcgggttcccccatttgttttaaagtctgttgggcggcccccaaagcgggagtattggtggtggctccacaaaggatgcctaccatatcgctcatcggtatgtctcccagtttgctgaaaagcaccgtcatgaccgtacctgtcagaataacgcccatgcccagcatattgagctgtacaccgcctttacggaatgaactgaaaaagccgggacctacctgcaatcctagttcgtatacaaaaagcacaagaccgaaactctcggcgtaattcagcatattcgagtcgattgagaatcccaagtgtccggccagaataccggcaaaaaagacgaaggtaactcccaatgaaatgccaaacaggtggatcttacctaaaccgagccccacagcaatgataatcgagaggattacaaccgcctgtaaaggcgtgtgttcaaaaaataagctatttaaccattccatattgcaaagatagtacatttttaagttctgcaagcgataaataggtatttatggatggaacatgactcatctcgttctataaatgattcttttcctccagccacgcatcaatcaattttcttgccagactcagctttttgggtatctctggcaaattgtctttggtatagaaagcgccggcattcagttcttcttgttgtaatttgatgtttccgctttcataatcggcggtgaagcctatcatgattccgctgggataaggccacggctggctgccgaaatatttcaggtttttgatatggagtcctgtttcttccagtacctcgcggtacacacactcctccaaagtctcgcccggttcaagaaagccggctaccaaaccgttgaaagttccccggaagttgcgggcgtgaaccagcagtatgctgtctccccggcgtatcaatacaatgatggcaggagagatgcgcggataaatttcctgacgacattgggggcattttttagcaattggagaaatctgtacggtaggcacgccgcacatggggcaatagcggctgttcttgtcccaattcagtatctggaaggctttgccacccacattgtactcttcccaaggcaatacgtcgtatgaactccggagatccatcatcaggtggcggtcattttcgcagccgggcaccggggcgtgtacggagaaagttttggcagtgtgtccctctatctctccgatggtgtggatagtgcttcccaccggaacaggcatgggaggctctgttccgaaaggtatggtgtacattccgttctttttctctatcagcagctgatccttataaaaaacgaaccagccgcaggtttctatatcttcttccatattcttttttaccttgttgcaattattgattcaatcctttcatagtgagctggatgcgcttgcgctctaggtctatgctcatcactttcacccgtacatgctgatggatgctgactacggtggtggggtcgctcacaaatttgtcggccagttgtgatacgtgcaccagacccttctctttgattcctatatctacaaagcaaccgaagttggtaatattgttcacaatgccgggcagttccattccttcagtcaaatcctctagggtctttacattcttgtcaaattcaaaaacttggatttgttgccgtgggtcgcgtcccggcttgtccaattcctgtatgatgtctgtcagggtgggaagccccactgtcggggtgacatacttcttgatatcaatccggctgcgtagttctttgctctttatcagttcgtccacggtgcagctcaggtctttggctatctgctccactatgggatagctttcgggatgcacggccgagttgtccagcggattcttcgcttgtgggatacgcaggaaccctgcgcattgttcaaacgctttcgctcccatccggggtactttcaataactccttgcgtgaactgaaaggcccgttctcggtgcggtaatccacaatgttttgagccaaggcaggacctagccccgatatataagtcagcagatgacggctggcggtattgaggttcacacctaccaggttcacacaactttccaccgtctggtccaatgatttcttcaataaagtctggtccacatcatgctggtattgtcccactccgatagatttggcgtctattttcaccagttcggccagcggatccatcaaccggcggcctatggatacggctccacgcacggtcacgtcgtattcagggaactcgtctcgggcggttttcgaggccgagtaaatggatgccccatcctcgcttactacaaatacttgcaattcacggtcatagcgttgtgaagtgatgaattgttctgtctcacggctggcggtgccattacctatggcgattgcctctatctgatattgttctaccaatttcacgatgctgcgggctgcctgtgagtattcactcttgggcggatgcggataaatggtttcattgtgcagcaaagagccttgggcatccagacagactattttacatccggtacggtagccgggatcaactcccatgacctgtttctgtcctaaagggggagccagcagaagctgtctcaggtttccggcgaagacgcggattgcctcctcgtcggctttctccttgctcaaggctgaaaattcggtttcgatggaaggcttcagaagccgcttgtacgcatcacgtactgcctcgcctacctggcggctgcattcattgttgccacggacatacatttgttccagccgtccggcgcactcttcgtcatcaggacttatacttactttcaacaggccttccgactctccccggcggatagccagcagacggtgggaggaacagcgtttcaaaggttcgctgaaatcgaaataatcgcggtatttggcggcttcttcctctttgcctttcaccactttggaggtgatgacggcttgtcgggaaaattggttgcgcagttggttgcgggcacgctcgtcctcgctcacttgttcggctatgatgtcgcgcgcgcctttcagtgcatcctcttcgtctttcacatctcctttcacaaaagcggggagacggctgtccagatggttttcgcgttgcaataacagtaaggtggcaagcggttccagtcctttttgccgtgccgcttcggcgcgggtcttacgtttcggcttatagggcagatatatgtcttccacttcggtggcatcccaactttgttcaatgcgtttgcgcaattcttctgttagtttgccttgttcttctatggtagaaagaatggtttcttttcgtttggccagttcacacaacttgtcatttctgtctttaatttcgcctatttgtacttcgttcagccctccggttgcctctttccggtatcggcttatgaaagggatggtagctcccccgcccagtagagataatgtattgtctacttgatgtacggaaaccttcagggctgcggcaatcattttattgaatagttccatgtttgttgttttcttttggggggcaaaggtataaaaaaggtatgggtttatcgtataaatcgggtgtatttctgcaaagaaaaagagtcggtccgatgcgtttccagggctcacaaggctcaaggctcacttatgcggtattttaaaccttggtagatgtgtaaatgtttgttttacagattgtttactaaaacaagacgtgcggattgaatattattctttggtctttgggaagttcaggattgtcttgactttgtctgtcgttttatggaatttgtgtttggtttgaccaggcttgtttttttgccgggtttgattcataataggccggatcaatggatatggggtgcttccggatttttcacgatgcccggaatgaccaagtgatgatgtcaatagaaatttcttttatttatacattttgctttccggtaaatgtcggatgtatccgtgtgtgcctgggtgtcattatattattcatttatttttcagaatatagtcttgttttcttctttttattgtaataaattgaaaatcagtgtatgtatgggtttcttgaagcttgttttgggcttaaataccgcttaggtgagcctttgagccttgagccttggaaggccttgtgaaaagaccttgtcattcccttccaaagacctgttctttgtataaaaagaccttgacgtttttttaaaagaaccttgtctttgacgccaaacatcaggaccttttttttaaatgtctggatctttttcaaaaacaacaagaccttttttcaaagggaacgggtacaaacggacagccggtccgtctcttttcctagatagtgtaataattatgaagaaactgtttattttacttgtgtgcctgttgcctgtgttggcacaagctcaaatggaaacttctgtagccggattcatccctttatccggtagcggaagaatagtatataatttcaatcccggatggcgctttcatcgtggagacataaaaggcgcggaagccgtgcgttttgatgatacatcttggcaagtagtgtctgctccgcatactgtggaactgatgcctgccgaggcaagcggttgccgtaactatcagggtgtggcatggtaccggaaacattttgtgattcctcaagatatgaaaggaaaagaggtgtcgcttcattttgagggagctatgggaaaacaggtaatttatttaaatggcaagagggtacaagagcacttgggaggataccttcctttcactgtgcaactgacggaacagggggtacagcccggagacagttgcttgctggcggtgatgacggataatagtgatgataagaattttcctccgggaaaacgtcaatataccttggatttcgcttatcatggaggaatttaccgggatgtgtggatgataggaaaatcaagtgtagctattacagatgccttggaggccgataaggtggccggaggcggagtttttgtgcattttgacaatataagcgggaaaaaagcggaagtgtatgtggatacggaagtacataacagtggaaagcggacgcgtaccgtagccgtggagacggttttggcggatgccggcgatgttcccgtaaaacggatttcgcaacaggtgaaactgcaagcaggggaatcgaagacggtgcggcaacagtttgcagttcgcaatcctaagttatggtctcctgattcgccttatttgtataggatacaatctcgtgtcaaagccggacatgaagttttggatgggggagtgacacgtgtggggatccgcaaagcggaatttaaaggtaaggatggcttttggttgaatggcaagccttttggtcaattggtcggcgcgaaccgtcatcaggattttgcatacgtgggtaatgcgctgcccaacagccagcagtggagggatgccaaacgcttgcgtgatgcaggatgtaccattatccgtgtagctcattatccgcaagatccggcattcatggatgcttgtgacgaaatggggctgtttgttattgtggctactccgggatggcaatattggaataaaaatccggagttcgcaaagctggtacatcggaatacccgtgagatgatacgccgggaccgcaatcatcccagtgtgctgatgtgggagcctattttgaatgaaacgccttatccgcgcgatttcgcactggaggcattacggattacacgggaggagtttccttatcccggacgccctgtagcggcagccgatgttcattcgaaaggagtggcggaaaactatgatgtggtgtacggatggccgggagatgatgagaaggcagaccgtccggaacaatgtatttttactcgtgagtttggcgagaatgtggatgactggtatgcacataataataataaccgtgccagccgtagctggggggaacgcccgttgctggtgcaggcgttgtcattatcaaagagttatgatgaaatgtaccgcactacaggacagtttatcggtggggcgcaatggcatccttttgatcatcagcgggggtatcatcccgatccgtatttcgggggcatttatgatgcgttccggcagcctaaatacgcttattatgcttttcgcagccagtctgccgcgacattgaagcatcctgtagcggaatgtggccctatggtgtttatcgcccatgagatgtctcctttctcggatgccgatgtggtggtgttcagtaattgtgattcggttcgtctctctgtctatgacgatactgagagctggacgcttccggtagttcatgcgcagggacatatgcctaatgccccggtgatattcaaggatgtatgggatttctgggaagcacgcgagtatagttataagcaaaaaaactggcagaaagtaaatatggtggcagagggaattatagacggtaaagtggtttgcacttataagcggatgccgtcacgtcgcagcacgaagttgcgtatgtatgtggatacggaaggaaaacaattggtggcagacggttcggattttatcgtagtggtggccgaagtgacggatgatagcggtaatgtgcgccgtctggccaaagaaaatatcgtatttactgtagaaggtgaaggacgaattataggggatgcctctatcaatgccaatccgcgcacggtggagtttggctctgctcccgtattgatccgttctacccgcaagcccggcaaaataaaggtgaaggcccatgtgcagtttgaaggaacgaatgcgccggttgctacggaaatagaattagaaagtattccgtcagaactgcctttctgttatacggaggaggagacggattctcaatcagtcggagcaggactagccggaagccctgttagaacagaaagaatggcggggaaagttgtgctgacagaagaggaaaggcaaaaagtattgatggaggtggagagacagcaaactgaattcggtacggagaagtaatatagatagaacgcggatttatctcgttccaatctaaccaataattggtatttaactaatttcaatttaagtaccaacggattttttcttatctttgacctcggtttgaagaaaactaaatacttatgaagaaatatatacttattatactttgttgcctgacaagctttcctctgtggtcatataatgtgaatatgattgtggaacattattctgtagatcaagggcttcctaataatacggtaaactgtaccttgaaagacagagatggctttatctggttcggaacctggtatggcttatgttgtttcgatggagtgaagtttaaaacattcaataaacaggagcacgattcggatgtgccgccacgtaagatccagcgcatagtcgaggataaaaacgggtatatatgggtaaagaccattgaccgtaagttatatgtcttcaataaagtgaccgaatgttttcatgctgtttatgatgacatgaagaactattcggagaatatccaggtgataaaattacaaaatacggccgagggggatgtgttgttgctgactaaagataaaaatctgttattggccggggtagatgaaaaagggcaggtaactatcaagattctgttcgactctcggaacgagataaacaagcatgattatacactgaaacaccatgtcctgtgtgagacggaggaatatatcagttggataggaactgattataaggtagccgccgtgcataaaggatcggaattggcatcccggcctgccgattttataaccagtaagattaattccggtgacaaggatagttttaccagtttttttgaggatggcaggaaggtatgggtcggagatcgtgcgggtattttttacagtatcgatgtgaggaccggtttggtaaaccggtatgtactttccgaaataaaaggtgcgatcagcaatttgctggttactccggcaggttatgtctatctcagtgtggccggacaaggcacatacgaatatgatttggctgagcgcaggttgcaaaagataaatactgaaatgaatgacgctatggtaactcatgcattcatagaccagtatgataaaatatggtttcacgaaaatgagaaggcgctgatttattatgatccgttgaaccatactgcaaaacggtttccgtttaccatgttcggcaagataaccaccctgtattcggaagatgccggcgaaagagggctttttttcctgtctccggcaggagaggcctggttgttcgacagggaacatgcggagatggtttatatcaataaattgaaacaactttctaatgataggacaaatcagcagttttatcatctgatgttggataatgacggggtattgtggctttcctctgccgatgaaggggtgtattgcatgaatttccccaagaagcaattcaatctgctttcgttgtctccgcaatcagccggtcaggaaaattatgcgacaggggtaagagcccttttccaatcaaaaagtggcgatatctgggtgggcacccgttggcagagtgtttatcggatggaccggaacggtgtaaccaaacatgttttttcgacaggtgacgagcatataggtaatgtatatcacatcatggaagacgacaaaggaaacctttggttctctaccaaaggcgacggattggtgaaagctgttcctgatgagaaaactgtaggtggtttccgttttaaacgttatctgcataatttgtctgatttgtcgtcaatcagcgggaatgatgtgtatttcacttatcaggatgaaaagaaacgtatctgggtgggtactttggacggaggattgaatctgctttgtgaggaaaatggggaagtcacttttaagaataaatataacggattcaagaattatcctacgtatggcctttatatggaagtgaggaatatgatagaggataatgacgggcgtatgtgggtaggtacgatggacgggctgatgtcttttaaaaacaactttgcctcagtggagcagattgattttgaaacctaccgtggtgccaaccgggtaaattatgccgatagcgatgtgtacgcgctttataaagacgagttctctcagatatgggtatgcgtgtttggtggaggattgagcaaattgtcgggatatgatgaggaaacgcataagctttcatttaaatcgtatggctgggaagacggattgaataatgatgtggtgatgtctattatagaagatgataacggtttcctttggcttgctacggaaaaaggactctcttgttttgacagggcgacaagccaggtgcgtaactatgacaaatacgatggctttcccccggttgtgatggaagaaagcaccacattgaaaacgctggacggggaactttggctggggtgtaaagagggtatcttgaccttttctcccgataaactggaaacgcaaagatttgattataacacatttattgtaggatgtcagatatcaaaccgggacatacgcagctatacggaccatcctattattgaccggtccattacctatacagacaggattacattgaatcataaccagtccatgtttactttagagtttgcggcgttgaactataataatcagaaccgtgtgtcttacaaatatattttggaaggatatgaaaaagaatggcactataacgggaagaaccgtatagcgtcctataccaatgttcctcccggcaagtatcttttcagagtacagacactggatgaggcaaatcccggtttggaatctttccgtgagttgaccgttgtcattctgccgccttggtgggccagttggtgggcgtatgttatctatatgattatagctgtagccttattgctggtggctataaaattatctcttttcatgattaaggtgaaaaatgatgtgtatatcgaacaaaaattgtccgaattgaaaatcaagttctttaccaatatctcgcatgagttgcgtactccgctgactctgatccaagggcctattcaggagttgaaagagaaagaaaaactatctcagaaaggaatgcaatacgtggatctgatggaaaagaataccaaacagatgctgcaactggtcaatcagatattggatttccgtaaaatacagaacggaaaaatgcgtctgcatgtgtcgttgttcaacctgaatgagatggtagactcttttgagaaagaattcagggtgatggccgaagaaaatgaagtcagcttcacgttccagctggccggtgaggatatcatggtatgggcggataaggagaaagtggccatcgtgatccgcaacataatctccaatgcgttcaagttcactcctgccggggggaatatttatgtcacgatgggagtgtcggatgatgacaagcattgttatgtacgggtggaagatagcggtgtgggtattccccaaagcaagctttccgaaatcttcgagcgtttctcgcaggctgacaatgcacgtggcgcttattatcagggaacgggcatcggattggctttatctaaggaaattatcagtctgcatcatggggaaatctatgcagagagccctgaagggaaaggggcagtctttaccattgaattgcaactgggtaaggagcattacaaaccgtcggaagtcgatttttatatgggcggggaaacggtgagtgttcctgaaactgaatctgtttctgcttctgccggcaaggaaagcgaggaggagaaagaacagcctgtcgattcgtctttgcctaccgtgctgattgtagaagataataaggatttatgtaatatgttgaagttgcaattggaagataaattcaatatttatatggccaatgatggtgtggaggggctgaagaaagtacatctctatcatcccgacatggtagtcaccgaccagatgatgccgaatatggatggaatagagatgttgcaacgcatccgtaaagatttccaaatcagtcatattccggtgattatcctgacggcgaaaggtaatgatgaagcgaagaccaaagcgataagcatgggagcgaatgcctatatcatcaaacctttcagcaaagactatttggtggcacgtatcgaacagttgctgaatgaacgtaaattgttccgtgaacgtgtatggcagcagcccgaagaacataaggaggaacaggatacatacgaacagttcctagtgaagaaagatgtgcagttcattgaaaagattcatcaggttatagaagagaatttggataatagtgattttaatatagatactatagcatcaactatcgggctgagtcgctcggctttctttaagaagttaaagagtctgaccgggtttgctccggtggatttagtgaaagaaattcgtctgaataaatcaatagagttgattaaaaattcggatatgagtatttcagaaatagcttttgccgtaggcttcaaggattccggttatttcagtaaatgttttcgtaaaaaatatgatcagactccgagggaatatatgaatgaatggcgtaaaagttgatttcttgatcttataaagcaggaatcccgtaaacagatgcaagcgagcattgtgtttgcgggattgtcttgtttattcactaaattatttttggactttattaagatttagtgattacatacttttttgtgattcgtcttaattctaaacaataactagattatgatgaatgtgaaaaaaattatcagtttaattatgctcctgtttatgttactgcctttgggagcacagaattcagagggaaaacaacgctataaaatagctgcgtgtgactggatgatgctaaaacgccagaagatcggttcttttcaattaatgaaggaactaggaggtgatggcatagaaatggacatgggaggcttgggaaaacgggatacttttgataataagttccaccaaccccatttctgtaaattatttaaagaaacagcacaggaacaacatattgaagttccttctgtggcgatgtccggattctttggacaatctttcttgactcatcataattataaagctttagtgcaggattgtttgaatacgatgaaggtgatgggggcccaagtagctttccttccattaggtggtataaaagaggactggacagtagcgggtgatgcacgtcaggagttggtaagccgtttgcacgaagtgggagaaatggcagtgaaagatggagtagtgataggtatccgtact

SEQ ID NO: 14474 - DNA, 5463 bp, Unknown
  gut microbiota DNA sequence
tctgtaaagagttgaaaaaactgggaaaggatcggatttgtcagatacattgtacggatacagacggggttactcttccttataatacccgtctggatatgaatgccgtaaagcatacccttgataagatggggtggagcggatggctggtcattgaacggtcacggaataaggatgaagtccggaatgtaaagaaaaacttcgggacgaatgtcgcttatctgaaacagatatttcaacaagaaaaataagataatattttaattttaaaaaagattctatggagaatgaaaatgcatttcttcagaagctggacaagattggcaacttgacacaagtggtctgtctcagtctgtttctgacaggagtttctgttcagggagtatccgctgagacaggattccctatatcccagtcggtgcaacagactaaaactgtcaccggacaggtggttgatgaaactggtgaaccggtgattggtgccagtgtggtggtggaaggaactacaaacggtaccattactgattttgacggaaaatttgctttgcaagtcccttcgggcaagaaggttgtcatttcatttgtggggtatgtgccgcaaacgattgctccgaaacaaggaaaagactttagagtggtgctgaaggaagattccaaaattctggatgaggtggtcattgttggttacggtactcaaaaggctaaaaatgttactggtgcaatctctactgtaaatccaaaagaaatagaagatttgccagtaggaaatttgggagcggctttacaaggcatggtgacaggtttgagtgttagtggtggccagactcgtcctggtgctgctgctagtttatcgattcgtcagccaatgactttgtctaaagatggtggagatacaaatcctatttatgttgttgatgattttattgtggatgcaacaacatttaataacttggatcctagtgaggtggaaaatatatcagtattgaaagatgctgcagcttctgtttatggtgctcgtggtggacaaggtgccatattggtgaaaaccaagcgtggcaaagaaggtgatcctcgtatatcctatagtgggcaatttggctataatgatgaaatagctcgtcccaaaatgatggattcatatcattatggattgttctataatgctattgctgctgctaatggcaatgatgagataaaaaatcataaaacagaccttttccaagctgacgagttagaagcgatgcgtaatataaattatgattggttggatgatgcttggaaaggtgcttttagtatgaagcataatcttaatttaagtggtggaacacaaaaagcaacttattttgctggtgtttcatattatactcaaagtggtaatttgggaaccttggactatgaacgttggaattatcgtgctggtgtggatgttaaactggcatctcattttaaagtaggtttgcaagcttcgggagattatggaaaaaatgaaaagacctttaataaggtcggaggggaaaacgatgaaaatgactataatacattattattgacacctcgctatattccggcatatatagatggcttgccgttattacgttatggattttccaacagtcagcaaaataacatccagcaatataattattatgcattagaagagttaggtaatatatcaaagaatgatcctcaaaatatgcgtttgaatgcttctgtggaatatgactttgactggaataaaacactgaaaggacttaaactgaaaatgtcttattctaaaagtataagtacagataaaaatagtcgtgtcggttccaaatatactgcttattctttcaaaacacgtgggggatcaggtaatcacttatatataggtgatgatttgactaatgaatctaatttgcaagaaacaacagttaaaaatggaaatcagatttggaggaccatgaatcgtacggatagctaccagttgaactttgttgcaaactataatcgtacttttggcaaacatacgataggagctttgttttctgttgaacgctcagaaaggaattatgagtatgtacgctattatagggaagatccgttagaagtaaataatggtgaatggaatacggcaacaggcaaaatggatggattgacagaacgttctgagtctggattgttgtcttatattgggcgtgtgaactattcatataatgatcgttatatgatggaattccttgttcgttcagatgcctctactaaatttgcacctagtaattactggggggtattcccttctttatcattgggttgggtggtatctgaagaaaattggtttaaagaaaaaatacaatggcttgaatatttgaaagtcagaggttcggtaggtatgctaggtaaggataacattaaagcatggttgtggcgtcagaattactcatatcaggcaaataaaggagctgtttttggtacaaatgagcaaaaccctgtaggtatgggattgaaaatgggtgcggctcctaatgctgatgttcattgggataaaagttataaattcaatttcggtattgatactagatttttgaatggtagattgtcatttggtttagatgcgtatttggataagaatacagaaatgttagttcaaagagacggattggttcctgtgaccattggtggcgcattggcagctgaaaattatgatgccatagatgcttatggcgtggaactttcttttggatggagagatagagtaggtgatattaactattttgtaaaattgaatacagcatttacaggtactaaataccgtaaacacgattggccggatattataggtctgggtgatatatataaaggtggtccgactgatatgggtaagtggggatacgattgtataggtatgttccgtacccaacaagagattgatgagtttgtgacaaaaaataatgtcacaaaatatatgggactgaatcctgaacaaataaagcccggtatgttgatttatcgtgatgttagaggtaaacagaatcctgatggaagttgggaggcagctgatggtattattgattcaaacgatagaatacgtttgagtaagaaaaatagtaatccttatggatttagcttaaactttggtggtgactggaaaggtttaagtttaagtgcacaacttagtgcctcgtggggtggatgggctgaaataccgtctgctgcaagagatatgagtactaagaaactgaattatataaatgctcctgtattttggaatgatgtgtttgttccggaagatgtagttgatgatcaaggtaatattgttgcatatcagaatcttgatgccaaatatcctaatatgggcttttctgtgaataatgaaacttctaatttttggagggtcaattcattacgtatgactttaaagacattgacgatagggtataaattaccatccgattgggtgaagaagataaatattgagggatgccgttttactttgactggtactaatttattaagtttctttaatccgtatccggagaatttttgtgatccgttgagtgtgtatggggcttatcctactttgagaaatgtttcgttaggtgttaatatttcattctgattaaaaatatgaaaaagatattgagatatgctttttttgcaatggcattggctgctatgacttcatgtagtgaccagtttctgcaagataaaaaagattataatggttttaatgaagaaatctatgatgatatagcattagctactggaaaagttgattttgtttatggtctttgtttgccaacaactgcatcgggagttggtcattctaacccttgtacaggacgtgccgatgctttttctcaatcgacagaagaatacgcaggttctactacttttactcagttggctgaaattttgagttcgaatgttcctgactatttttataataaaaatacggatggaccatggtcacgtatacgtgaatgtaatatttttctggataatattgacaaaggggcattaggagaggcagatagaaacaagttgaaaggacagatttatttttggcgggcttggatttatactcggttggttatgatgtatggtggagttcctattgtaactacggctcaaaatgctattttaggtgatggatcttctaaagatgaactggaagtgcagcgtagttcaacggctgattgtattgatttcatttgcgaagatttggataaggccatagccatgttaccaggaaaatgggacaatagtaattggggacgtatcacttcaggtgcggcagcagcgttaaagggacgtttattattagcctatgctagcccactattcaatcgtaatgatgatcaggtaagatggcaggctgcttatgatgctaataaagctgcttatgatttgttaatccagaatggatttggattggctgatggaaaaggcaaccgtgctgaaaactgggaaaaaatgttctgccagattcaaagtagtgaggcggtaatggtcactttgttcaatactttgactaatgattataaaaagaacaatagttgggagcagatggctcgtcctaaagagctcttaggaggtggtggaatggccgctacagctgaaatggttgatttgtttccaatggcagatggtaagaaaccgggggaaagtgtatttgaatatgatgaactgaaattctataagaacagggatcctcgtttttaccgtacgtttgcttttaatggagtagtttggccttataagatggacaatggttatacattgtggaattatcaatggtataaagatgaagattcttttgaaagtgggaaacctggtaattctgctcaatattcaggggatgtcaattctggtatatttgtgcgtaaacgtacaaatcctgaggcacaatgggataatgcaaataaattcaatttaagtgctactccatatatggaaattcgttttgccgaggtcgttttgaatttagccgaatcggcttgtggtattggtaagaaagatgatgctgttgaattgttgaaggatattcgtgaaagagtaggttatacaggtgattgtggattggcggttgctgagttaaaagcagatcgtgataagttgttttctgctatattgtatgagcgtcagatagaattggcttatgaaggaaaacgctttgatgatatgcgtcgttggatgttgtggaatgatgattttggaacatgtacccgactaggcgtggagcctctgaatggaaaacgtcgtcatggcatgttcttagcggtgaagccatctgtgtataccgaaacaaaagcaggacaggattatgatgtttttaatcctgatagtaaagcttatgacgcttcaaaggttactcgtgctggtatcggtttggatcctagttcttcagatgaggaatttatgttgcaaattgaaaaattggataaattctatgacacaaatttggtacggcatgaaaatgat

SEQ ID NO: 14475 - DNA, 16763 bp, Unknown
  gut microbiota DNA sequence
aaacaataaaactaactgcttggagagaagaatctacagcgcacgagattttattcaagaaaatttgtgatgaagaaaaccaaaagcaacatttccggaaaaatacggcattcaatccttcatccggatggaaagaagtggaaaagcgaatcaaaagaaataataacagaagcagatatatcaaaatagtaagttatgccgcaatcattctgttacctgtcctttttgtaagtatttccatgaaattcacctcgcccgtttctctttcggacaaacagttcatcgcacaatccattctacctggggaatccaaagctattctgacattggaggacggccagacaatccatataaataaagaaacagagagtctgcttgagaaaatagacggagcccgagtccacatggactctacaatgctgaattaccaagtaacatcaaaaacagccccaaaaaacaagcctgtatataataaagtggaaactccacgaggtggagaatatgctctattgttaagtgatggaacaaaagtgcatctgaacgcaatgaccagtctccgctttcctgtgacatttgataacggtccacgcaaagtggaactggaaggcgaggcctattttgaagtctgcaaaacagggcaaccatttatagtatgcactcaaggcatgcaagtagaagtgttgggaaccacattcaacatctctgcttatccacaggaagagtatcagacaactttggtaaacggttctgtcaaagtaaatacagaaactggagaaagctgtattttaaagccttcccagcaagctaccatcagcctcggaaacagcagcatacagatacgcatggtagatgccggattttatacttcatggataaaaggaaaaattcatttcaaagaccagcgattggaagatatcatgaaaatactatcacgctggtatgacatggaagtaatttttgccaatgagaaaataaaagacctacgctttggatgcaatgtagatcggtattcggaaatcactccatttgtacgtttgttggaagagactcaaaaagtacacgtaaaagtcaataacaaaacaatcacattctataactaataaaaatgatgtattatggacaaaaaacacaactacaccaatcacggtaaaagtagtaaacgtttgtggattacgttcctatttttctgtatcattaccacaggttttatgcaggctgccaacaaagtgtttgcacaagccactgtcacagcctcattcaagaatgccacgttgagtgaaattctttgggaaatccaaagacaaaccgactttacttttgtatacagcaccaatgatgtaaaacaaataaaagtccaaaacctaaatgtaaataacgaaaaaatagccaatgtgcttgataaatgtcttatgaatagcggtttgacctattcagttcacaacggcgttattgctatcaagcaaattgaagaaaaagagtctgctgttcctcaacagaaaacaacattaaccggtacagtactggatgagacgggagaacctattattggagcgaatatcttagtcaaaggtactacgaatggaactactacagatttggacgggcacttctcattagatatagaccgtatacctgccactttgattatctcctatataggttatgccaagcaggaaattaaagccactgccggaaagatactgaaagtagtcatggctcctgataataatattatggaagaagtggttgttaccggttatggtactttcaagaaatcggcatacgcaggttctgcttctactgtgaagacaggagaattaaaagatttacccgtagtttcattctccagtttgctagaaggtaatgctcccggagtacaagtcacttccagttcaggtcagcctggtgcctccacttctatccgtattcgtggtatgggttctttcaatgcaagcaattctccactatacgtaatcgatggtgttcccgtccaatccggttctgttgctgctaccagctccgactccggatttgacataatgtctacattaaacaactcggatattgaaaatattacagtaataaaagatgctgcagcagcctccctttatggttcacgtgctgcaaatggagttattttaatctccaccaagaaaggaaaaagcggaaaagcacaaatttcattaaaagcagactggggtagcaatgatttcgcaatggattatcgcccggttatggggggagaagaacgacgtgaatatatttacaatggattgatattatatcaacaacgtaaactagctgataaaaatcctaatatatcagaggaagagctaatgtcacaaagtaaaacttatgcagatgggcaaatcgataaatatgctccaattccatggtgtggtttcacagactggaataaagagcttttccaaaagggacatcattctacctatgaagcatcactagccggtggcagcgataaatttaaatattactcttctttatcatatatgaagcagaacggtattgtacaaggttccggtttggaacgtgtaacagggcgtttgaacgcagatttcagtgcaacagacaaattgactgtaggcgccaagatacttttctcaaatgtaaatcagagtgtttatgacgaaggattcacttatacatctcctttctattcctcacgtaattgggctactccttcagatccggtctacaatgaagatggcagttggaatcgtaaatttattcgtaaagccaatgaccgcaaccccaaattatcagctgaatacgattataaacatgaaaaaatgctacgcgcattcaatacgctttatgccgaatacgaaatcataaaaaatctgaaattcaaaacaacattcagttatgattacactactgtaaaaggtgagaaatggtatgacccacgtacttccaacggtgaagatgaaaatggagaagtagtaaaacgcataagagaatataaaaaaatggtatggagtaacaccttaagctatttaactactttcaacaacattcatcatttggactttcttgccggatatgaaattgatgatacctacaatgactatttatcaggggaagcttacaattttacaactcccgacaaacatgccattagtaatggaatgaaaacagtatctgtagggggaagtgattcaaggtacagactggtatcctatttaagccgtttgaattacgattacaaaaataaatattatctaggagctagttttcgtgttgatggcagttcacgtttgcaccgtgacaatcgttggggaacattttggtctgtatccggagcatggcgtactattgaagaagaatttatgcaacctgtaaaagattggttgacagacttgcgtataagagcatcatacggtgtaaacggtactcttccttctgattatttcggctatatgggattaagctccattagtggtggttacttggagcaacccggtattcaaatgtcccaaattgcaaatcctaatctgaaatgggaaaccaattataatatgaatattggcttggattttggtttttgggatcgtctgaacttcacgattgaatattatacccgtacaactaaaaacttattaatggactgtcctgtatccatgacaacaggatttagtagttatttaatgaatataggtgaagtgaaaaataaaggtattgaattaactattaattccactaatattaaaataaaagactttagctggaatacaactttcaatttaggtcataactccaataaagttgtaaaattagatggcgaacagacacaaattgtcagtggaacccaaatacacaaagtaggaagttcttatcgtacattctatgtacaagaatttgcgggcatcaatcctgaaacaggaaatcctctattctataccaatgaattggatgagaacggaaattatataaaagaaattaccgagaactctaaaaatgcacaattcattccttataaacatgcagaaccaactgttaacggaggtatctctaattcattgcgttataaatggcttgatttaaatttcttattctcctatcaattcggaggatattcttatgatacttgggcacaaaagacagaacatggcggttacgattcctatgcaaacattccgacttattatcgtgatagctggaaaaagccaggtgatcaaaccaatatagaagtatatatgccgggtaaatcatcttctgtatcaatgcataaaataacaagtagccgccgtatccacagtactgattatttccgcttaaaaaatatcacattcggcattacgttacctaaagaatggacaaataaaatcaatataggaaatgttcgtttttatgcatcagcaagcaatttatggacatgggcggcctatgacaattatgatcctgaagctgttagtgccggtagtgcaactcaaaccacaccgcctttaaaaaccgttacttttggtctcaacatcaatttttaaccactaaaaaacaacaatatgagaacattacataattttttatcaatagtcttatccatcggattgtttacttcatgtggaaacgattggttggatttagaaccgtccacacaaattccaacagaaacgagtatcaaatctctctccgacattgattattcactaaacgccatttatgcgacaatgcgtaatgcctatgcgtattccgggcgtttaatctactacggagatgtaacaggagatgacatgcaagctgtacaatcaacttgtagaacagctcactattaccaaatggattggttacctgcaaatggaccaagtacacactggtcatatctttattccatcattcaaaactgtaatgtaattttagacggcattgacaatatcgaaattcttccaaacgatgaagatgagcatatcttccgcaatgatttggaaggacaagcattagcaatacgtggtctggccctttttgaccttacgcgcttcttcggatatacttatttaaaagataacggagcctctttaggagtacctatcatcacttcagcatcagccactgccgacagtaagccttcacgtaacactgtagctgaatgttatgatcaaataatcaaagacttaaagaatgcggctagtttaatgatacccacatattcatggtcaggtactagtttgaatcaaaaagatttatccttaaataagaaaggtaaaatcagtaaatggggcacattaactttgttaagtcgggcatatctgtatatggggaagaacagtgaagctttacaagctgcagaagaagcaataaaaggatcggaagccaataaataccaattatggaataccgaagaatatcccactgtatggggtacggaagcctccgaagcaaatccgggagaaattctcttcgaaatagtcaatactactaccgaaagccccggcaatgaaagtatgggatatctaacttctccaaaaggatatcaagatatgtgcattacagtcagtttttatcaccatctgttagaaacgcctaatgatgtacgcattaagttattagttaatcaagacaaaaaagtaatgtatttgaataagtatcaaccacaacctggagaaaatattatggatgccaatattcctatagtacgtctttccgaaacttacttaaatgcagccgaagcagccgtgaaaaacggagatgcaacaaaagctgcaaaatacctgaaagccatcgcactccgaggaaatccggactatacgatgcccgcaaaggttacccttgatgatgttctagaagaacgcaggaaagaactcattggtgaagggcaccgcatgtttgacttattacgtaataacttacgagtaactcgtattaacgaaacagacgatatgatgaaagaggtagtgcatttcgctgacgaaaaaacatctatggatttcgacagaaactattatcgtacaatattacctattcctcaaaaagaaattaatgctaattctaatattgtacaaacaccagaatatctgaaataatagtcaacacaaattgataaactctaactgaattataaatcaaatcgatgacaagcaagactaattttatcaactactttcttcttgcatttaccctcgcattcatcagttccggccttagtgccggaactcttgatttcaaagacaagaagaaagacaaagagaaaaaagaagaattaacagccgacggtccatacgtattgtatcagcctgacggccaaatcagagtaatcaatgtagataagaaagggaatatcattgataccacttataccacattacctcaaaactttaccctgcatgtgacagaccacaaaggcaggtttccatttgatgtaaaactacacccggtaaaacgtcccggatggaattatccccaggcagacaaagtttttgtcatgtccgaccctcatggaaggctggactgtgtaatcagcctgttacaaggcaaccatatcattgataaagactacaaatggagcttcgggaaaaaccatctgatgattatcggtgatatttttgacagaggaaaagatgtaccgcaaatcttctggctattctacaaactggaagaggaagcagccaaagccggaggacacgtatcgttcatgctgggaaatcatgaaccgatggtactagccaatgacctccgatacaccaaagaaaaatataaaatattggctgaaaaactaaagatgaagtacccccggctattcggtcctgataccgaactgggcagatggttgggaacccgtaacaccatgcaaatgataggtaacgacctatatgtgcatgccggactaggcaaagacttctatgacaagaacttgagcatccccactgtcaatgaagaaatgagcaaaggactatttatgacgaaaaaagaacgtaaagcgctttctccactcacagccttcctgtatggaaacagcgggcccatctggtatcgcggactggtacgcaccgatgtcaaatacaatccgctggtaaaagactccctagaaatgcttatggaccgttataaggcaaaacacattattgtgggacataccattttcaaagatatttccactttctataacggaaaggttatcggagtaaatgtagacaataaagaaaaccgggaaaaaaagcgcggacgtgccatgctgattgaaaataatcagtattttgtcgttggtgacaaaggtatacaaagacaattagaataaagacaatacaccaaatcctaccggtggttttccaaactctcctgacaactttcctatttgtcaagagagtttttcttttccttttttgctagtttcctccttttattttatacctttgttcctcataataactaaccttataaaacgaaatgaaatctatccgagaactataccgcatcggcaccggtccgtccagcagtcatactatgggaccgcgcaaggctgctgaaatcttcttaggaaaacatcccgaagccaaagcttttcaagttactctttatggaagcctcgccgctaccggtaaaggacacatgaccgatgtagccattttagatacattgcaaccgcatgcgcctacagaaattatctggaaagcccatgtcttctatccgtttcatcccaatgggatgactttcaaatctttgaatgaaaaaggaaaagtgacagatgaatggactgttttcagtgtaggcggaggtgctctagccgaagaagggcacgacaaaggctcaactccggaaatctatgatatgaaccgtatgagtgaaatcctctactggtgtgaacgtaccgggcgcaattactgggaatacgtccagcaatgtgaagacaaagacatttgggactatctggcagaagtatggaaaaccatgagagaagccattgagcgtggtttggatcaagaaggcgtattacccggcccacttaatctgcgcagaaaagcctccacctattatattaaggcaaaaggttataaggacaatctgcgttcccgcgggttagtcttctcatacgctctggcagtcagtgaagaaaacgcctcaggtggcaaaatcgtcacagcccctacttgcggatcatgcggagtggttccggctgtactttatcacttgcaaaaaagccgtgacttcagcgatatgcggattttaagagcactggctactgccggattgataggaaatatagtaaaacacaacgcctccatttccggagccgaagccggttgccaggcagaagtaggagtggcctgttcaatggcatccgccgctgccagccaattattcggaggtagcccggcccagatagagtatgcagccgaaatgggcttggagcatcacttgggaatgacttgcgatccggtatgcggattggtacaaatcccttgtatcgaaagaaatgcctatgcggcagcccgagctcttgacgccaatatctattctgcctttacagacggtaatcaccgtgtatcctttgacaaagtggtggaagtaatgaaacagaccggccatgatcttccttccttatataaagaaaccagcgaaggtggtctggcaaaggattacgagccgatggattaataacagggaaaagaccgagaactgtatttataatacataaaagggtgaatcagaactcgttgcgaccatcattttcaatgctgataataaaaagatagttcaatttgttcctgatacaccctcttatggcatcattactataatgagagatagttcccctattacagaaaaaatcttttttaatcgctcaacttcaagaatcctccaaactgatcaaagtctacttccaatccattttccaatgtcagttcatatcccttgcggttacgttctatcttcaccgttttatgcccgttataattagccttcatatatttagaaatagcctgagggataaaagtagaaggaaccgccttgttcttgcaatctatctcaagccactctccctttgaattgaactccaattcaatgccatcggccaattttacatcataggaagtgctctgaaacaagtccttttcaatcttgatatacgcaactttagtctgagagaaatgtttgccaatcatttcacgtgcggcaacaggaagcttattcacatcgcgggtcacgacatcgcccgccatggcgaactgaagagagcataccagcatagccattaaaaataaaatctttctcataatctaatttattctttagttagttaatgccataccaacaactaaccgcctaaaaagattatgacgcgaaaaattattcctgtattttagatttaattaaggctgtctcccaacataggaggaagctcctccatatcctcatttttagatatgctcatttttccttcaggagtaatagtgatagagaaaggaatatacaaatctgtctgaggataactcacactggcagccaatatgatattttttccctcacgggtcttctcttcatcaaataccacgccctccaatataaaatgacggagatgatcagcacttacgaatcctgagaaactttgcttggtaaaagttttggcaaagacccgactcccattttcacgggaaattctaacgacgatacgattatcggcaaaaatccccaaatcacttttgactgaaggcagggaatcactgggagcacgctctataaacaaattatatttttttccgccactgacaatatgctggtcaatacgtgaaacctgcatacgctgcaaacctgtcacatgatccacactgtctatctggaacatcaattgttctgcatcaacggaagtctctttcttacctccgcaagcggccattacaaccagtaaaacgacaaataaaaaatatatctgtttcatctaaatctcgatttctaggtgacaaagtaacaaaaagtaacggacactcacaagaaaacctctataaaaagcgaaaaccgggcaatatcacattggccggccttcagagaaaactaaaaactaaactaaattatttattaaattagactaaacccaaaagaaaaggtttaatctcacttagaaaaaaaatattctttctttgaaaggcattcctactacaacgccttccaaaaatccataaaattcttataaagcccatagcagaccaactgatcttcttcttccaactcataattttcctcaaaatgattctccacctgatgctccaatatcgagatacccaaaccattcagcacttgctccccttttatcaatgcaatgattttcatattgaattccgtttctaatgacagatcactcaccttatagcctacaaaacaagaaggaagtttgaacttcatcacataatgttcctcgtcaatctgaaaagactccacattgacgtgtaaatccaataaccggaccaaactgcgtgccgcttctttctccggcgtcagaatactatctaaattaaaagcctcaagcacggtcttatgcacatcatctaccgcacgggcatagatatgtttcactcctttctttttcagcagtgccaccacacgcacagaagcaccaaaattctcgccgatagcaacaataaccacatccacatctttcagtggcagcacactgagcgattgttcgtccgtagcatcaataataaaagaagtcgcgattttgtccttcaacacatccacacgatgctcgtttgtatccactcctatcacctcatgtcccaatacggaaagctcttcggccaacacaccgccgtaatttcctaaaccaataataatgtatttcataactagttgattatgatgttatcactcggatatttatatttcgttatttttttctgtttaataaggctggatatcaaagtaagcacccctactcgtccgataaacatcagaacaatgacaatcagtttgctgtcacttcccaaagtaggtgtcagatccaggcttgaacctaccgtactgagtgccgaagtacactcaaaaaccaacgccatcactgaagcctgcggctctagaatgcttaaactaaagatacccgcaaaaacaatcagcagataaagaatcaatgtggcattagaacgccggatggaatcatgagataactccctgttgaaaatattaactttatcggcacctataagaatagcacgcaagttcaacatgactacagcaaacacattcaccttcacaccaccggccgtagactgcgtaccgccgccaatcatcatcagcaccaccatcagcagcaacgtctgcacactgaaagtagtcatgcccacacttgaaaatcctgccgtacggggacaagtcgcattaaagaagccctgcacccatttctctgtaaccgtcattcccgcaaaagcatgattccattcgaaaataacaatgggcacagtacccgtcactagcaagatagccgtcataatcaatacaatacgagtattcaggttatataaatgtattttacggattgtcctcttattctttttgacataacggtgatacaagcgcttgctttcataagaaaccgtctcatacagatttaccagtatcgggaaacctatacctcccaaaataatcaggaaagagatagtgatatatagcaagttatgattatgaagtaccagttcgttacctaagtttccatacaaagtagagaatccagcattgcaaaaggcagagatggaatggaaagcagaaaaagccaattcctcttcaatatccatacccatagtgccatgtatacttaaaaaaataacccccatccctgcagcctctatcgccaatgtaaatcctaatatatataataaggtggaaagtagcgaactgagtgactgcgagcttaccatatcacggaccaccagctgattgtagagcgaagtattccccataaaaaacatagcaaagaaactggtcagagtcatgactcccaaaccgccgatttgtatcaacatgataatgatgaacaacccctcgggcgtgaatgtagaagaaacatcgaccgaaaccaaccccgtgacacaagtggcactggtagcggtaaacagagcatcgataaaagaaataccatgataagtggcacgcggaagcatcagtaacgccgcccctatcagaataaatatgagaaaactagatgcaaagatcaaagatggattggtgcgcctgcccagcagccggactatcccattagacaattgcaacagtgaaagcaaagtgagcagcaccacatgatataaacggctgtggaaaaaagaccagaaatcatgaattcccccttgcacctccggttcatggaaaataaccggaatcaaagtcagataaagcatcagactcagtatccacgccagtccccggtacttccgcttcgtgtccgagtaatttaataaaagatgcagggaaatatcaaccagaaaaacaatccagacaaaatgatacagcatgtttatcacctccatttcttcaaaagaaataagaaatccatgctcataaaccaatgtaaggattaacaaagccgacatcatataagttatcccgtccatccatttcagcaatcgctctatgtacggttttactaacttcttacgataaataaatagtttgtgtaaaggttccatgtcgatattatcttgcattaacagaaaacaaacttaatcaaaatattcacatctctgtctataataacaaataacttcgcatttttactctgacagcccctttttttattgttcccgacaaaaaagtagttgaaaattagtaaggaatactttttttacctaattttgaccgcaaaactattaaattgaaagattatgagcacaaaacagaaacgttttatcttaccagaggatgaaattcctaaatactggtacaacatacaggcagacatgaagaccaaacccatgccgccgttgaatcccaaaaccaaagaagcgctgaaaccggaagacctctaccccatttttgccaaagaactttgcaaacaggaattaaaccagacagacgcatggattgaaatccccgaagcagtgcgtgaaatgtacaaatactatcgcagcacaccattggtacgtgcctacggactggaaaaagcactagggactcccgcacatatttatttcaaaaatgaaagtgtcagccccatcggctctcacaaactgaactcggctctggcccaggcatattattgcaaagaagaaggtgtaaccaatgtcacgacagaaaccggtgccggacaatggggcgctgctctatcgtatgccgcaaaggtattcggactggaagctgccgtttatcaagtaaaaatcagctataatcaaaaaccctatcgccgcagcatcatgcagacattcggagcaacggtcaccgcctctccatccatgtctacccgtgccggcaaggatatcattacccgtaatcccaattatcaaggttcactgggaacggccatctccgaagctatcgaactggcaatgagcactcccaactgtaaatatacactagggtcggtattaagccatgtcacactgcatcaaacggttatcggtctggaagccgaaaagcaaatggaaatggcaggcgaatatcccgacatgattatcggttgctttggtggtggttccaattttggaggaatctgtttcccctttatgcgccacactatcctgaatggaaaacaaacccgatacattgctgccgaaccggcttcgtgtccgaaactgacccgtggtaaattccagtatgactttggcgacgaagccggatataccccgctgctgcccatgtttacactggggcataatttctctccggccaatatccatgcgggaggtctccgttatcacggtgcaggtgtcatcgtttcacaattattgaaagataatttgatggaagctgttgatatccagcaattagaatccttccaggctggttgtttgttcgcacaagcagaaggaatcattccggctcccgaatcgtgccatgccatcgctgctgccatacgcgaagcgaatcaatgcaaagaatccggcgaagaaaaagtgatcctgttcaacctttcaggtcacggactgattgatatggcctcatacgaccaatatctggcaggtaacttgatgaattatgagttaaaagacgaagatatccagaagaacctggatgaaataaaagacatgtaatcagggtataaaataactgaaggatacggaaaggatatattatcctataaactacggcaaactaaacagttgtatccttcaggttaaagattcttttactgataacttctatctcccaagcttgcggagttaactccatagcctttggagttatctccataagcttgggagttaactccaaagactatggagatagaaataatgcgttcaatcaggtttagacataaaataaaaaaggcttaaccatacacatgaaaacacaaatcattcccacctacaggtttactattaaaagcatcaccacatctcactctaagcacaggctataattcaaagctgcgaagcattttaatttcatccctccaaatggtatcatcgggagtttcaagaataacaggcatatcgttaaaacgggaatcctgcatgaaacggcgaaagaaatcaataccaatcagcccctttccgatactgtcatgacggtctacccggctgcccaatggtttctttgagtcattcaagtgaatggcacacaaatagtttccccccacgacttcatcaaactcggtaaagacccagtcatattcattcgcaatatcataaccggcggtataggtatggcaagtatccagacagactcccacacgagatttatcctccaccttatctataatatatctcaaatgccagaattcatttcccacattacttccctgtccggctgtattctcaatcacagcagtcacaccggtcgtcttatccaaagtcatattgacagactcggcaatcctgtccaggcacttctctattgatatcttgttcaaatgacttccgggatgaaaattcagcattttcaatcctaacaactcacaacgccgcatttcatccaagaatgccgcacgactcttttccatcccctccctatcaggatgtcccaagtttatcagataactgtcatgaggaagaatataccggatatcaaaaccttctttctcacagttttctttaaacagagtaatactctcgacagacaaaggttttgcaacccattgccgctgattctttgtaaaaagagcgaatgcgtccgctcctatccctaatgcattaacgggggccatttctacgcccccgcttacggatacatgtgcacctatttttttcattctctttccattattgacagacacaaagatacagagaataagttagaaattatattgtgcactcaagtttatacggtttgcctcacggttcacatcattaaaattctctctccagccatgcagatattccacacccacctgcaggttatggcttatattccaaaacacattagcgaccagatactgaccttttttatactgggtttcattaaagtgagcatagcaatcttccgtaaacaggcgtgactggctatacgtagccgatgcgaatacccgtttcgagaaattatactgtaatccgacataccatcctttcatgggaagtacctgcatgcgcccggactcgtcggccaaaggaacgatatctacattcaagttactgatatcattcaaatattgagcaatacctttaccataagtatattgtccgtaaagctgaaaattacccagtcttgctgttcccgatgcctgtatcccccaaccggtcaatgactttgccttattattcacttgatcctcataagtcatacttctcaagattcctcccacacgtatatggctcgctttcgcccaagaatactgcacataagcaggaatatccggcatccgctgcttaccgattctcacatcttttgccggagttccgtctactgaaggcatttccacaccgacacccactttcaaacctttaatcaaattagcttcataacgcaactgggtggcccgatagaaagtcatcccgtcaggtccttgaaaatcaatagtcggaggagctgcggcaagatccataaacaatccggtatcataccccatggtaaaacccaagaaagataaataagcattctgcaattcaaaagtctttccacttccacggaagtttccggctgtataaacgatgaagttgcccaaatgcttggttctccccaccaattttaaaaagatagtggaagtgcttgcatccatctggaactgattacggacagcagtggatcccggttgcggaatgagtgcagggataaagtcaacgtcatccactatcccattaaaatcatattccattgtagttttcaaataaccaccgatacccaatgcaaactttccctgttggtcagtaagtaaaaaacgaggggcacggggatcatggaaatgcggacgttgcgtttcttcaaatacattgattaattcctccttgccatttttatcttttgagataataacaacaggtcccggtccttccaactccggataaagatctttttgttgcgcaaacatcggcgtaacaatcattgcgcccagtataagacaactcattgatttaaagatagttttcataaaagttaagtttaggtaaatagtctattcaatggactatgaacaaaaagtttagaaaaaagtttgggaaatgtttgcaaattcaaaa

SEQ ID NO: 14476 - DNA, 3100 bp, Unknown
  gut microbiota DNA sequence
tgtcaaaagtaccttttgtaacgacggcaaagggtgtggaaggcattgattttaaggatggtgaagattgcttgattgttgatgaccctgccggatttgcagaagctgtcatagccttgtcaagtaatccgcagttgcagagacagttggttacccatgcggaagacagtttgcggcaagtatataaccccggacagatgcaggaaagaaggcttgccgtgtatgaacaaatattaggggataaagtggggtaatcttgggtgattatttcttttttgttacctttgcggcattatatataattgataattatgctgaaacagttctttagtttgttgaagcggtatattcttccataccgcaaatatttgacatgggcattgatactgaactttctgtcgcaatggcttaatgtgttttcgttcatggcgattgtgccaattttgaacattctgttcaaaattgataccaagtcttatgagtacattcctatggatattcataatttggataaggatgtactcataaataatgcctattactttgtgagcaattttgtggcgacaaatggtgcgttctatacacttgccatgatgggaggaatacttatctttatgactatgttgaaaactgccggttattttgcttctgcggctgtcatggtacctttgcgtacaggtattgtccgggatatccgtattcaggtttataataaagtgttaagtcttcctttgagttttttctcagaagaacgtaaaggagatatcatagcccgtatgagtgcggatgttacggtggtggagaactcgttgaccagttccatcgatatgcttatccgtaatcctatcgctcttttggtttgttttgtcactctgttttcggtaagttggcaaatgacgctttttgttatctttattttacctctgacaggttggataatgggggttgtcagccggaagctgaaaagacagtcctctacagcacaggcgcaatggggagatattatgtcccaattggatgaaacattaggaggtttaagggttatcaaagcgtttatagccgaaagcaaaatgtctgctcggttctctaaaacaaacaatgacttccgcgatgcaatgaacgagatgattatccggcaaagttcagcccaccccatgagtgagtttttaggcacttgtgtgattgtgaccgtgctgttgtttggcggtgctttaatcttaaatacaaactatgctccgatggatgcggctactttcatattttatctgattatcctttatagtatcatcaatcctttgaaagaattttcaagagcattttataatattccgcagggattggccagtatggagcgaattgatatgatattgaaagcggaaaatcatatcgtagagccggagcagcctttgccattggacgctttcacagataagttagagtttaaaaatgtaagtttcagctatgtagaagggcgtccagtcttgaaccatatcaatctgacggttcctaaaggaaaaacgattgcactggtgggccagtccggttccggaaagtctactttagtggacttggtaccgcgttatcacgatgtatcggagggtgcattgctgattgacggcaagaatgtgaaagatgtatccatccacagtttacgttctctgattggtaatgtaaatcaggaagctattctgtttaatgacaccttctataacaatattacttttggtgtagagaatgccactatggagcaagtaatagaagctgccaagatagcgaatgcacatgatttcattatggaaacggaaaaaggatatgacacgatgattggtgatcgtggagggcgtttgtccggtggtcagcgtcagcgtgtcagtatagcccgtgcaattttgaaaaatcctcctatccttatattagatgaggctacttcggctcttgacacagagtccgagcgtttggttcaggaagcgttggagcgtttgatgaaatcgcgtactactatcgctatcgcacatagattgagtaccattaagaatgccgatgaaatttgtgtactttatgaaggtgacattgtagaaagaggaactcacgatgaactgatagccttaaatggatattacaagaagttgaacgatatgcagtctttgtaaagtggagcaaataaagaaattggcaattgttattcccgcctacaaggggcgtttccttaaggaaacgctcgactcaattgcagttcaggcccataaagatgagttcgtgttatatataggtgatgatgcaagtcctgaaagattggataagattgtggaatcttatcagaataaggtaaatctggtgtatcatcgctttagcgaaaatatggggggcaaagatttggtggcccattgggagaggtgtatccagctgtctgcagagccgtttatctggcttttctcggatgatgatttgatgccggctgatggtgtggaacgtgtcatggaggctttgtcgcgcccacaccatcagcgaggatatttctttcgttttccattagctgtcattgatggtgaaaacaagcggatacgtgccaatcgtcctttggaagaaggaagtgtgtcttgttaccggctgctgctagataagttacagggaaagatagattcggctgccgtagagtacgtgttcagtcgggagatatggcagtcggcaggtggttttgttcattttcctatggcttggtgttcggatgatgctacgtgggctgcttttgcctgtcatgcggggggtgttatttctttgccggggcagcctgtatgttggaggaatgttgaaggtgcaaacatcagtaactctgccggtcatgacaaagataaattgcacgctactattcttttcttgagatggatgaggaatatgttttccgattatgtggatgatccggagctgattaatgcattgcaatgctatatccataccatccttcgtatttcattgcataaacattataatatatgtggtttgtggggggtatctatggctttgggaagatttaataaaagggcggcctttactacgtttttcaggaattttaggttgttctcttaatttcatttatgcagcc

SEQ ID NO: 14477 - DNA, 314 bp, Unknown
  gut microbiota DNA sequence
tttgcacacccttccgtgctccggcaggtggctatgctcgtgtcgccctccgtatttctcagttccaggttaccgtccgtcagatgaaggctgtagaacgtgtcgaggtaaggcacccctttcttgtgccacctgcaggcgggcactttcaccgtcaaagagacctgtatattatctccggccgcccattcctgcccctcaatgggattcagtacggtgaaatccgtcgtatgtgtataatcgttgtatctgcgtcgcaacaggatgcctgcctcctgcgcctgcttgcggatcagttcgacgacgaatgcgtg

SEQ ID NO: 14478 - DNA, 546 bp, Unknown
  gut microbiota DNA sequence
gtatgtgtataatcgttgtatctgcgtcgcaacaggatgcctgcctcctgcgcctgcttgcggatcagttcgacgacgaatgcgtgtgaggaatagatacgatccagcagggaggcggcaatcggtgtgtttattgatttccacaatgttatctcgttccatacaatggcccgtccgaccacattgctgctgtcatcccttgccacgagtattttggctcctgcgaaattggcatagaaatccgctgcattacgggccttgtcttcatatctcatacaggagttgtgcaggctggattcgctaccgtcagatatgggactatagttgctttccagataagcctccataaaatcgttcatactgtcatgcagtctgattgtgaccttgctgtccagtgagatggcgctgcagaaatagttgatttcatcgggctggtacggtcccagatttttgaacagctcgataaacgtggacggttccagatctgtccggttctccggaaaccagggtgcctgcggattgttccggtccgggaaattgggatgg

SEQ ID NO: 14479 - DNA, 4299 bp, Unknown
  gut microbiota DNA sequence
aagaagaagaaagaacggaaagagaagaaaaagaggaaagaaaggaaataaggaataaaatgtaaaaaaacactaaaaggaagtctcccggttatttgtacacttgtgtaatgaatgggggttgtaaatcaatactttatgtttggttagtgtacaattttaacttttgattgtatgggtttgcaatatacttttgttttcatggtggagggaaatgccctccttttgataatttaaattcatacatgaatggtttataccgatttatgctctttctatttctcggtgttcgatgaacatgccgtggatatgacattgaaagagtttgtggaacttctgcgtggcgaacgttggaaagcgcaagtggaagagtatcagcgcctgaaggcttcgggccgggagacagaggccaagaaattaaagagaaaactggctgcgctggtgatagccgggcgttgcgaagggagccatgccgaaactaatctgaagcagtggagcggggacgccatgctggatgtggataaatgtaacggccgtgtgtctgagttcttgcaagtcttgaaggacactccttgggtgaaggcggcatggcgcagcgtttcgtacgacgggctgaagctggtggtgcgtgtggaagcagagagtgtggacgagtatcgtctggcatacgcgttggtggcatggcacgtggcgcagcttcttgcctttccctgtgacatgagttgcaaaaatcccacccgtccttgctttgcgtcgtatgatccggaagctttttttcgtccggataccgaagtttttccctggcgccgctttgtgacggagcatcccgacagggtgggggagattctggcagagttgaaagtgaagaccccggcaagtgcatccaagcctctcgttgcggcttcgggcatgctgcacacattcttcaacgagttcttggcgcagaatccctttgtggatggcaaaaagaatgagtttttgttgaagctgggacgtatcgcccgctataaaggagtgggggaagaagagttggtccggctgaaaacgctggcggtggaaaggctggcgggtatggggtgtgccgccggggatatacctccgcgcatagactccggataccggtatgccgacatgaacaagggccccgaaacacctgcttccagggctcacaaggctcaaggctcacttaggcggtattctgattccggcgaagagggtgaagaagctgaaatagagaaacttgaggctgacaaattgcgccgcaatgttccgtgtcttccggatgagctgttcgaccgtttgcccgactttttgaagcgtggtttgacacacgtccgcaacaagcgcgagagggatattctgttgctctccatgattaccaatatcagcggttgtctgccgggggtgaggatgaattatggaggaatggtttattccgccgatctctacctggtggctttagccggttcaggcagaggaaaaggggtgatgcaactggcggcaattctgcccgcagccattcaggagtattacgatgaattgaacaggaaggatgagcgtgagtaccggcagaaactgctgaagtggaatctggaggaacggcttgccgctcaggaaaagagggttcccgatttggaccaatgcccggagatgccggtggaacgcatcctgaaggtggctcccaatatttcgaaaagccagttgatattagctttggaggcgggtggatcggtcggcttggtgatgaatgcctccgagctggatatgataagttctgccatgcaccaggagtatggaaaacatgatgatgtgatgcgtgccgcctcccagcacgaggaggtgtcttcttatttcaagacggatcaccggcttgttattgtgagtgatcctcatctggcattatgtgcttcgggcactcccgcccagttgcataaatttatttcttcgctggagaatgggatgtacagccgtgtggctttctatgtgggacaggccccctgggagtataagtctgccaatcccggcaaagtccggctggatatgcgcgcttatttcaaagggatgggcgaggagctgctgcgtatgtttatctttctctccggatcgtctaccgaggtgattttcaccgaggaacaatggaaagagcatacggagcgtttcagaacgtatctgcgtgaggtagtggcggaagatgatgattctccgggtgctattgtgctgcgccacggactgatgatgtctcgtattgccatggtgctgactgcattgcgtaagtgcgagccacaatggaatacatcggagtggaaatgttcggatgaggatttccgtacggccatgcagatagtggatgtgttgctggaacacagtttgctgctttccacttccatggatgatactgccggaagaatcaggccggtaaaggcttttttcaaactgcgtcccatcttgagaacaatgccgcgtgagtttacatattcggagctgatggcggctgccaatgaagcagggttgcctacagcatccgtgaaacgttatttgttgcgtttggtgtattatcaaatcgttgagaaagaggatggtaagtatagaaagaccggtaagtcttggcctaaattaccgcctaagtgagccctgagccttgtgagcctaaaatactggtaaaaaaggtcctgttgttttcaaaaaacaacaggacctttccggtaaaacaacaggggattttaaaaaaacaacaaggtctttcgaagtaaacaacaggtcctttgggaagcgtatgtcctaaggctctcccagatgcctcactatgattgccacttcatgcttcagaaagctgtggcggaatttgttgtagcccgcttcgtttaattcttcctgcagcagcatatttctccgcatccagcgatatagggtttgcagggctgccgcagcggtccgtccggggctatataattctgccagttccgctttgtcatacgctctgataatgaatgctttttcttcttggttcatgttcttttatctgttttgattatagagtaaagatacacaaaatgtccttgttttcctactctgcctgtaagttattctcgacatttctcgacaatgttctacggctctctaccaatgtcgacacagggcttccgcttcatcgtatctttgtagtgtaatcaaaagtcaatcatagccggcttagtggttaacggttgattgccagtgtgtttcttaatttgcaagttttaatttttaatttgaaaaagtatgggaagaacagtttcttattcggtggtaaagcgtaataatccgcttgatcaggatgcagtgcctaagttttatgcacaagctcaggccaatggccatgtagagattcgcgaaatggcggatcgtattcagaaaacctgtacggtgacgcgtgcggatgttatggctgtgcttgttgctttggaggatgtgattatggaggctctggaagggggtgagattgtaaggcttgccgatctgggcactttccagataggtctgagcggaagaggtgcggaaacggaggatacgtatgatgtgtcgatgattagaaaagcgcgtatcaatttccgtccgggtattgcgctaagcggtattctggcagcactgaaatatacgaaagtggataaattgccggtgaaaacgaaggaggagcaaaaacctgcttaagtaggtggcggacaagtgtttaatttttaaaaaaaactgtagaatgaaaggtaaatctgtttggagcactattttgaaagtggtgattgcagtagctacggctattgcgggtgtagtaggaatcagctcgtgcataggaggatgagagtgattaatcttattgttgtccactgttccgccacaaaggcggacagggactttaccgaacaggatttggaggtgtgccaccgcaggcgtggaatgaacggacccggatatcatttttatatccgtaagaacggggatataaaaacaacccgtcccatagagaaaatcggggcgcatgcgcgtgggtataatgcgcagagtatcgggatatgctatgaggggggagtcagcgagcggggcaggccggcggatacgcggacggtgtggcagaaacattcattgcgtgtactggtcagggcgttgctggtggattatcccggttgcaaggtttgcggtcatcgggatttaagtccggatttgaacggaaatggtgagatagagcctgaggaatgggtgaaacagtgtccctgttttgatgtttcaaaagaaaagtatagtaaataatatttatatattaaaacataa

SEQ ID NO: 14480 - DNA, 17624 bp, Unknown
  gut microbiota DNA sequence
attccacatacagcaccagccctttcaaatactctccttcaggatggtaaatatttacgggatgatctcccggctgagtcaattgatgcagaatacgtacactacgtccgctttgtgccgcagctgtaaataccgcattgcggaaattcatcttatctaccacctgcgagcaagagaaagtaaacagaatacctcccggtttgattttctcaaatgctttagcgtttagtttcgtatagccgcgcaatgcattacggagagcatccttgtgtttggcaaatgcaggagggtcaagaattatcaaatcatattgatctcccatacgatccaggtacttaaaagcatcctcagcatacgccttatgacggggatcacccggaaaatttaattccacgttcatattggtaagatcaatagcttttgccgaactgtctaccgaatgcaccagattcgcgcctccacgcatggcatagaaagaaaaccctcctgtataacaaaacatattcaatacattacgccctttggcataacgttccaacaaatgacggttctcacgctgatccacaaagaaacccgttttctgccctttcagccaatctacatggaatttcaatccatattccatcgctatgttttcgggacttcctcctttgatgaagccgttctccggtcccaagtctgccttgaaaggcaacgtggtttctgatttataataaatgttccggactacatcccccatcacctcggacaaagcatcggctatctccatacggtaaacgtgcattccggccgaatgtgcctgcatcacggctgtatgatcgtatacatcaataatcaaacccggcaagttatccccttcgccatgaaccagacggtaagtgttatttgcaggattaccagccaaacccaaactgcgacgcaaatcataggccacttccagtttatgcttccagaattcatgatcaatctcaccttccttgaaagagagcacgcgcacggcaatacttcctatctggaaatgcccgcaagctataaattctttctttgaagtgtatacatccactatctcgccttcttcgggttctccttcaatgcgctggatagctccggagaatacccacggatgaaaacgctttaacgactcttccttacccggtttcaggtatacttttttataagccatttgtatttactgttgtttctattggttcttcctcttttatctcataattacccgtacgttccaattccgtcaggcaattgtaaatttccacacaagcccacgcgtctgtggctgcatatagtttctgtccctcgctaagcacatccgcttcccaattggaaagacgctggctttttgaaatcttctgaccaaacaaattcgcgaagattttttgcagactccggtcagctatgccgaatcgtcctacatagtcctgcaactctatccagttaccccggtcgggatgcacattctcacgtttcctcaacgaattaaaatcgtctttcagcgacaaacctatcttcaaggtatcgctcatcaaaaactcttgcagagaatcgggcatacctatccggttcaaacggaacaagaaacaggtatcttgcgtagatatttgcaacaaagccaccttatgagtagtacctcgcttgaaagacggacgtgtttccgtatccacccccactatgcgctgatctttcaagtaggctactgctttctcggcctcgctctctgtataaatcacgaagatacgtccgggaaaaagcaccttgggcattgctgctatctcggctttagtaatcgttttttttatttgtttcataataatgaattctcatcttccatttcttcttcctcgtcatcatcggcaggagtatactttacatcgtgtaaggcacgcatggtgtttaccaaacgctgcccccagaattccctgaaatgttccttacagactactaacgaatcattcatcgtttcgttcagtcccagttggaatacgctgataaagtctttcaaatcctgataaatatccgccaaatcttctgaaatacatttcttgatgggcgtgtcactgtatgccatatccggcaagaacacttccagataatcgtccttcgcccccaatacaccggccacagtcctacgtatcagttcataatcttcttcagtaacgaagatttcaggctcatcctctcctatcggttcacatggaggcaacaaagtcgctttcaaataaagcaacggaagtatttttaaggcagtatctacaaaatcatagcgtttcatatcacgggcacgttccagaaaaccacaatattcggcggccaccgtcacaaattctactgtatttttgtcaaatatcacctgactgtacttttccataaacattaaaattgaatcgcaaagttaagaaaaaagagattaaataaggcaataattaatgtttttcatgtacatttgcgaaataataaatagaatgaagacgtatggcaaagaaaaaatcagataaggagacagagcctaaaaaggtatcaaccaaacgattctccgctttttttaagaatgaaacaacgcattttgtaatcggattgattagtgttatttttgctgtttatctgttgctggcatttacctctttcttctttacaggagcagcggaccaaagtattttggacaaccagcagccgggtgaactgatgcagactaccaaccatgtaaagaactatgccggagcacgcggcgcacagcttgccgaattccttataaatgaatgtttcggactggcagcttactttatcattttgttcctggcagtagtgggtatgaaattaatgaaagcctatcagttccgtatctggaaatggttcatgtcctgttccatcctgctcatctggttctccatcacactgggttttatttttgacggcactttcggaaacagtttcatctatccgggcggactgcacggatacaatgtaagcaactggctaatttcacaagtaggtatacctggcttgggattgttattgttcatcacagcactgttgttctttgtatatttaagcaatgaaaccatacaaattatacgcaaggctttgcaccctaatttcaaacggaagaaaaaaggagagcaagcttcttctgcaactgaagaaagtccggtcaaagaaactccccgaaaggaagagaacaagaaggaattctccaatcccggacctgccattgtagatttcgaactggaacagccggaaaagataaaggaagaagtggaagaccaggtccctttcccttttgagaacaaccaggttgctggaccggaaatagaacaggaacctgcctatatgactgaagaagaggaagtagaagatacagatgaacctgatttttcaatcagtgaagaaacaaatgaggaagacgaagcatacaaaggtcccgtacttccaccatacaacccccgtctggatttggaaaactataaattccctagtttggatttgctaaatgaatacgaagatgatggtcccaatattgacatggaagagcaaaatgccaacaaagaccgcatcatcaaggttttacgcagtttcggaatcgaaatcagctctatcaaggcaagcgtaggtcctaccatcacattatacgaaatcactccggcagaaggagttcgtatctcgaaaatcagaaacttggaggatgatatcgcattaagtttgtcggcactggggatccgtatcatcgccccgataccgggtaaaggtactatcggtattgaagttccgaatgccaacccgcgtatcgtaccgatgaagtctatcctgaacagtaaaaagttccaggaaaccacctatgaactgcctgtggcgttaggcaagaccattaccaacgaagtctttatggtggacttggcaaaggctccccacatgctggtggccggtgctaccggacaaggtaagtctgtaggactgaacgccatcgtgacttctttattgtataagaaacatccggcagaactgaaattcgttattgtagacccgaaaaaggtggaatttgccatctatgctccgattgagaaacatttcctggctaaactgcccgatggagaagatgcaattatcactgatgttactaaagtggtacaaaccctgaactcattgtgtatagaaatggatgcccgatacgacctgttgcgcaaagccggttgccgtaatatcaaagaatataatgcgaaattcattaaccgacagctgaatccggaaaagggccatcgcttcatgccttatatcgtgatcatcattgacgagttcggtgacttgattatgacagcgggtaaggaagtggaattgcctatctgccgtatcgctcagttggcgcgtgcggtgggcatacatgccattatcgcgacccagcgtccgacaacgaacattattaccggtactatcaaagctaacttcccggcacgtgttgccttccgtgtagctgccatgatggactcacgtactattctggaccgttcgggagcacaacaactgattggtaagggagatatgctttacttgcaaggtaatgatccggtacgtgtgcaatgtgcattcgtggatactcctgaagtggagaaaatagccaattacatcagtaaacaacaaggatacaccaccgcattcatgttgcccgaatacgtaggcgaagagagtgaaagcagtgtaggggaagtggacatgaaccgattggaccctatgtttgaagacgcagccagactggtagtgattcatcagcaaggctctacttcgctaatccagcgcaagttctctatcggttacaaccgtgcgggacgtatcatggaccaactggaaaaagcaggaattgttggccccactcaaggaagcaaggcgcgtgacgtactctgcatggatgaaacagacctagaaatgaaattgaacaatctacaacaataagttgtttaataatgttatgataaaaatgaaaagaacatatttactggtattaatccttttcctttcggtcagcctgtccgcacaaaaggacaaacaggcacgggagatattggacaaaaccgccaatgccctgcaacaggccggaggcatccgtgccacctttggggggacaggcaatggaaccttattgctaaaaggcaaccagttctatctgaacagtggcggaatacaaagctggtttgacggaaaaacgcaatggagttatctggaaagcagcgaagaagtgaatgtgagcaatcctaccccagaagaattgcaaaccattaacccatacgcactgttatccatttacaaaaacggatataattataagtatgcggggacaaaaagctgtaacggcaaacaagggttcgaagtgatactgaccccggagaataaacaagatatcacatccatcaccttgttcgtttcccaaacatatcagcctttatatataaaggtagaacaaaataataaatcggcaaacgagattatcgtcacttcttaccaaaccaaccagccgctggacaatgcgacattcaagtttgataaaaagaaattcccaaacgctgaagtgatagacttacgatagcaaacagagttcaagatagagagataatataatattcatcaaattaaattaagtaaagaaataagtattatgagtacagaaaaagttaaatgccttatcatcggctcaggtcctgccggctataccgcagccatttatacaggacgcgctaacatcgctccggtcttatatgaaggcttacagcccggaggccagttgaccatcactaccgaggtggagaatttccccggatatcccgaaggtatcagcggtacccagctaatggaggatttgcgcaaacaagcagaacgttttggcgcggatatccgcaatggtattgcaacttccgccgacctgagcaaacgtccttaccgcatcaccattgatgacgaaaaagtgattgaggcagaaactgtaattatatccacaggtgccaccgccaaatatctaggtctggaagacgaacaaaaatatgccggaatgggtgtaagtgcctgcgccacctgcgacggtttcttctatcgcaagaaaactgtagctgtagtaggtggcggtgacactgcttgtgaggaggctgtctatctggcaggactggccaaacaggtttacctgattgtacgtaaaccgttcttacgcgcatccaagattatgcaagcacgtgttatgaaccatcctaacatcaaggtactgttcgaacacaacgctgtcggcttatacggagagaatggcgtagaaggcgttcatttggtaaagcgtcagggtgaatgcaacgaagaacgttatgacttgcccatcgacggattctttctggctatcggccataagcccaattcagacattttcaaggattatttagacacagacgaagtaggctacattattacagaagcaggtactccgcgtacgaaagtccccggtgtgttcgctgccggcgatgtggccgacccgcattatcgacaggctatcactgctgctggaagtggctgcaaagctgccatagaagcagaaagatacctatctgccaatgacttattataataaaataaactaaccccacaacaaacactatgacacattttctaaggaagatggcagctgcctggatcattctaggcagcgtgtcggtgggctttgcacaacagcaaacgcctcccatccctacggaccctaacgtccgcatcggtaaattggacaacggattaacttattacatccgtcacaacgaactccccgaaaatagagccgatttctacatcgctcaaaaagtaggttccattttggaagaagacaaccagcgaggcttggcacacttcttagaacacatgtgctttaacggaactaaaaatttcccggacaaaaccctcatccaatatctggaaagcataggggtgaaattcggtgaaaacctgaatgcttacactagcatagatgaaacagtatacaatatttccaatgttcccgtgatacgtgacggcgttgtagattcttgtttgctaattttgcatgactgggccgatgacctgacactggaccctaaggaaatagacagcgaacgcggtgtgattcatgaagaatggcgtactagcacaaacgctatgatgcgtatgtacgaaaaagccctccctaccctttatccgggaagtaaatatgcctataggcttcctatcggcataatggaagtagtagacaatttcccttatcaggcattacgcgattattatgaaaaatggtatcgtccggaccaacagggtattgtcgtagtaggcgatatagatgtagacaagattgaggcaaagataaagaagatattctctcctattaaaatgccagaaagcccagcagaacgagaatacttccaagttcccgacaataaggaaactattgtagcaatagaaacggataaagaacaggcaaacccagtagcttatttatgctacaaacatgaagcaattcctaatgaacaaaagggaaacatggattatctggtagtgaactacatgaaatccatgatagaaaatatgttgaacgcccgtctgaacgaactgacccaaacagccaatcctcctttcatcttcgctcaagtcagcgaccaagaatttctgatttccaaaacaaaagatgcctttacaggaatagtagcaagcaaggaagacggaattgacagtgcaataaccgccattgtacgtgaaattgaacgggcccacaaatttggtttcaccgcgtccgaatatgcccgcgccaaagcggactatctgcgtatgctggaatctgcatacaacgaacgcaataaagtgaaaaacggtgcatacgtggatgaatatgtacgccacttcattgacaacgaaccaattccaggtattgaaaatgaatacgccattatgaatcagatcgtccccaacctgtctgtggaaatggtaaacagtctgattccagccttggttaccgacagcaatctggtagtaaacgtattcttccctgaaaaggaaggattgaaagttccatccaagaaagaagttttggctgctatcaataaggtaaaagctgaaacactgactgcttatgaagacaaagtttctgatgaacctttgattcctgaaaagccccaaggcggaaagattacaaaacaggaaaatggtccgttcggttctactatcttgactctgtccaatggagtacgcgttatcttaaagcaaaccgacttcaaagcggatgaaatcagaatgagagctttcagtccgggtggcagttccttgttcccgaatgatgaaattatcaatatcaatgtcatgaatgatgtggcaagtatcggcggcttgggtaacttcagcaatgttgatctagagaaagtattggcaggtaaaaaagctagtgtaagtgcttccgtcagtggtaatacagaagggctgagcggaagctgctcacccaaagattttgagaccttgatgcaattagtctatttgtcattcacggctccacgaatggataacgatgcatttacttcattcaagaaccgtctacaagcatctttggcaaatcaagaggccaacccaatgactgccttacaggatacattacaaaaagccctctatatgggacatccgcgtactatccgtatgaaagccgacatggtggacaagattgactatgccagaattatggagatgtacaaagaccgtttcaaagatgccagcgactttactttcatctttgtaggaaatatcaaaccagaagaaacggaaccactgattgcgacttatttaggcgctctgccttccgtcaatcgcaaagaaaccttccgtgacaaccacattgatatgcgccaaggtgactataagaacattttcaacaagaaattggaaactcctaaagccaccgtattggtaatcaacaacgggcaatgcgcatacacattgaaaaaccaaatcatgatgagtatgctttcacagatactgaatatcatgtatactgaaagcgtacgcgaaaaagaaggtgggacatacggtgtaagtgcattcggcagtctgaccaaatatccaaaagagaaagcggttctgcaaatctatttcgatacagatcctgccaaacgcgccaaaatgacggatatcattttgaatgaactgaaccaatttgccaacgagggtccgtccaccgaaaacttgaacaaggtaaaagaattcatgctgaagaaatacaaggaaaatgccaaagaaaacagttattgggtaaatatgctggatgaatatttctgggaaggaacagatatgaacaccggctacgcagacatagtaaacagcattaccgctaaagatctgcaagaatttaccaaagccttgttggagcagaataaccgtatagaagtaagcatgacttcggaagaaacaaaataatcccatccaagcctatgcttctatctattataagacagaatcaaaaacttgcagccaagcggaatcctgcattcgacaggaaccgctttgccaagtttttaatttactttatggtcgcattttgggcagcatacctcatctttatcggggtcatgctgtccttcgcttttgaagatatctttcccagcatggaaccttaccatatcatgaaccaaggattgatttatcttctgatacttgattttttgctacgcttcatgctgcaaccggccatgtcgcaagaaatcaagccctatctgcttatgccaataaaaaagaataagctggtggataccctgttactacaatccggaatcagcagttacaacttcttctggtttttcctgatcgtaccttttgccctgcttacgattatccgtttctatggattcacgggcatcctatgctatctgtgcggcatttggcttctgatggctatgaacagttattggtatttgatatgcaaaactttactgaatgagaaattgctttatatacttctcccgatcggagtatacggattattagcgggaactgaatttattcccgaaggaaatccggtttccacgttcatgatgaatctaggagaaggatttatagaaggaaacatactctcctttctaggtgtcatagcagccatattgttgcttctgctagtaaatcgcaagctacagctacacttcatctataatgaaatagctaaagtggaagacaccaagatgaagcatgtatccgaatataaattcctggaccgctatggtgacgtaggtgaatatctacgtctggaactaaaactgtgtttccgtaacaaaaccgtaaagacacaattccgcatgggatttatcatcatgcttgctttttcggcactgattgccttcacggatgtgtatgacggaacaggaatgataaattttatctgcatatacaattttgccattttaagtatcatgaccctggggcaagtgatgtcttttgagggcaactatctagacggtcttatgagccgtaaggaatctatctataacttgcttcgtgccaagtattacctgaactgcatcatcgtgttcatccctttcctgattatgatgatccctgtagctaaaggcaagatacccttcctcatggctctatcctatatgctgtttacagcaggattcgtattcgctatgatgctgcaactggctgtgtacaataaaaagacactcccgttaaacgccaatgtcatgcgaagcaatcggggaagttccttattccagaccattatcatctcatgtgcttttttcctgcccttgattatcaacaaagctctgacggctttctttgaacaggatacagcctgcatcatcatgatgattatagggttgttactgattgcaacccacaatatttggataaaaaatatctataaccgtttcatgaagcgccgttatgagaatatggaaggcttccgtgactcacgttaaaacgaattgcgtatgaatatcataataaaccaattacaaaagaactttggcccgaaagtggctgtagacatagaaaattattccattcaaagcggtgacatgttgggactggtgggcaataacggagcaggaaaaacgaccctgttccgcctgatgctggacttgctgaaagccgacggaggcagtgtacatatcgaaaacatcgatgtgagccggagtgaggaatggaaaaatataacgggagctttcattgacgaaggtttcctgatagattatcttacccccgaagaatatttctactttgtaggaaaaatgtacgggctaacaaaagaagaagtagataaacgtgtcgctaggtttgaacgttttatgaatggcgaagtcatcggacaaaaaaaactgattcgtaactattcggcaggcaacaaacagaaaataggtatcatttcggctatgctgcaccaaccgcaggtactgattctagatgaaccgttcaactttctggaccctagttcgcagtccattatcaagcatttactgaaagcttataatgaagaaaccggagccaccatactggtatccagccataatctgaaccacacagtagatatatgcccacgcatcgctctgttggaaaacggaaagattatccgagatattgacaataaagggaattccgccgaaaaggaattagaggactattttaatgtaacagaatgaaaaaactactatcccatttgctggtattaggtacactggccatgttgttggcttcatgcggtacctctgccccacgttataactacaaggaactggcgcgtgcctccatccgtctgaatatggatattgacatgaaagacaatcaccaactgtacgtagaatcagcagcatggctgggagtcccctaccgtggcggtggtaacagcaaacggggagtggactgttccggactgacttcacatttatataaaaaggtataccacaaaaagctgaaacgtaactcagatgaccaacgtacccaagattgccataaagtaagtaagagaaacttgcgcgaaggagatttggtattcttccataacggtagaaaaaaacggattgccagtcatgtaggtatttatttgaaagataataagtttatccatgccagtaccagccggggagtcataatcagcagcctgaatgaagattattatcgtaaacactggttaagtggaggccgtccttgacaagatccttccgggcaatatattcattacattaaaatgagtttaatttgaaagaatgaaatacacaacatacctttttgattttgattacacactagccgattcttcacgcggcatcgttatctgttttcgtaatgtactggaacgccatgggcatacgggcatcagtgatgaagccataaaacgcaccattggaaaaacactggaagattcattcagtcttttgagcggaatcactgctcccgaaacattagccgaatataaaaaagaatatgtaaaggaagcagatacatacatgactgtcaacactttcttttttcctgaaacggttaccgtactgaaaacactgaaaagtcaaggcgcccaaataggtatcatttccactaaattccgttttcgtatccgcgaaatggtagaccaacattttccgaaagatttttttgacattattatcggaggagaggatgtaaagcaagccaagccagatcctcaaggtataaaaaaagcactacgccgactgcatcgccagaaaaacgaaacactctacatcggtgacagcacagtggacgctgaaaccgcccaagcagccaaagtagactttgtaggtgtactcaatggcatgacaacccgtgaagaactgattgtatacccacatcggcagatattagacaatctttcgttacttccattaattcataaattcaccccttacgaaccagacaaacattttccggaaaagttcttttattcttcctattttcctcaaaagatagtagccttctacaaactgttccatcaaaaacaaataagaggaaaacatgaaataaaagagaatccgacatgttgcgtctgtaagaactgcggaaacacatttcaagggaattattgtccccattgcggacaaaaccaccacacaccacgttttaccatacgaaatgcctttcagaatattttgagcggattctttaacatagacaatggtttcagccgtaacctgatagaactactctaccgaccaggatacatgatacgggattatctgagggggaaacgtgtacattactataaaccatttcaaaccttgttcgttctagctgctctatatatcatgggtgtacagctcattgacccgacagcgataaaactatcggaaaaggaaatggaagaagagcctactatcgccagcctgatggatgacatcaaatatcaacaggaacagacatcagacagttgtaccaaatattatttaggacaaagtattacttatgcagacagtgcacggtgggctcaaacccacagtttatcagaatcaatacaagcacaaatcgatgcaaaattcagcaatcaagaccaagatgagctaaaaaaagaaataagcaaacaaataaaaaaggagcttaaacaaaaaataaaagcaaaaaatggagagattgatgactggagaggcctgatgaaagaaattggtacgactttggcaaaacaagatagcttgcggatagccactttaggaagagaagccaacaaacaagactcaaccatatcggaaataagaaaaaacatattggcaaacatggcccaacaagataatccctatgaagatcaagatatctggaatgatttgagcgaagccggaagtgaaataaaaaatgttttcaacgaaatgacaaacaattattttacagaaaatagttttctctctgcagtcggtaatctgatgaaaagttggatacatggcaacaaagccttcagcatccttgctttgctcccccttttcacaataagcacccgattaagcttctgccggacctctatcggacgtcgactaaacctgacagaaaacttttttgcacaagtttatatcgcttgccaaatcttatggatttctttactgatcctgccatttaccgggacagcacacttgaatgatatttttgatttaagttacaaagcaatctttatattatttgtctgggattaccgccaactgtttggactttcctggtggaaaagtttctgccgtacaataatcatgttttggtattgctttttgggactgttgctagtctgttctatcattataggcatcatcgtattgatagcctatattatacaatggggtaaataaaagtacaatcacacaaaccttatttatacaatcgcacatccacaaaatgcaatatgaataaaaacattgagtacaagaaaaaagaagatgatttttctttgcagatataaataaatatagtaattttgtgcccgatttagtccgatgaggtagaaaaagcgaaggcagtgatgcattccaccttacggagaaaaccgtttaatattataaaaagatgtacgtaattgtagaaattaacggtcagcagttcaaagctgaagaaggtaaaaaactgtttgtacaccacattcagaacgcagaaaacggcgcaactgttgaatttgaaaaagtattgttggtagacaacaatggaacagtaactgtaggtgctcctactgtagaaggtgccaaggtagtttgtgaagtagtatctccgctagtaaaaggcgataaagtacttgtatttcacaagaagagaagaaaaggttatagaaaactgaatggtcaccgccagcagtttacagagttaactattaaacaagttattgcttaatcatttaaaatttaagaagaaatggcacataaaaaaggtgtaggtagttctaagaacggccgtgaatcagcaagtaagagattaggcgttaagatatttggtggacaggcttgtaaagcaggtaacatcattgttcgtcagagaggtacagaattccatccgggtgaaaacatcggtatgggacgtgaccatactcttttcgctttagtagatggtacagtatgtttcaaagtaggtcgcaatgacagaagatctgtttctgttgttcctgctgtagaagcataatcagttacaaaataaaaaaaattgaaagactcttcaaagaatgaagagtcttttcttttagaatgtcctgaacactaaaaccttaccttcggtccggattataaaatgcttggccaatgcctcattcaaagtcccttgccaccaattggtaaacacagataaaggataagccaacccttcggcaaataaaaccgtactattcatattaaaaatagaaatctgctgaccgatataagattcgaacatactgtcctcctttatgggaacaaagataccgtaatctgtcatcatattaacctccgccttctccatataatctgccaacaaactgacattccctattgtatgatcttctcttttccctgtagcccccatgatagtaatacgcttcctctcctgtgataagcagaagcggaatgccttactcaaatcatttgtttcctgctctgtctcactatgaatcaacgaagcatatcgctctttaatacccggcaataaagaatcaccatcgccaacaatggcttccggcattctacctgaacgaatataagtatttgctgccccgtcacaacaaactacataaggacactgcctcaaccattccaacgccaacggatgggaaggaaaatcaccatcagccagaataattgtttccggcacatcacatcctatcggcaatttatactctttcataagataaattcattaattgtttccacttcaaataaccgaaaaaagcgattaccgtataaagtccatataaaaaagaagtgaaatataaatctttgtaaatatagataccacaagaaacaatatcaacaaccagccataccaaccattgttccacatatttatgtgcaagcatccacatggcaataatactaagtgaagttgttaaactatcccaccagggcactgtgctatccgtataagttttgagaataatccctatcagcacaaacaccacaagcagcacaacaaacataggcagcagcaacttagacggtgtgccagatacaggcttctcccctttatccggcgtatggcgcaaccacatcccccaaccataaattccagccaacaaataatagatgctgatagcagaatcggcatacagacctacttgataataaataactatataaatggcaggcataataacactgaccggccacaaccaaatgctcgccttatattcaaaccataaataaagcagaccgattaaagtgcccgctatctcaagataattcatccttcttacttttcattttctaatctggatacaaaagtaacgaataactcatacaccttaccatttttttatctatctttgtccattaattcaagaaatatcaaaaagactgaaaagatatgcttaccattaaacaaattacagacaacacggaagaggtaatccgcggactggaaaagaagcactttaaagatgcaaaagcaacgatagaacaagtgcttgcattcaatgacaaacgacgtagcacacagaatcaattagataaaaacctggcagaagtgaactcgctctccaaatctatcgggcaactgatgaaagaaggaaagaaagaagatgctgaaaccgctaaaacacgtgtagccgaaatcaaagaaaccagcaaagctttacaagcagaaatggacaaagcacaggaagacatgaccaacctgctttacaccattcctaatgttccttacgacagtgtgcccgaaggtgtaagcgctgaagacaatgtggtggaaaaaatgggcggtatggaaaccgaactccccaagaatgcacttcctcattgggaacttgccaaaaaatacgacttgatagattttgacctaggcgtgaaaatcacaggggcaggttttcctgtatataaaggtaaaggagcacgtcttcaacgcgcattaatcaatttcttcctggatgaagcccgcgcttccggttacgaagaaatcatgccaccgacggtagtaaacactgcatcaggttacggaacaggacaacttcccgacaaagaaggacaaatgtatcattgcgaagtagatgatttgtacttaattccaactgcagaagttcctgtaaccaatatttatcgtgacgtgattttggacgaaaaacaattgcctatcaagaattgtgcatacactcaatgtttccgtcgtgaagccggatcttacggcaaagacgtacgtggcttgaaccgtttgcacgaattctcaaaagtagaactggtacgcattgacaaacccgaacattccaaacagtcacatcaggaaatgttggaccatgtagaaggtctattgaagaaattagagctcccctatcgcattctccgcctttgtggtggtgatatgagttttacagctgcactttgctttgactttgaggtttactcggaagcacaacaacgttggctggaagtaagttctgtatccaatttcgatacgtatcaggctaatcgcctgaaatgccgttaccgttctgccgaaaagaa

SEQ ID NO: 14481 - DNA, 251 bp, Unknown
  gut microbiota DNA sequence
ccctattttgccatcggctttccgaacatggcaggaggatatgaagtgcgcaacagatacttcaagggatgtgtcgccccgaaagacatcacccatatccgacagcaggacggacaacgatgtatgtgttacctgttcgaggggttcatggattacctctcattccttaccatccgagtaagaaacaatccgcaacacccgcgattggacacacaggactatgtcatactgaactccgtttccaatcttgc

SEQ ID NO: 14482 - DNA, 12474 bp, Unknown
  gut microbiota DNA sequence
tgataagcatgggacgtgttgtgctggagttataggtgctgtacgtaataatggaataggtattgttggaatagcacctaacgttgaaataatgcctattagtttagaccttgacgggagtgtgaaatactctcaaatggtgaatgctataaattgggcgtggcaaaatggagcagatgtgattaatatgtctttgacatgtgatcctgatgataaaatgactgatgcaataaaaaatgctttgacaaaaggacgaaatgggaaagggtgtgttgttgttgccgctagtggtaatcaaggacaatctagtgtgggatatcctgcaaatattgaaggggtaatagctgttggatctattgacagaaatggtgtgcatgcttccgatgcaaattatggaaaaaatctggattttgttgcgccgggagtaaatgtattgacaacaatattaaatggggaatatgatgttttgagtggaacttctttggctgcacctatgatttcaggtattgcggcattattactatctttagatcctgaagctacagtctctaaagtgtattggaatatggttaatgcttgtagggaattaccccaaaatactcatgataaaataggacatggcttggttgatgcttatttggctttgatgatgaataagcttagtgaagttaaagaagaaatttacggaagtcattttaaggattcttgtcccatttcttatagtgttcctgaaccatttgatatggaatgggtagttacatcaaattatgtcgaaccatctttaagtgatgaggatactacagtaactaaggttgttaggacttataaaggacagcatattgaaattcttaatactaagaaaggtgcaggaataagatatgatgtggaaggatatgttgtagataagtttggtcaaacattgaaaacgcttaagacttactttactagtggacctcctagtccgatgactggaacattacaatggcaagcgtcttcaactataggggatcattatattgattgggaaactggaggaaattttgatagtcaatatcctacttatgatatgaattactcttatgagccatttgtaaatagatatgataatattgaaaataatcctcagtatgctgtaagaatagaagaaaagtcttttgcggaaattgaagatttcaaggtggattgttcttgttataggattaattttaggagagcttctgggtttatgacggatacttttatatggataactacagatgagggagaaggacgtccatttcgtattcaggtttttgttgaataataaatatctttaaaataaagatgtcaaatacattagaattgtaatattcttattactctttatcgaaaagtgttaacgtgtgtgcgtttcgtacaattgtgatatatgagtcaatataggtagggagcaacttgtagcaaatttctctgaattttgtaacaagactcaaagaaacttctcataagttttttcgcatatttctgaatacgttttagaagcgcgaataagaagagagaaaatgtgaacttttttgagtacatatccccgaaaggcacgtcttgaaaaagataattgttaagaaaaagagaacggaatataaattccaacttacttatagcacagatataattttttaagaataaagtatgaaaagaaaattgtttttaggactgtgtatggctacttttattgttcctgtagcaagagctcagtatccccagataactgaggaggcgaagcaagcctaccagaaaatgatgagtgaagaacgtcgccgctctgacgaagcatgggcaaaagcattgcctgtcgtactgaaagaagcgaaagaaggtcgtccgtatatttcgtgggcttcccgtccatacgatttgccgcaggcacgaattcctgctttccccggtgctgagggaggaggcatgtacagtttcggcggtcgtggcggtaaggtgattaccgtgactaatttgaatgaccgtggtcccggttctttccgtgaggcttgtgagacaggtggagcgcgtatcattgtcttcaatgtttcaggtattattaaattggaatctcccattatcgtccgggctccatacgtcactattgcaggacagacagctccgggtgacggggtatgtattgccggagagtctttttgggtagacacgcatgatgtagtggtacgccacatgcgtttccgccgtggcgaaacaaaagtctggcatcgtgacgattctttcggaggcaacccgattggaaatatcatgattgaccattgctcttgtacttggggattggatgagaacatctctttctatcgccatatgtacgatcccagcgaaggacaatatgaatcaaaagatctgaaactgcctaccgtaaatgttaccatacagaatactatctcggcaaaagcactggatacttacaatcatgcattcggcagcactttagggggtgagaattgtgcatttatgcgtaacctgtgggcaagtaattcgggacgtaatccttccatcggttggaatggtgttttcaattttgtaaacaatgtagtgttcaactgggtacatcgttcttcggacggtggcgattatactgctatgttcaatatgataaacaactattataaaccgggaccggccactccgaaagatactcctgtggggcatcgcatcctgaaacccgaagcgggacgaagcaaattggatcataaagtatatggccgtgtttatgccgatggcaatattatggaaggctatcctgccattacagaggataactgggcaggtggtatccagattgaaactcagccgaatacagagggatatacggagaatatgcgtagcaaccgtccttttgaaatgccatacatccgcattacttctgcacatgatgcatacgattttgtactgaaaaatgcaggtgccaacattccttgccgtgacatcgtggatgagcgtattatagaggaagtgagaacaggtattccatattatgataaaaagatggccaaagatgctaacggtgatttgaccggactggctcctaaatcaatgggagaagacggacagtttaaatatcgccgcttgccgaaagattcttataagcaaggtatcattaccgatatccgccagatgggtggttatccggaatacaaaggaactccgtatgtggatacagatggtgacggcatgcccgatgaatgggaaaaggcaaatggcttgaatcctaatgatccttcggatgctaataaggactgtaccggtgacggctatacaaatattgagaaatatattaatggtatcagcactagaaattgtattgactggtctgatttgagaaacaattatgatacattggcttctaaaggaaagttgatgtaataaacggaggaaagaagacaggatatgatacaaaagttaggtataatgtttctgttgctcatggcggtagtcattaccgccggagcagtggatttggaccgtgaaggccgcgatccggcttacgtggaatctattgtgaaacgttcgcagaagattgtagataaactggaattgacagataccgttgccgcccgtgaagtgacaactatcatagccaaccgttattttaaattgaatgacatatacgaaacgcgtgataccaaagtgaagctggcaaaagaaaccctgacgggcgatgcgaaacaagaagccgttaaagctgccgaagctgaaaaggatgcggcactttaccgcactcatttcgctttcccggccgatctttcgctttatttggatgccaagcagatagatgcagtgaaagatggcatgacttatggtgtggtaatggtaacttataaagctacggttgacatgattcctaccttgaaagaagaagagaaagcgcagattatggcatggcttgttgaagcccgtgaatttgccatggatgctgaaaattcaaataagaaacatgctgctttcggtaaatacaaaggccggattaataattacctctctaagcggggatatgatttagtgaaagaacgtaaggcttggtatgaacgtatcaaggcacgtggaggaaagatataaattaatgtttattgaaaagcagaaaaaggagcttgcccggtaaaacggtgtcaagctcttttttatgtgtggatagagagtacaacaagctttctgttccgtctttgatatagaaatattcgcaatgtgtgtttgaatcatgttaaaagcagagtattatgttatgaagttatagaaaaaataataatttagcaaccaaatgaatcaactaaagaaactatttgcagtggcagcattgactgcatgtgtgttgcctgtggcggcacagtatcctgtaattcctgattcggtaaaaatcagaggagaacaacaacaaaaggaaatagaccggaaatcggatgaggcatgggcgaaagcattacctgtagtaatgtctgaggctactcaaggacgtccttataaaccatgggcatccaaacctgaggatttaataaagagcaacatacctgcctttcccggggcagaagggggaggggcctatactcccggtggacgtggaggaaaagtaattgtggtcaattcgctggctgacagtgggcccggaacgttgcgtgaggcatgtgagaccggtggtgcgcgtattgttgtgttcaatgtttcgggtgttatccggctgaaaacccctataaacgtccgtgctccgtatatcactattgcaggtcagacagctccgggggatggagtttgtgtaacaggggcttctttcttgcttgatacgcatgatattattatccgccatatgcgtttccgtcggggggcgcaggatgtgttcttccgggatgatgctttgggaggtaactgtgtgggtaatgttattatcgatcattgctccggcagctgggggctggatgagaatatgtctctttatcgccatgtataccatcgtgattccacaggacatggtttgaagcttcctactgtcaacataactattcagaactctattttctcggaagctttggattgttacaatcatgctttcggggcgactataggtgggcataacagtatgttttgccgtaacttgttcgcatccaatatcagccgtaactgttccattggcatgaatgaggattttaatctggtaaacaatgtgacttttaattggtggaaccgttctgttgacggaggagatgaaaccagccgtttgaatattattaataattattttaaaccgggtcctatcactccgaaagataagccgattgcctaccggattgtgaaacccgaatcgagccgtgacaagaagaaaccggatacttttggtaaagcgtatgttgccggaaatgtagtggaaggcaatgcgcgtgtgacaaagaataattgggatggcggcgtgcaggtatacgatatgccggacgcagggaagtttacagatcaaattcgtgtaaacgagcctttctcaatgccccatgtgactattatggatgccaaaactgcctataattatgtattggaaaatgccggggctactttccctaaaagagatgcggtggatacccgtgtgataaagacggtgaagacagggaaagctatttatgtgaaagacgctcctgaattcgttagtccttatgtgaaaagacgtcttcctgttgattcttataaacaaggtatcattacagatcctcgtcaggtgggtggtttgcccgaatataaaggtactcctgtggttgatacggatggtgatggtatgccggatgcctgggaggtgagatacggactcaatcctaatgatccgggtgatgcggtgaaagattgtaatggtgacgggtatactaacattgaaaaatacattaatggcatagatcctgcaaagaaagtggattggacggaagtaaagaacaatcacgatactttggcaaaacgtaaaagcttgatgtaaaatgaattataagttattattattgggatttttaagtttggggtttgcgcggatttctgcgcaaacctttcctttacaggtgaaggacgaaaaactgacttatgtgactgatgaacgtggaaaccgtattctagattattcttcttgcggttaccataattcggaacagcctatacctgatgtggcgaatgccgtttttgtttcatggcagcctggagataattcctctcgtatccagcgtgccattgactatgtatcttcattggctttggataaaaatggttttcgtggggctgttttgttggataaaggaacttttgaattgaatgagagcttgcgtatctctgtgtcgggagtcgtgctgcgcggcagtgacagggaacagaccgtattgttgaaaaagggagtggacagaggggctttgctttatattgaaggacggaatgatttggctgttacggataccttggatgtactgacatcatacgttcctgtaaatacttgtacttttcaggtaaccaataatgtacagctggtttccggagagcgggtccggattgtccgcccctctacgaaagaatggattgcttctgtcggttgtgatatttttggcggaggtatttctgctttgggctggaaagaaggagagatggatttggtttgggataggtcagtaagtaaggcggatggaaaccaattgactttggatgctcctttgacaatggctttggataataaatggggaactgtcaaagtgttacgttatagttggccgggcagaatcacagaagcaggtttggagaatctgacattggcttctgactataataagaagtatcctaaagatgaggatcattgctggacgggggtatctatagaaaatgccgaaaactgttgggtacgcagggtaaattttaagcactttgcaggaagtgctgtgattatacagcgtaccggttctaaaacaactgtagaagattgtgtatccacagaacctgtttcagagataggtggaatgcgtcgcagtacattttatactatggggcagcagacactttttcagcgttgttattctaaacagggtattcatgatttctcagccggattttgtgcggcaggtccgaatgcttttgtacagtgtgattcggaagagtcgttaggattcagcggttctattgattcctgggcctgtggattattatttgatgtggtaaacattgatggccatgatttggtatttaagaatttgggacaggataaaaatggtgtcggttggaatacaggcaacagtcttttctggcaatgtacagctgccgggatagagtgttattcaccggcaagagatgcggtaaaccgtgcatacggttgttgggcgcaattctcgggtgacggccaatgggcggaatcaaataatcacgtacatccccgcagcttgttttatgcacagttggcggcacgtttgaataaagattgttctgaccaggcacgtattcttcccagggctaccaacgcaaccagcagtcctaccgtagaagcggcaatggagatggcaaaggaagcttatactccccgtcttactatgcaaaaatggattgaggaagcaccctatacagcctgtgtgtcttccgggaagctgaaatctttagaacatttaaagtttaatacacctatatataaggacaaaaaggatcatctgtttgccattattaatgggcgtatgcagatggatggccggttactggtaggcggcagacaggaggttccttggtggaatgggaaactgaggaccagcttcttgtctaaagccaagccacatgttacccgtttcgtgccgggacgcgaaggacttgggctgacagatagaattgattctacggtgaattatatggtgaagaatcagattttggttttagatcataattacggtttgtggtatgagcgtcgtcgtgacgatcatgagcgcgtccgtcgtcgtgatggagatgtgtggggaccattctacgaacaaccgtttgcccgcagtggaaaaggtactgcttgggaaggattgagcaagtatgatttgaaccgtcccaatgcatggtattggaaccggttgaagcagtttgccgaaaaaggggcggaaaaaggtcttttgcttttccatgagaattacttccagcataatatcttggaagcgggagcacattgggtagactgtccttggcggtcggccaataatatcaatcagaccgatatgcctgaacctgttccttttgccggtgacaaacgtatctttgtagcggatatgttttatgatatcagtcatcctgtacgtcgtgagcttcatagaaagtatattcgccaatgcttggataattttgccgatgatgcaaatgtggtacaactgatcagtgcggagtttaccggtccgttgcattttgtacaattctggctggatgtgataggagagtgggagaaagaaaccggtaagaaagcaactgtggcgttaagtgcgacaaaggatgttcaagatgccattctgaatgatacgcagcgtgcgaaattagttgacattattgatattcgttactggcactataaagtggatggtctttatgctcccgaaggtggaaagaacttggctccccgtcagcatgcccgtaaaatgaaagtaggtaaggttacttttgatgaagcttatcgggcggtgagtgaatatcgtaagaagttcccggaaaaagcggttacttactatgcgcagaattatccggatatggcttgggctgtcttcatggcaagtgggtcttgcccggttgttccagttgctgatgaaagctttttaactgatgcggctgctatggatatggaggatactggtacaaataagtatcagaaattggtaaaatctggtattggaagtatcatttattcccattctgcaacagatattcctgttcatttatcacctggaaaatacatattgaagtctgttgatccgaagaccggagcaataacagtgattgctaaacggttgaatattaaagatgtatatatgcttaaagcagagaaaaacaaagattgtatttattggtttcatagaatttagtacatggaaggagaaccggatttattttggttctcctttttaatgaaaatctgtaatatttagcatatatgtttttcagcaggttatctgttttttcggtccaataatcaaatattacctaaaaaagtagcgtatcctccctagttttgcatcatcatcaaaacaacctataattagtatactgtgatggaacaaaacttaaatgataagacagcttgcttggtaaccgctttccaatctggagatgtaagtgcattctctacattatatgatatgcatattaatcttctatttaattatggatgtaagttaactactgacaaagaattgttgaaggactgcattcatgatgtctttgtaaaattgtatacaaagaaggctgaattgggtatcattgacaacttcaaatcatacctcctcatttccttgaaaaacaagttatgtgatgaacttcgcagacggatgttcatgtcggaaaccgctgttgaggaactgaatcccgttgcagcaggtgatgatgtagagaatcaatatttggaaaaggaaaaaagttgttttgaaaatataaaagtaaaacatttgttggctcaattatctccgcgccaacgtgaggcacttaccttatattatatagaagagaagaaatatgaagatatttgtaccattatggatatgaattaccagtcggtacgaaatttgatgcatagaggtattacaagattaagggaattggtaggataatattttaagttttcaggtgagtacaactttgaaccactatccgtcataatgaaaaatgattgtaacgtggatacaaaaaaggtgtatagcaaggtagaagactttttgaaggatgacgactttatcaagtatgttctggatgatgctcctgaaatggcttttcattgggataagcttttaaaggggcatgcagaactgctgaaagtctttgaagaggccaagaatgtattattggtttctgatgaagcgatggaagtaatgactttatctgaagagagaaaactaaaacatcgtatttttactacattagagataaatcatatggattattaattaatttgttaaccatagaaaaatgagaaaagacatgaagaaatattcgagtactttgggatgtggtatgaaacaagcacctatggtattgggattatcagtcgcattatgtatgcctgctgcattttcgtatgcgagtgctagtgaaggaatgggtactagatccattcagtctgttatgcaaggacgagtcgtaacaggacaaattttggatgagttaggggagcctatgattggggtttctgtattggtaaaaggtactactgtgggtactatcactgattttgatggtaattatacattggatgttcctgctgggaagaatatattagtgatatcttatattggttataagacaaaagaagtcactattggtaagaataaccagatgaatattaaaatggaccctgatacacaagctttggatgaagtggtggttattggatatggtgcggtgaagaaacgtgatttgactggtgctgttgtatctgtaaagagcgaggaaattacaaagaatccgggttctaatcccatggaggctttgcaaggtaaggtggcaggtttggatataactcgtacttcaggccaggcaggtgaaggggtcaaaatgcaattgcgtggaacacgttcgtttacagccagtggtgatcctacttttattattgacggcatgcccggtgattattcgactttgaatcctaatgatattgaatctattgaagtcttgaaggatgcttcttctacggctgtatatggtgcggcgggtgcaaatggtgttgtcattataacaacaaaaagtggaaaagcaggaaaaactaatgtaaactttaatgcttatgccggatttaatggttggtcaaaaactcctaaaatgcgcagtggagaaagctatattcaaggtttgcgtgacgccaataaagcaacaggaaactggaattctgctgctgatgacgaacgtatttttgcatcacccgaagcttatcaggcacacttgaatggtgattatattgattgggcagatgaattgatgcagaatggatatacccaaaactatagtttgtcagtatcgggtggtacagaaaaaacaaaagggtatatttctttgaacttttcagatgaaaagggacagtatactggagataattataaagtatattctactaatatccgtatagatcatacagtaagagattggttaaaaataggggccaatatgcaaggatcttatgttcatagaaataaagcttatgctaagttggaaacagctctttctgcagaacctttaggaaagattaaagatgaaaatgggaattttaatgttgagcctgtaataggcagcactatgattaatcttttgctaaatacacagagtggagtgtataaaaatcaggatcagaattttaaactttacatgaacccttatatcgaacttactccgataaaaggtttatctgttatttcccgtttgggagctaccttaaattattctcgaaataattatttccaaggtcaaggatcatatcaatattattattcttcaggacctgcttcaaaaggtaccaatgacaatgtatatgctactataacgaataagcgtaattataattataaatgggagaacataatcacttataattttaaagtaaaggatgtacatgatattaccgttacaggtgtcacttcatgggaacataatcagtatgatgaagcgtatatgaagcaaaccaatatcgaaaacaatcggtatatgtggcataatatggatgttggttctaagaattccagcaattcttcattgtataacatgtcaaaaggaatgggctttgtaggacgtgtgaactattcttatatgggtaaatacttgttctcagcttcagtacgtcatgatggctcttcacgattgaacccagagaaccgttgggatacattccctgctttctcacttggatggagaatgtcagatgagaaattcatggcaggcacacaaaactggttgagtaacttgaagttgcgtgttggttatggcgtgaccggtactgctgctattgatccatatacttctattgcaagccttgattattttggaatggctttaggaggtgaattgcaaaatgtatattcattctcgaaaaattatacgaatccggatttggcgtgggagaaatcttacaatactaatgtgggtgtagatgcttctttcctaaatggacgtattgattttaccggtgatttttacattacaaaaacaaaaggagttatttggtcgagaaaccttcctgtaacaaatggtgcgtttagtccgacagaatattattttgtaaaccaaaatatttgt

SEQ ID NO: 14483 - DNA, 11817 bp, Unknown
  gut microbiota DNA sequence
cctcccccgttgtcacgcaccttgacacagattccttccccggtctttctgatgtcaacccacagtcttttcatcccctctttgtccttcagggcatgcttgatggcattttctatcggaatctgtatcatcatggaaggaagtatttcttggtcaagatggatggcagcatctatggatgtggacagtataaagctatctcccaatgcttcacgttccaggttgataaacgtattgacaaagtccagttcctcagccatggtaacgcacagttgctcggtcagttccaggttgcgccgcatcagttttaccagcccacgcatatttccgacttgctcgtcggtgtagttacccatctcacggttcagaatgttaaaaatgaaatggggagaaacccggttacggatattctccatacgcaaagtggcaatcatattctgacttctcatttgcagcaagaaacgctgtctcttgttgtatgtgtagacaaatacagcgagccccagaatacagatgcaggcaaacatccacaggtaaagcgtctggttcagcgccagaacttcattctctttttgctgaatgaaaattttctgcttcatcagcgtggtgtcctgactgtatttcagatcaatttcagctgtacgcattttaatacgctcattacgtgtagaatcatcaatacgctgattttccatttgataataataagcttgtttgaaatctcccacctcttcaaaataatgttgtaggtaacggttacggatatgctgcatattcggttccacataatcaggctggatagcctcagacatacgtttacgtgctaaaggcaaattattctgcttcaaggcaagttcaatcaactgggtatccaaataatagagagctgtctgattttcgatagaacgaaaaaaatcactacaaagatttaaatagtatgcggcagaatcaacctgattcatcaacagaaaagtttctcccaaattcatttcagtcagatgttcctcaaaaatcatatctggataagaacgagctaacaataatgattttctgaaaaattctaaagcattaggataatcagcacgaaaataataagaattaccacgattattcaaataaatatgtttctcaaatggaagcatcttatcatattgccgagccgccagttcatagtaataatcacaagaagtaaaatcacgaagttccatataaacctgtgccaatccgtaataaacaggaaaacgcttttcttcaggaatcttcaatgaatcacagtaagacaaagctttacgataccacatcgcacctttatcataatgaccggtacggacaaaagcatcagccaaattaatagaaatatcatgaagcatatctctgttactacccttcaaacgataatcgaacgctttttgaaaacataccactgaagaatctgtcaacccttgacgaacacatacattaccccgcatattgtaaatctcagcatacaaatcattaattaacggtgacggttcagctccatcgcaaaatacttccgctctatccatgctaagtttagccgaatccatctcggacttaaacatatatgcttttgccaaaagaacaagataatggcaatacgccacactatctgtggtaaacgacatttgcctggcagtccgggtacatacataattaggattttttgacagtgaatcaattataaaatcataatactgcatataaatatccatttgagtctttttataagttccggaacttgtacaagatactccccatatacaaaataatatactataccataaaaatttaaatatcaaatgtatgttctccatcttatcctccttcatagttttattgacaaacataagcaaaaataaacacaagcataagcttttattaaaatttatttgatcccaaaaagccttttagataaaatttacacaaagatgaagattcactttgtcatgtcatgaaacatccctacctttgaaaaaagaatttataaatgaagaaacatggaaacactatctaattctgtcctgactgtacaaatagccgaacatggcgctgagcttcaaagtatcaaaaaggatggcaaagaatatctttggcagggagacgctaaattttggggacggcgctcacctgtccttttccccatagtaggacgtgtgtggaataataaataccgtcatgccggaaacacttatgaaatagggcaacacggttttgcacgtgatatgaatttcaaactaacctataaagaagacaaaggagctgtatattggttggaaagcactcctgatacattgggcaagtttccttttcccttccgcctattggtgggatatttattagaagaaaataaaatcaccgtaaaatggcgtgtagaaaatctgggagctatggatatgtatttccagatcggagcacatccagctttctatttccccaagttcgatgctgctacaaaggatcgtggcttctttgtttttgaccgaaagtctgatttagaatatatcatgccaatagaaaaaggttgcgtatcaccagaacgtcatgtactaaaattaaataaagaagggctgatgccaattgatattcatacttttgattgtgacacttatatttttgacaataaacaactgaaaaaaataaccttactggataaaaagaaaaagcctcatatcagtttggaatttaattctccgttagtagctttgtggtctcctaccaaaacacatcccgattgcccatttgtttgcattgaaccatggtatggacgttgcgattctgtagggtattcgggcgaattaaaagaccgtgaatggatacagaaactagaaccaaaagaaacgtttgatgtagaatataaaatcattatagagtaatcaagaacaacggggtatgcacgatgagtcacaccccatctttttttcttattgacttcccaaatacagaaatatcataccaataagtactagcaccaaatccacgaccttgcttttaagattcttctcacggaataccatcgcaccaaatataaaagagacaagcacactgccacgccttaccatagatacaatggaaatcattgccccgtccaagcttaaggcatagaaataaacaaaatcagctgccgacagaaaaatagatatcagaataatacaccaatgccaatgaaacggagtggtagatttgcgcttcggccaccataacaatattaagatacctcccatcataaacaattgatagatattataccatgactgcacaatcattctatctagtccgatacctccttgatcggcaggcgccatgaggtacttgtcataaagcccgctgacagctcccaacacagccgccattaccacataataaatccacttattatgtttaaaatctattccctctttctttccgctgcggctcagcataaaaaaagagaagacagccatcagcacaccaatccattggtaaaaattcaaacgctcaccaaagaccactaaagctcctaccaacaccatcaccggacgggtagcgtttataggtcccacaatcgtgataggcagattcttcattccaaaatatcccaacatccacgacgaaaggacaataacagatttcaacaccacataacgatgcacctcccacccagcaacaggcacataaaaaatagaattctccaatattcccggcctccacactgacaatacaataaaaggaagaaatatcaaactagagaacaacgtattaagaaataatactggaataaccgcattgtcctttaacgactgtttcttaaatacatcataaaatcccagcagtgcagccgagagaaatgccagaagtaaccacatcatatctttcaccttatttaaaacagaaggcaaagttacaacaaaaaataaacaaagaagtgtagattttgatataaatggcatggaaataaaagaaaaggggatagagaaatacatctctccccccctttttttatttatgaatgaatattctcccagactttcgcccaacgcttaccctcgattaaattcccagtgattttcttacggcttccaccttttcctcagcagctgcattagcggcatcgaaacatttgtggcaacccatttcaccttttacttccacatagaacttgattttaggttctgttcctgacgggcgaactgaaattttagttccatcttctgtaaaatattgcaatacgttactagcctccggcatatctatttctgttatattcccattaccatcagtagccttcaaagttttaaagtctttgacaagaacaaccttagaaccgcctatttctctcggaggattagaacggaagttttccatcattgccttaatctcttctgccccgctctttcctggtttcacaacattcacagtagtttcttttgagaaaccatactccacataaatatcaagcaaaacttcgaacaatgttttgccctgatcttttgcccaagcacaaatctctgctaacaatgtacaagcagaaacagcatctttatcacggacaaaatcttcagccaggaaaccgtaactttcctcaccaccaccgatgtactgctgttttccttcacgcaaacggatctcacgtgcaatccacttgaatccggtatagcaatccaacatttcgatgtggttcttatctgcgacagatttaatcagttccgtagtaacgatagtcttcacaatgaaatcatcatccttcatcttacccatcgcaatacgattctttattatataatacaagaacagcaaacaggtttggttaccattgatcagcacccattctcctttgtcatttttacaagccatacctacacggtcagcatccggatcactagccattacaatgtcggcgtcaattttcttagccaaatcaatagccatagacaaagcctcggcattttccggattcggagaaataacagtcggaaaatcgccactcttcaccatttgttcaggcacggtatgtacattttcaaatccccattgcttcaatgcacgcggaatcaacatcatacctgtaccatgaatcggagtatacacaattttcaaatccttctgacgcttgatcacttcaggatcaatagaaattgttttcactttattcaaatagacgctgtctacctcttcgcccacaatctgaatcagatccttgttaccttcaaacttaatgtcggtagccgatgaaatcttgttcacctcatcaatgatacctttatcgtgcggagccaatacttgtgcaccatcatcccaataagccttgtaaccattgtattctctcggattatgagaggcagtaatattgataccgctctggcaaccgaaatgacggatagcaaatgacatttcaggagtaggacgcatatcttcaaacaaatatactttaataccattcgctgaaaaaatattggcagaaatttccgcaaacaagcggctgttgttacggcaatcatgacctaccactacagaaatctgatcgagatctttaaaatttttatttagataattagacaagccttgagtagcagcacctaccgtataaatattcatacggttactacccacgcccataataccacgcaaaccacctgttccaaactccaaatctttataaaatgcttcaatcaaatcagtcttatcgggattcgccaacattttcttaatttcagcctgtgtttcggcatcataagcaggtgttaaccatttctctgctttctctgtcacttgctttatcaattcttcattttccataattttttgttatttataaggtttataattatatccgatttttacgtcttgacaaatgtaaaagaattaaattaaaaatcctagaaatttggaagaagaaaattagagatataaaggattattccccaaaaataatctgtcataaaaaaatagaagaccatacaaggtaaaaaacactattatataacaatcagtaaagctcctaggcatcctgaatacaatctaaaaaactatcttattatgcaaacaggggcagaattataatctgcccctccactaattaatcagactttcagaacatacaaaaatatatcctatttcatcttataacgtccaccggtggcctttaccagttcttccaaaaattctttgggatatcccggacgtaccaaaggagcacaatgaccggtttcagggcgaagtatagttccatcttttgccatctttttcacagcaccatcattatacttcacaatcaaaaattcacccaacttcttccagctgtctattgccgattcggctgtcatgcaactatagttagtcaagaattcttttgcttttacaggatctttctcatataaactcatggcagaagattcaatgccagcctgtgcattcgcataagtatcttccaaattattttgaacggcacgcatatcatcaatcatcaggctataacgtggacgaatcatatcggccacccaattataaatccagaatgcagaatcccatgaaaaagttacacagtcggcttctttaccgctataacaatcaggaatacgatccgaacaacaatatacaggagcaaacactgtcatattagcatcatctgtcccaaaccataatactccccctattgcatcgggcaggctagcacgcatctgtgcaacaaaagtgaaagccgtttgctgagtcgagatgggacgttcattgaaatattcctgatctcctactttaaaactcaagggcgacagacgataaggagttttaaacggaccggcaccgggatcattagtaatatccagtggagtaccctcatagtgatcgcgcatagctgcttgtacatcacgtactgaaagtttacgggaaggcttgatataaagaggcatcggttctttgctgtccccctgaatataaggaagataggtatctcccaccgacttattgaacatattatagaaactccatacacgcgcttcacagaaccgtacaccaccaaaatctaaaggattatatgccgccgagaaactgaaatctttattcataccgtcaaaatagcctttttcacgagcgaaagaaatcacatccggagagtaaagacaattatccttgtcattcatattgaactgatgaatccggctctgattagcatgtgcggcaatacaatcatccggtatacggactgctacccatacagcacctttcacaccgggacccttaccgatcatctccaaaatccagacttcattgggatcagcgatactgaatgattcgccactgctataataaccatattcttttactaaatccgtcattacctgtatggcttctttggctgtacgagaacgctggagagctacataaatcaaacttccataatccataataccggtagaatcaaccaattcctcccgtccaccaaaagtagtttcacctatggttacctgaaattcattcatattacctaccacattataggtttgacgcgcttcttttatttgccctaaatatttgcccgaatcccaatcatagatatcacgcatggttcctttttcatgcataccggcaggatagtgatacaactcgccaaacattccgtatgaatcagcggaataagaaacgataacagaaccatccaccgaggctcccttacctacaatcaggttagtgcacgccaaactctccgttatcgctgccaacagaaaggcagcacctaaaatcagtttattcttcattaatatataactttttaattgtgtataatacttattttaccatcaaaattcatattcctctcttgtttcatttccacaataatctgtcaccaccaattccaatttatgggcgactcctttttttaaccgttcaggatgcttcatccacaatttcgcatttttggaactgaaaccaaacaaggcaaattcgccgtctatcttcaccttataatctttgatacccgtttccgcatctcctattttgaactgaaccttacctgtcttccattgcgttttatttaatggagttactcgtggagacaaggtatctatagctacggtataagttcccagttcacggatggaagtcttcatccaaccattctcataagttcctcctgctgaacctttcctttttccccacttacgggctacataatatttcgacgtatcctctacaggaagatggcgtaccccgatcatcagtgtgcatccagcttgcaaagctactggctcatcgtgcaattggtactcgtaagaaattgcggctgtatctttaaccacctgacagttcagtgccacatcctcatacaacatccctcgggggataaccagttccatacccggttcctgaaccacattacctttattccatgccaaataatgttttacttgcggatgatattcctctatcggctgcctatggccacgcacaatgaaacgataagtcgacttattaccatataaatcagctaattcataacgaaaatgataatcacgttcttcatcaatcgtaatcacccctccttcatcgttggcttgtaacatgcgcaaactatttccgggaagaatttgtgagcgcatcacccaattatgcctctttacattctcctcatagtctgtccaagcattaatcatccggttctcttcaggcaaaacgccatccactgtactgcgaaaaacttctgtcgtatccacatagagtaccacggaacgcacaccataattattatgtgtaccatccatatagtcgtatgccttaataccagcggctattttcccccaagcagaaaccggttgccccaaagaagcaacaggtatggatttttttctttgtgagccttccacaaccccagcgccccgctgcggataaagcataatcattgacgcacgtggcggagtagtgtctttgattttatcggtatagaattgtaagggatctatcaattcaccagtatccgtacagcgtatctccatatgcagatgcggtccgaaagaatatccttcattaccgcttaaagcaatgatttctccagctttgaaactgacctgatgaggttcgaatttcaaatccacagcaaaagtttcatgccgatattgatattcctccactacttttgccactgcggaagcaaatttcaacacatgcccatacactgaagtatatccattgggatgagtaataaaaatagcctgcccatatccgccgggagtaaccagtacacggctcacatatccgtcggcaatgcaatgaataggttttcccacctctccctgggttttaaagtccactcctccatgaaagtggttagaacgcagttcaccaaaattaccgctcagagtaagcggaaaatcaaaaggaggacggaatacaggagcagccggttcttcctgtgcccgtacagtgaaaatactgcccaaagctactatgattatataatttcgtaaagtcattttctttattttatggagaactcatcacaaaaattttgaatctctccgcaaacttacaaataaaaaacagaatatcccttaaaataatgttgctaaacatacatttattacgaaaaaaacatatccagacaaaacctacttttctgacattttgttatctttgaggcagtcaaaccccttaaatgtgacaattatgatagtaggaattcctaaagaaatcaaaaacaacgagaatcgtgtatcattaacccctgcaggagcacacgagttggtacagagaggtcacacggtgtatatacaacacaccgcaggtataaacagcggattttccgacgaagagtatgagaaagtcggagcgcgtatccttcctactataaaagatgtgtacgccatcgctgaaatgattataaaagtcaaggaacccatcgaatgtgaatataatctggtacgtaaggaccaactggtatttacatacttccattttgcctgtgacaaagaattaacagaggcaatgatgcgtagtggttcagtatgcctagcttacgaaactgtaacagacaaacaaggaggactgcctctgctgattcccatgagtgaagtggcgggacgaatgtccactcaggaaggagcacgttttttggagaagcctcaaggaggacgtggtatcttactaggtggagttcccggtgtcaaaccagccaaagtgctggtattaggcggcggcattgtaggaaccaatgcagctttaatggctgcagggctaggggctgatgtcacaatctgcgatatttcattaccccgcctgcgtcagttaagcgagttcatgcctaaaaatgtaaaaacattattctcgtccagccacaatatagaaaaagaactgccaacaactgatttgataatcggtgcggtacttatccccggtgcaaaggccccccacctcattacacgccccatgctgaaactgatgaaaaagggtaccgtactggtagatgtggccattgaccaaggaggatgttttgagacgtcccatcctacaactcatgccgaacctatttacgaagtagacggtatcatccattactgtgtggccaatattccgggagctgtaccatgtacttcaaccttggcattaaccaatgctacactgccatacgccatcagattggcagatcttggttggaaaaaagcttgcgaaaacgatcctggactaaaaaacggcttgaatattgtcaacggaaagattgtgtttccggccgtggcagaggcctttggctggaagatttaataaagtatggatcctaatggaaaaaaggaaggccgtcacgaaggtcttccttttttacgatataatacttataaggattatcatctcatgatttttcaagcacttcttccaaggattcttcctgctgttttttccctgtccgacttacaatccaaatgctgacttcgtaaagcaaatacatgggcacagataccatcatcaatgtaaaaacatctgacgtaggagtgataacagctccaactatcagaataataacaatagcatgacgacgataccgcttcataaaatcagccgtaagaaatcccagtttggcaaaaagccaacaaaggacagggatctcgaaaacaatccccatcatcagactcatcatcatcaacgtatccatatacgaggacaaagtaatcgtgttctccacttccatactgacctgataggtagcaagaaaacggaaagtaagaggaaaaatcaaaaaataattcaaaagaactcccatcataaaaagaaaatagccccatcctacaacccgggtagaatatttcttttcattctcgtataaagccggcgagacaaaacggaacaactgataaataacataaggagatgccaacaaaaaacccgcataaaaagacacactcatatgagtaatgaattgagccgccaattgggtattgatcattttcacataaaacacttccggacataatgaaggcatagccatagaatcagctatccggcaaaaaaaatgataaataatgaaatcagcattcttaggcgctagaacaatagcaaagagctcatccttaaacaagaatgctaccaacattagaaataccacagccactgcaatgcggaacaagacatggcgtagttcttccagatgatcccaaaaggtcagtatcttctgctgctgttccattatttgtcactttttcgtttcccctttcttatctttcccatctatatcatcctccaacccgttcatcccttctttaaaactcttaacccctttgcccaaccccttcatcagttcgggtatcttcttcccaccaaagaacaaaagaacaatcaatg

SEQ ID NO: 14484 - DNA, 37129 bp, Unknown
  gut microbiota DNA sequence
aaaactttaaatttataaatttaaaaactcaaaatgtttattgttataaaaggacttaattgcgttgaatcataaaaggattccgattctgcgatatatattgcaggggagtcatgccaactacttttctgaatgccacatagaacacgctcttggaggtaaacccgcaacggctgaaaagctcgctcaccgggcaatctttaccgtccagcaactccttcgcgcgaaccaccctgtaggaatttattaaccgcttgaaattgcatccgaagtagttgttcaccgcattactcaggtaggtcgtattcgtgccgagtatctttcggaatgacttgagcgcacattcgtagctctctgccgtggtaaaacgcacacctccatcgtctgtgcgcaactcatgaataatcagttcccatataccaataaaggattgcggtgtagttgtcccctcatgggatagcaccgttccttcgcccatgatacattgacgtaccatttcaaatgtcaggatgccacctttgttcaggttcatcaaaatctctttgtatttggggacaaaggtatctttccactctttttgaagtctgtagttctcactcttgcatttagccgcattacaaatgtctgagaacttcttttctgtgaaagaacttccaacggtgagataaaagcacttgcggtctatcgtaaaacggagagataatggaaactcgcacgcgttttttctgcgagtgcgtgaatccaatacgatagaaacagaacagttccgttccttgaaaagcgacatggatttggtcagtttttccattgcattcattgtttatgttcaacataacctctgaatacagacgctttgcaatgtgaggcatacatatacaaaacactgcatataaccacagagttcctatccttaagcggatacaaaacattgttgttatatgcagcggtgcaatctcgttgccttctgtcgctgactggtaaccgggcttatgctaatcgatctcaacccctgaagcaactctcacgtttcgtttgtcatagagtaccctccgactggtactctctctacgcattgattcatcggaatgggataaccctcccacgatggtttggcaaactcacttttctttttcaagaaagagcaccaccaaggtcatggcttgccacaaatgcattacgcaatacaaaagtacaatattattctattaatcaagatgcaaatgggatatatttgagtttatttaaccgccaatcatcgtcatattaacaacataccttaataaaggtgttataggattgcacggagtttcacggaagttctatgcgtaaacacagccaactcaaaccgtttgtttacgcattgtttacgcaaacaaagaaaaaagcacctgcgattgctcgtaagtgcttgattttaagagtggaccagcctgggcttgaaccagggacctccagattatgagtctgttgccgagcacgacaaatcctgcggatttatcgtgtgtaaccaactgagctacaagaccttttaagcgttcgtaaacctgttaatgaactctattaagaacgtatcggtaaaccagcggtaaacaatcgttcttgttgcaaagttagtcaatgttgcactgttatgcaataattatatcttataattggagttgctccaatcacttttttacctacgtggaagtattatagtttttataaaatctcgtgcttggcagaatcagattattcaccatgctgtataaatccgattcttctgcgtggcttttcttccaatttcttcttagcttgcagttctgctaatgtctgattaatgagttccaactgcattcgtgtatcatcattaatgtcgttgtaatcagcaaacacttcttctatgtagtctttcaactcttttacttcattctgcaactctgttagtttgtctgtcttgggtaatgccaccatttgacgaactgcaacaaaagcacgcatgatgcccatattaatctgaattgctgttttggagttcagcacactacttagcatggctacccctaattcagtgaacgcatacggattacgtctaactcccatcttgatagaattggaagtcacaaattgtgacctccaattttgtgtttcctcacttgtcagttgaaacataaaatcttcggggaaacggtctatattgcgttttacggcttgattcaatgctttcgtttgaactccatacatttctgctaaatcacggtcaagcattactttctgacctctgatttcatatattttgctttgaattacttgtaattgttccattgattaaatcttttatgttgcaaagataaccaactctgtataatgtaaatagaatgtatagactaaattttagaatatggcataaaagtatttctgcatgattaaagctcttattccattttggttcgtttttgattttggctattgcgtaattttgaatacagttgtataacacatagttttgtagttaatagatgtttgtttagaactgaaaaagccaacttatccgtaattgggtaggttggcttttttcttaattattctgctcttacataagtatctaaagtgtaccagttttcatttccatcatcaccgacacattccaatactaattttgttttatctaaagattttatttcggcagtatcccagcagtccattatatgaggggtaacggtcaatgttgttcctgataatgtaggatagtatgtaaaaggggcattctcccatgagcttgagccatcttgaaaataatactctttgaaagtatattttccatttgaatttttagtaatttctaatttagcttcctgcaaatctggataactttcatcccaagtgtttttgtcgttactattttcaatgtaaccttttgaactttgtaatagccaagtaccttcaatactgtaagtctctccttgttcttcttcatcatcactgcaagaagtaaagttcacacacattactatggctaataaagccattccaattaatctaaatgttttcatttcgtttgactttaaaatagttattctgattgtactgattcaaatgttctgtcttttagttggtaggtatgattgattggattgttccaaccattagagccaaaaacagtaatagtcttgttctctgaatcaaacttacattgtccgttttccaactctataaatggtgcttctgttttctgtataaagtaaccgtatgggctgacatcgtacacatcataagcattggaatcccttgaaccacttttatagcggttgataatgaattcatcttctccgtcaaaatcaacatcagaaaagaagaaaggagaatcatccgaaaggtattcttcgctctttaatttagccgtatagtctaactctataactgtgttgttcggatatgtgttacctttatcatatagaatcttatcagtccatttctccgcaaagtggtaatattgcactccttgtttctctaaacagaatagagcattacctacctcaccattttgcagccacattacttttactgtatatccgtttataggctgtttgtacttaatgtagatatgcggctgattgaaacattcaaaatcctgcggaacagatgttttatctgttttgcaagctactaaactaagtaatccaataatgataaatggcaatttgctcattacctttctatttataatatgattgtagtaatgaatatccgtttatgggcgttctctgttttagataatagctatgttccgctaaaaacaatatatggtctgaattttcaaattcatatattctttttccattttcactttcaagaaaagctgatttattactgattttcagatttataaaatgtgtgccattttgttcccatgcagtaatattaagtgctttgataatatcatgctgtcttttctcacaatcatactcaccatgaaaaaaagcgaaatagtctttggttcgtgggttgaagttccatccgtttccattcggatatttaagttctaattggttaggatatgcttcattaaattcagaccaatataaactattcattacttcaaagtctgctttcttaattcggtcaaagcaaaagccttcatcttctctaagtatgtacttatccataatgcttgccatgtgtatttcaaaaaaatagtccatcagcaaactgtcactaacgcttgcataattctctgaatggaaaacaagaccacatttattctcaaattctatcacatatttgctcgttgctaaaagtcccgaacattcatagagcttcattcttattagttgttgtcctgttctttggttaagccaatcaaaagtccaagaatcgactaattttctgttctctttaaacataattacgaatcatttatgctctctaattcccaaaagagacagatataaaataaggtgtgggaactatatctgctttatcctgaaatccggctctcgcattgccttggcatggataaaacaatagcaacccacaccaattttgacaatatctaagagccttatagatataaggtaggtatatatcaaatggtggggtgctatcgctaccatcttcatgccatttcaaatttgcgagatttgatttcagaagataatctcaataacaccttttcgttaaatatgtcctttcagtgtcttaacgcattaagacctctgaaattgctgcaaagttagcgaaaggttttgaatgtctaaagataaaacactgataaatgtagtttcaagtgttccaaaacatatctgtagtaaggtattaggcaatattgcccttttttcttcgtagcttcaaaggtaggtactttttttgattggggtctataaaaagatttctttccgaaaaaagtacccgtagattctgtggattgaaaagatgctgttctattagagataataaggtatatagatttgtagtctaactaagtaatgaatgaaagaagtatctaatcttcataataggcataaaaaaagtccgcaaatgctgcgaactctttaataatctgattgttatttattattttcaatagtctcttttaattcgttaaagttgtcaaagtagaagagcctttcaccttccgatgtctgtattctaaaatgtttttcatttgctctctttgaaactgcgtaaacaacatctttatatttcaatttaagaataatagttcctaaaattttggtaatgaataattcacccacttctccagttggtgcccaactactatttgttacatatttccataatccaacattgcctaaagagaacatatcttccatatctattgcgtttttagttaattagtccacaaaattaatgattcatttgcaattatagcggtatctgtgaggataaatttgccccaaaatcgcacataccataaactacaagccatattatgccattttaaaaagagagtttcccactccgttacagaactggtttgcattccgtttttcttggaactatcagaatgtgacaaacttttctgtttctgtaaatggttcagaaacttcaaactttgtcacattccaataaaacaagtgtaactatgattgtatataaataaagatggataaaatcagtatcagcaaaaaaggattgataataccaattattatcagcaggagaacaaccaatgttccccatagtatcaattttccatcatcttccattttgtagtatttttatattaaaaagaaaggacacctaaataaatagatgtcctctcattaattagtcaataaaccatttgtaatgctcatccccatgtagggctgcattgattccaactgccatttcagtggcattcaaagagcggtctaagaatgaatctatatagctactcttatttgcacccgttaataggttgtagaacttccacatattcaagtcatttccaaagctgccaaagttctcatcattaatgtaggcttttgcaacactgttaatctgtgtatcagtaagcaacattcttggcagtctcttttggtagccattgggcaaacactgataaagcctcattttgcccaatatttgtgcaaattggtgttcactcattgatgtattgcccaactgttgcatcaaatacagatgtttggcaggattgtagttgttgaacaactccaaagcagaacggtaaagttcacttgtattgctcactcttaaatcatccttgtaaccatctgtaaagatgcacatattgcaacaaacttggttcttaaagccaatagccaatctaaacaactctggaactttcttgctgtataagttcatttgattataggctctgacccccactattgaaaggttcagtttgttaccctcaaccgtttcatagattgtaggaatgtcaatactgaaagctgccctctcatagtagattgttttgtctgattccaacaactgattggcaggtttgtggatagcttcgggaatgcgccccttaatcacatgagaaacacgaatatcgggtgttccaatagcctcaccattgtagtaggagtttgcagcttcccaaacagtttcaataaatgcagcatggtttactgtaagctcattgtcttttgcaaaaacgggagtaatacagtcatttttcaaatgttgcaaggtagcttcttgggtgtttgcctcaatgaaatgatttacccttttaggtgttgcagtttcttcaataatggttgcttcttctgcaaactcacctaaattcattctctctctgttctctgttggcatgataactaagtttctcatattgataaaagtttaaatgattaataattcttttttatatcaatatacagagggggacttgaggggtagtatgccgtaaagacagccactcttatatattttaggtcactggctgaatggggagggggggctgtattaagtaccttatatatctgttctcttgactttcagctaaactgaatatgggtgattctttaattatgtagtctttttaatgtcattggctgtatgtggcatattataaagtataggctatataactcttattaaagtggaaattttcagaaagtcagaatcggaaaaatgtgctattgtggttctgcgccaaaaataaaagccgcaagggttacttacggcttgacgatatattaagcgatgtaacctcttgcaaggtcttcatcggtgattatttcgggatataggttcttgataatggctaactggctttcagaagttatcagaaatatatcctctctaagcaggtgtattcctttcttgtccctttttgcatagcctctttctatggcttcattcatatatcttgatattgtacctttagacaagccaagttcttccgctaatttgttttggctgtaaagagtggtgttcgttccgttcaaacataggcattttagtaagataagaaagcctttcagtttcctgcttataggttcattatatagcttattagttataagaacgtaatgttccgtatctgattggtagctgcatctgttgaattttccatattgtccgtaaacatcaaatttatctatgcttactaatccgagagattcaaacttgtgcagccattctcttatttggtctgtctttttaattccgtagaaatcagtcaagttgtcttgtttgcaatacgattccatcgtattgcaatcggaacagagagccaagcaatagaataggtacgtttccagcaaattgagttttcctgcgatattagatgttatttttctgtatgaggtcattagcaaccgtatgtttatagttcgtaaaataaatatctcctttctttaccagtcttctgtaatggtggtttccgaaatagcttttcgcttctttctgattcgtgaacgtctgttttgtaggcaaatagataatcataggcaattaaatatgagattttgagaataaaccaatctgtcccgatttgaaaaatcgggtaggtaggtatttatatataggtatttatatgcgacccacctaaaatgaacacttcgcaccccctaaaatgaacacctcttttttgaaattctgaatcggattttgaaaagtaaatttttaaaggcttggagtgtgagagattcggatatgccatcttacttatagcattaaaaagttccaaataaaatcggtacaatcattagttagtaagaaaattactctgtttcattagttattaaggtagttaccaacatttctttcaatttctgtatagggtatagaaagacaaaaaaatgagattttgttggtaatggtcagactatctcactgattaatagataacctctctttttgccaacccagcaagggaaggctcgataataaagattgataagtttagattctatatcttcttcggggtgcatattcaacatctcgaatattctcgttaattcattaactattttctcattggaatatctgttgccgaccttgaatatgttcttaaccagtctgacaactttattccccttacgctgtgtgagaatcatttcctctctgattttcttttcaacatatttaagttcctctattctctctttgcccaaagtttcaaacgcttccacaatgaaagggtcaatcttccgcatgtcattaatgaaatctaaggcgtattccgaatcagggttttccatctcattaagaagttgcaccatttttctgcgcttgtcctttaccgagcgtgccgccttgacaatctttaatttctcgtcattctcattatattcgcaattctcaaatgtaggattgaagaaatggcagtcattgtaccagttcattatttcctgcttcgcttggtatctgttgttcaccaatacggaattaatttcattgtctatggcaaaccagttctttgtaaagtcgggatataggtatttgcggaacggtgcagtttcaagaatctcaccgaaagcatttctgtattctttgtaatcagcactattatataatgtctgaattaagttgtaggcaaattcttgttctgaaatttgcttttctatttgctctttggattgaattaccatttcgggattcaccctatagatatgtgttgccgattttatgccattacggaatcttccgcaaatctgtatgcagtctgtatccatgtcaagcatggtatattcggaattataagggtctgtaatcattaccaaatcgggctgataaggcaaatccaaatcgaatgccgtaaaaaatctgccagtgaagaagttatatttcttcatggtatctgcgttccaatcattataagcattatcaaaggagtattcatttttcagtttcaaacggctttttggcgcacagtaaacggtagaatcctccaatatgccgaattgtttcattatggagtaaatcattaccacagaattgacgaaaaagcagactgttccctctgtgtgattgtctaaatattcacttattgccttgtgtatattataagtatgtgtaaccgcaatttcttgtctgtaatcataatcggcacttacttccactgtttcaaactctttaaatcttgggtcactgaatccgataggagtggcggaaacaagtgccttgcctttgaagttgaaaaaatcattcatgggcagcactatgtctgttctgtagtccacgtccttgattaattggtgacattcgtccatcagcaggaagaaatgattataaatgtcaataccgctgcaagccgttttcaccttaccgaaactttcgggagtggtcattatcttatgcagtctgttattagttagataattgcgaatcttatctgttgtaacatcttcataaacacctaacagattgctgtatttgccgcacttgcttttgatgacgggtacattaggcactacgataatggaatttctttgagtttcaagctccaaagtagtagcaccacagccgggtattcttttggaaagtatgcagtctgacggaatctcactcattacgtcagacaggtattgacctttatgtagagtaatcataatcctttgctgtttagataatctataaattcatcgcttctccttatgctgaaaaagagttttccgaaacggaacagccctctaagtcttatataggcttcggtttcccgtaaaaaagggattcttgcaatattgtatttctgttctattagttcttttaccacatcctcttggttacatagcatggatagtttggacgggaatactccaaaatcctcataatctcccgtttgtagataattaagaatccactgccagccttgtgcgttgagttggtatcttatactcgttactccttgactgctaatccatgcttcaccgttcacttggatataaagctgcttgtgctgcttcatcaacagcttcacttgtctgtgtgcagcttcgttgttatatgtttgagtaaactgtatctgtttcattttttctgttccgattaaaaaagaaagccgagagaggttgttccctcgactttcttcaaagctgattgtttaggctacttcattctgttcgggaacttgttgtttggtttccgcttctgatttcttcatccattcgggtttgcaggcttcacagataaggctgttcacttcatccgttgctttcatgcagaactttacattcccgttgaatgtggaagaaaatctcacgcaacggtaacgctcaccgctgttgttgtaccagtccgcttcaatatagcccctcatggtggagttcatgtattgcttgaatagctccattaccaaattttcaccatcttgggcaatatccacctcatgttcctccgctttgtagtcgtgcaaaccgtttattattttagccatgccgaaatgtattgccgatataaggtctgcatctcctgcaccctcaaaatgttgtgtcatgccagtagcgtaaacaaccgtaaccgatataatcagttcaccttttgaagattgtttgaaacgcatatctgttctgacgggaaacataaggaatgcttctttcagttcctgcacgaatgctgcactgactttagtgttctctactacgttttctacttcattatttaatgcttctgcaaattttaaatttttcataattcctaattttagatgtttcacatattaattattaagccattaaagaactactaaagctatgcgcactcactcgtttgttcccttttgacattgcaaaattagggcagaaataaggggtaacaaagcattttgcctaatgcccatgtgtgtagaaaacgtgtccattccagtacgcaaaaaaaatgcgtaccaaaaaggacagccctttcagtacgcatttctactatggttttatgtatgttgtttaagaaactaccatgtagttattagctatgacagacggaaatttctcgttcttgtatcttctaaggagattggataacattctgtttttgttgccctctgaatcgtattcttcattatacctcttgccatcatagcccactgtatagataagtcttgaaacaagcatcatcttgtctttagatacctttacctttttgttgggtatggtagtagcctttcttctctcaatgaagaacagaaacatatccgtaaacttccatttcttataggatatgtcaagactgaacttgtccgtaaagctgatttttgacgataagtcatttctgataaagccctccaaacctatatcctttaattgtttaatcatagtttctctgtcttgttcgctatgtataatatcactgtatgtattgacaaaatgttgtaaggctgcttgaattattctgattgtgtcttccctttcaacaatatagcttttcttgttgttcttctttaggatgatatttgtagcttccagcagattggcatgaaaatagctaaagtcctccaatacagacttgttcaatgtaggtgcatttgtaccaatatcctctataaagtcatatacgaacagaagtagataccaaaacttactaacgtctaacttatacgcttcaatggtattctgtaaatcttcattagttagaaacttctctttgaaagaatcgtccaactttctgtattttcgttttttgtattcttccaaagtacccttaaaagttttcatttctttgcttctttcgtacctttcttcaatggacaagtttctttccgtatatctgttggcaaatatggcaggtgcggaagattctacgggtatcattcccatatctgtttctgcataatcgggcaggaagtgattggctacttcccacacatattctaatagtggttcagcaaggcatttgtagctttcatgccaagccacttttaaatcgggcaattcttctatctgatacatagtgtattcatattagttatactgcaaaataaaagaaaagtctgcaatctttagcggattacagacttctttttcgttatagcaggttcttcatagtaaatgatattcatttaccgaatacatacttcacgactttggcattagccttgttctcattcacaaaatcccgttcaatataaatatctgttactttcatagaatcgtctatatgattgagggctgcatgaactatatatttgtctatgcctactttgttcagtgcaatggtagcccatgagtggcgtgctgcgtagtattccaaatcatctacgcctaatattgtaccaatttcttttaaaccgtagttgatagccttattgaaacctttttcgtctgcataatattggtaaaagttaaataagcgtttaccacttttatctctgtatttttctataagtggtaatgcgattttaggtatatccactttcatttgagcattatccaatctacggtctttcgtcttggtacgattataaatgatggtattgtttaccatttccgtagcattatataaatcggctgaattaatccccatcaaacagaatgatagaatgaagcaatctttagccaagttgtaacggcaggttgatttgtaccccttcttcatgtctttatagggtagcttccatacctttttgatgatgtctgctggaatagctctctttcttgttgcttcttgcttgggtatctcaaagtctataaatggattgttaggtatcagtatgagattattctctctcttattgtacttcttttgagcctctttgaacagtttcttaatgcttaccaaataaagagataaagaccgattagagggcacacgcttaccttgcagaatcagtttcttcgttcgtacttcacgctctttattcagaaacgctttgaaactatctaaaaaattggtagtaatcagatttacgtccaattcttctttacctataaagcgcactaaagcattaattgcagtagtatagtttggtgcacctttgattgtagttgaggttatccactcacggctgaactttataaagtcaatggtctgctgcttctgatgttctccatccaagtagtccattacttcatcaatagtgtagcggtttaactcgacttgtagtttggcgcatttctcttgataaccgcgaataagagaatctatctcttttttaataggtgaactttgcttgattttcagttctttagtcaagtctttacttgtgacgaacagacttgttgccagccgtctcatttttctgtcaagcgtgaatcttagctttacgttgtaagtaccatcagaccgtagtccgtctttcttgatttcagcgttgattgtcagcatattaatccttttgtttatcggtaaacaagcggtaaacaaatgctgcaaaagataggtaattctgttagtttgagccaacctccacccataacgaaagacaaaaagaaaagcgttaactgcttgatttcttgcaattaacgcttgttttctttgtggaccagcctgggcttgaaccagggacctccagattatgagtctgttgctctaaccaactgagctacaagtccgtgctcacaatttcttgttagcagttgcaaaagtagtatattctcctgaaacttgcaagatttagcgcccaaattttgataaaaagatttaattccctaattcgtaaggatataaattgtatttttgtgctccattaattaattctgcaaagccatatggcacaaaaaaaacaggaaacagccctaacagggctttcggacaaagaagtccttatcagtagggagaaacatgggactaacctcctgacacctcccaaacgtccctccatgtggaaactttatctggaaaagttccgcgacccggttatacgtattcttttagtcgcagcattcttttctttagtgatttccattattgaaaatgagtatgcggaaacaatcggtattttctttgctatctttctggcaactggtatcggattctactttgaatacgacgcaaacaagaagttcgacttactgaatgctgtaggtgaagaaacaccagtcacagttatcagaaatgggaaagtacgggaaattcctcgtaaagagattgtagtgggtgatattgtagtgctgaatacaggtgaagagatccctgccgacggaatcttgctggaagctatttccctgcaagtgaatgaatccaatttgacaggagaattgatggtcaacaaaactatcaatgaagaactatttgatgaagaggccacttaccccagcaatgaggtgatgcgtggcaccacagtggttgacggacatggaataatgaaggtagaacgtgtgggagattccaccgaaataggaaaagtagcacgtcaggctaccgaacaaagtgaagaagaaactccattgaatatccaattaaccaaattggccggtttcatcggaaaaattggttttactatcgccacgctcacctttattgtttttacagcaaaagatctttactcctacctcaacgtaaatgaaataactgactggcatgggtggatggcaattgcccgcattgtactgaaatacttcatgatggctgtcactttaattgtagtagccgttcctgaaggcttaccgatgagtgtcactttaagtcttgcactgaatatgcgccgtatgctgaaaaccaataacctggtacgtaaaatgcatgcttgcgaaacaatgggtgccattactgtgatttgtaccgacaagacaggtacattgacacaaaacctgatgcaggtacatgaagcgaagcttgatgctaccaaagcagatttaatagccgaaggtatcagtgccaactctacagctttccttgaagaaacaggagaaagcaaaaaaccatccggagtgggtaaccctactgaaatagccttattgctttggctgaatgaacaaggcaagaactatttggaactacgtgaaaatgcaaaagtaatcaatcaacttactttctctacagaacgtaagtacatggctacattagtagattcacctattcaacagaaaaaggtactctatataaaaggagctcccgaaattgtaatgggaaaatgtaacctctctcctgaggaactgactcattacaatgccgatttgctggcctaccagaacaaggcaatgcgtaccttagggttggcttacaaatttattcctgaaaactccggcaatgattgtgccgaacttgtcaatgaaggaaatatgattttcctaggtatcgtagctattagcgaccctattcgtccagatgtaccggaagccgtacaaaaatgtcaatcggcaggtatcggtgtgaaaattgttacaggagacactccgggaacagctactgaaattgctcgccaaatagggctatggaaacctgaagatacagaccggaaccgcataacaggggtagaattcgccgcattaagcgatgaagaagctttggaccgcgtacttgacttgaaagttatgagtcgtgcacgtcctatggacaagcaacgtttggtccaactattgcaacaaaaaggagccgtagtagcagtaaccggagacggaacaaacgatgccccggcactgaatcatgctcaagtaggtctttccatgggaaccggtacatcagtggccaaagaagcaagtgatatcaccctactggatgactcgttccatagtatcgccaccgcagtaatgtggggccgctctctttataaaaacattcagcgcttcatcgtattccagctgactatcaacgtggtcgctttagccagtgttttattaggggctttctttggtacagaactaccattaacagtaacacagatgctttgggtaaatcttatcatggatacttttgccgccatggctttggcatctatcccccccagtgccgatgtcatgaatgaaaagccacgcaaaaccgacgacttcatcatcactaaggtcatgcgcaaaaatatactaggcgtaggcttctgcttccttgctatactgatgacattaattgtcattatcaaacagatgccagcagatttagtaggacaagctttaacgcaatttttcacaatcttcgtgatgctacaattttggaatctgttcaacgccagtgttttcgggaccaaccattctgtatttaaggactcccgtcatgcattgggtatgctgagtgtagctatcattattttggtcggacaaattctaattgtcgaattcggaggtaaagtattccgtaccgaacctatggattttattacttggatttatattatcgcaggaacgtcattcgtattgtggattggtgaaattcaccgttggataaaacgaatacagaaaaaaaactaagaaagagaattaagcacataaagagttatggacagtaagattaaaaatgtcgtttttgatttaggaggagtattaataaatctggattttgacaattgcctgaatgcttttcgcaaagcaggattccaagatatcgagaaacaggtatgccagttcaagggaaaaggtttcttttccctatttgaattaggtgagatcagtccggaagaattccggtcagccattcgcaaggaggccagcgaatcgctgaccgaccgtaaaattgatgatatgtggaacctgatgctacttgatattcctcgtgagaagctggacttattactagaattgcgcgaacactatatggtttatctgcttagtaatactaatcggatacattgggagtatgcctgcgagcagatgttcagttatcgaggtttccgcgtaaatgatttttttgaagatacttttctgtctttcgagatgcataaagccaagcccgaaaaaaacatttatgagcaaatgatgaaagaggcaaacatcctgcctgaagaaacgttctttatagacgactcggaagctaattgccaggcagctatgtcacttggtatacaatcccatcactatcatattggagaaaatttaagttcactttttgaataatggaaataatatcagatataaaccatcaagtattacccccttcagttgccactatcggcttctttgacggggtgcatcgtggacaccgctttcttatcaatcaagtaaaagaggtcgcagacaaggatggattatattctgcattggtcacttttcctatgcatcccagacaagtgatacaaaccacttatcatccacaactgctctcttcacccaaggagaaacttgagttactggaaacaacgcaagtagattactgcctccttcttccttttacacaagaactttcgctgctttcggcccgggaattcatgcagttactacgtaacaaattcaatattcacaccttagttataggctatgaccatcgtttcggccacaaccgcagtgaaagttttgaagattattgccgttatggcgaggaattaaatatatatatggtacgcgcgcgagcttatacagacggagaggataaaatcagctcctcagtcatccgtcagcagttaaaagaaggcaaagtaagtcaggctgcccaatttctagggtacaactattatctggatggaacggtggtagatggctacaaagtaggcagaaaaatagggttccccacagctaacttgcaagtggattgtagcgacaaattaattccctcggaaggagtttatgcagtatacgtgtatgtggaggggaaaaaatgggcaggaatgttgaacataggacaccgccctactatcaataatggcaacaatgtaagtatcgaggtaaacatcctcaatttctcggaggatatctaccacaaagaaatgcgcatagagttcgtaaagtatcttcgccctgaagaaaaatatggcacaatagatgagctcatcgcccaaatgcacaaagacagggaggaaaccgctaaaattcttctttaatatgacgaaaaaaagcaagtgcacttacttttccgaaaaaatatataagtggttttcttcccgaaagatgtaacctcccccttccgcccctctcttctcgcataaaaaacgtttcttcattcatttttgtcttataaaggatatatttttatcgtttttcgataattttttcttgtttttcttttgtagtatcaaaataagatgtacatttgcatatcgataaacgataaatgaatatcgaaaaacaagaaagaacaaacacaaacttttaaaacacaaagtaaaatgaaaaagtcagtatttaaatcaggtttagtagcagcaatcgcagtagtaatgatgagttgtacaacaacagcaaacgcacaaacaggaaacacgaagtacatctacggtcaagacggcacaaacacaacagtgtatacactgaatgaagacggcaaaacattgacacgcaaattgaagtatgagtacaaacacgatgaaaatggtcaggtaattgagaaaaaagcctatcgctgggatgcttatcgggaactgtggaaaccggcttatttacttacagtaactcccggagcgtatgaaaccaaactcaactatgccgaatggaacgtcaaggaaagcgccttcaacaacaacaaacaacaaagtatttaccgtgaagacagcaacataaatttgctggccgacacacaagacaagaaataatggaagcacaaactcaaaagaacagtataaccaaccgatggcaaaccatcggagtgtgtattggaatgattatcggatttgtatatccatcaatcggtctagctctgggtatgctcatgggaatagtttttgggaaactcattctggttaaaattccattaaatacccctctagcacaaagagcacaacaaaagtccgagattatctttcttttaatattgttcatcctattcattgaacattggtacgttccttgtaaacaagccattgcaaatttaataaactgataaaataacaactttaaaatacatcaagatgaaaacattaaaacgcattttagccgcaacaaccttactggtaacactcggtttcgcctccgaagccaatgcacaagtccctttagaaaacttcttcaagaatcctgaaaaagcgggataccaaatctcaccggatggcaaatacttctcatatatggctccgtatgaaaaccgcctgaacttattcgtacaagaagtcggttcagacaaagcaacccgaatcacttcagaaacggtacgggatcttgcaggaagcatgtgggcaaacggtcatcggatactttatataaaagatactgccggcgatgaaaactttcagctctacggagtcaatgtagacggtactgactccaaagcatataccgcattccccaaggtaaggacaactattattgatccgttggaaaatatcgactcactggtcatcatcggtctgaacaagcgtaatccacaagtatttgatccttatcgcttgaatctcaataacggcgaactgacccaattagctgagaaccccggaaacatacaaggatggatgactgaccataacggaaaactgcgtgtagccttagctattgtagacggagtaaatacccaaattctctatcgcgaaacggaagagcagcccttccgtccggtactaactaccaatttcaaggaaacggtaagctttgccaccttcacccccgacaataaaatggtttatgccctgaccaacatcggacgggacaagaccgccctcgtcctaatggatccggctacttgtgaggaaaaagaagtactttacaccaatgataaatatgatatttccggattaggctattctgaactgaaaaagaaattaatctctgtatcctgtaccggacacaaaggtactatccgtcattacttcgataaaaacgaagaagctatccgcaccaagttggaacagaaactagaaggttatgatatcaacaccaccagcgaagataaaagcgaaaatatccgtattatttatgctggaggcgaccgcacttatggaacttattatacctataatgtaaaagaagacaaactgactaaaatagctgacttggctccctggattaaagaagaagatatggtcccgatgcaccccatcacctataccagccgggatggtctgaccattgaaggatacctcactctcccgaaaggatacaccatggagaatgccaaaaatctgcctgtagtagtcaatccgcatggggggccgtgggcacgtgacagctggggatataatccggaagtacagttccttgccaaccgtggctatgctgttcttcaaatgaatttccgagcctcaaccggctatggacgcaaattcaccgaactgggctacaaacaatggggacaaaccatgcagaacgacatcaccgacggcgtagagtggttgataaaaaaaggaatcgccgacccgaaacgtgtagccatctacggcggaagctatggcggatatgcaacattggcaggggtcacctttactcctgatctttatgcatgtgccatcgactatgtgggtgtatccaacttgttcaccttcatgcagactatcccaccctattggaaacccttattggacatgatgtatgaaatggtaggtgatcctgtgaaagataaagaaatgatggaaaaatattcacctgtatttcatgtagaccaaatcaaagctcctctctttatcgcacaaggcgctaacgacccgcgtgtgaataaagcagaatccgaccaaatggtggaagcgctgaaaaaacgcggtatagaagtagaatacatggtaaaagacaacgaaggacacggtttccataacgaagagaacaaattcgatttctatcgtgccatggagaaattcctggatgctcacctgaaaaaataaatatcattgagagtgtgtcaaaatgaaaacgacctatcattttgacacacttccaacccaataaaattttaaaccaataaacagattattatgggacgtgcaattaaattgatactttactatctggcttatcaattactattcatttttctagcaaccgggaccgatgccaccattgctcttatcggcggagcagatattacagccaacttccgccccgggacaatggcaatatccatcggtatgttactctccgcattagccatgacatggcacttggtacatttccactatgtcaagttcaataaagagagtatgtatgaagtttcaaaaaaaatcattctcttgtgcatccctctcctgctatccgcacagttcatagcaggaatattaaatgaagcgctcgatctgacagacactaatcaagaactatttatttcgatgagccataatatcttcggtgttctcagtattgctatcgtcgtccctattttggaagaagttttatttcgtggagctatagaaggacatttactaagaaaaggatggtcacctaaatgggccatactggtttccgcactcatattcgggatcatacacggcaatcctgcacaaataccttttgcatttctcatcggtctgctcttcggatggttatattatcgcaccggaagtttagttccaggtattgtgggacacattatcaacaactcattcggcgcatggaccatgttcacagccacccgagaggaactcagccaaacgactatggagaccttgggcacaacaatcacttacattctcttagtactagccataatcgtttttataggtatgtatctctacctgaacaaatacttgccgaaacctaccaacatacaagtcaaagctattaatgaacaagatataaccatttaacaaacacaaccaatcatgaaaaagagactcaatcttctctgtgcctgcgtacttatcggcctgctcctttctacttccacggtaatcagtctgatggttcaagccgtcagtgccgggtttaaagccggatatgaaagtgtagaaaaagggaaggagcttaacatatccgactacaaaatagtttgtacgataccttctgacctatttgcagaaacaggaagcgtgacaaatctgaaaaattcctcacaggcttccatcaaaccaatcataagtttgatagaagccccgacaacaggaagcagcctatcccgaacggcgaatggaatcactaccttaatttcggtcctagcaagtatcttctgcctgatacaatttttctatttgatccgaaatatcaaccgtggtgacattttcagttggaagaacgtcaagtttctccgcaagctgggtgtgtcactgatacttctattcatttgttcttttaccaccatcatgatcgggaactatgaagcggcacaagttttggaactcaagggatgtgaatactctaatatatttgcgttttccgaaccaacctttatattgggattcatcgcattgctggttgcagaagtattcgctgttggattgaaaatgaaagaagaacaagatttaaccatataaaaatcatacggtatgaagaagttcaggatattaggtattatagccattattgcaatccttgcaaatttcatcggaggattggatgaagattggaaagatttcaaaaagggatttgaagaaggacaaagcggtgcaacagagatgtatgaatccggacaccacatgataacccgtgtcaaactaaatgtaaagccattatctggaacgacagtcgattcactgaacaacaaccgtgtagatagtccacttccttatacagtaactgaaatagaaacgtatgccaagccatcggcctggtatatccttgtcatagggttagccatacccggactattcttttttctaatcggtttttactcattaatccggctgctcatctccatctcacgccgcaaagtatttacaccagccaatgtactacgcctacgttggtttgcatataccagcgcaagtttaaaaattctcacagccatcggagaatggctaacaggaagcgcagctatgaatcaaattagcataccgggttacaaaatcatcagctatgttggttattcccccgactgggtggcaataatcctccctatcctctttgccgagatatttgctatcggagtaaaaatgaaagaggaacaagacctaaccatttaaaaaagaaaagttatgaaagaaaagaatactctaccctcaaaagggaaaagcattttttatttaatgctttccttgacaaccactctgtttgtaagttcattcatctatttccttgtgttacatccatcgttggacaacaaagcagtgaggatatcaatcaacattggatggacttgcttctgtctgtatgcctttaaaagactaacacaacgctacaccttttggtggcacgcattagatgagaacccgaataaatcccaaaataactaacctatgccgattatagtaaacttagatgtaatgatggcgaaacgaaagatttcgctaggagatttagccgaaaagatagatctgacgcctgccaacctctccatactgaaaaccgggaaggcaaaagccatccgcttctcaaccttagaggctatctgcagggaactagactgtcaacctggagatattctagaatatagggaagaagatgaatgatataaacagtcacatacacaaacactcgaacactataaaattctctcatcttcacccatacaccccgcaatgaagcaattaaagattaattgcttcatgcggagtctttttatgatgcagttataataaagtttttaaccaagattgatatttcctctttttccactaggtggttaaacccctttccactctgatatagcatcttatttatcagtcatttaaagccacgaagtggtgcaaaagagttcccaaaatatccattccatcgttttttccctcttatcacatagcatctcatctattttcctctttcttgtttacaaccatcctcatctgctttcggctatttgccacggatatcatccttctgcttactctcattttcaacaacagtagctgtataatgaatcttggcaaatccagcaattattttttctaccgtggttttatcagcatcatacttaatagtaaccgttttatccgccaaatttgtttcaatttcttttatacccttctcaaaacgaatattgttcttaatcttgctctcacagttggcacagtgcatctgaggatcagtgtttaaaactacaattttaatgtcttttgcaaagcaagtggcagtaaagcagacagctgccataatagcgattaattttgttctcataatccatttctatttgattatcaatatattagtttctatcccaattgaagcgaaagcctacataatacatcgctccgtgtacaggtccccaaatcatggttgaatcaaaatttgtcccccaaggattcgaagctcctacaatcggattcttttgcttaaagttcgtcatattctctcctcccacataaatagaccaatgccggaaccagcgagtaatctgagcacttaacaattgataagactggtatcgggtattccacgaaggagcaccgtccggcaatgtataaggggagggcattctaccaccaccattcatctgcaaagtcacatcaaattgccataggcccagtggtgtttggtaagaagcagtcaaaagtcccttatattttccggtaagaggacgctccaataatttcttattataagtagttttcacatctgtcaagcgataagctgcagttaatgtaaaacccttaaaaaaaggataagttgcctcggcttgaaaagtatgagaataagacttcccttccaagttagcaaaatgtacaatgtgggggtccgtatccaaatcaataatcatttgacgcctaaaatcagtgtaatagtattcggtattcacattcaaggttttaccgaataccggaatataaaatgaagagctgaaaccataattccatgcttcttcctgatccaaatcattatctatctttactttacgactgctggcaagtaaataattgttctccgccaacacatgattagtgcgatatcctttgcctacagacacacgtaggttcacccaatcatcaggagcatatttgatatgagcacgcggagtaacaaaggtaccatatatatcactatgatcagcacgaatccctcccataagaataattttatccttccaattatacgtatactgcacataagcaccaggcacggtctctttctcctttccatataataaacctgtatcatcattttctaaacgataggtctgattgaaataatcatagttcaaacttaaccctgcagaaatactgttacgctcatcgaaattcgtttcgaacattaatgaagtatacaaattcttctggtccacattatataatttataaccgtatcctgcatcctgcttatgcaaagatcccgagagaatcaaagccaagttagttcccttttccttatcaaaaatataagcatttttagtaaatgcctcataacgatccgtatggatacctattttataaagttccctacctacaaagccaccaacagaattatccacatgtaaatgagtagcttgtccgcttgtacgatcctctttcattgctttgacagaagcctgaaatacatactgatctcccatccaagcccaacggttctgaagattatattgctctactttaggcatatccaagaatccatctccattatcatcatgcgacctagtactattctcataatgtgccaatactccagtactcagtcggctattcaaatgtacattagcatcaaaattagcctcatacttctctttactgctagcaaaaagattgacattcaaggactgggtagtttgaggcttcttaaattcaacatttatctgtccggtaatcgcctcataaccattctttacagatgaactacccttggacacctgtatgctttgcatccatgggccgggaatataccccaaagcaaaaggagcggatgctccacgataattaggaatattctctgtcagcatttgtacataagttcccgagagccccaacaatttaatttgtctggcccctgtggcagcatcagcatagcttacatctacagaagggtttgttgtgaaactttcacccaagttacaacaagccgcccgagccagttccgcacttgaaatcatatcctgattcaacacactggaacgggattttacaactcctatcttacgttccaccacttggacctcatccatcattacactaccttgtaatatgatagccagctccttatggtcattttcaaccacaatcgtatcattctcatatcctataaaacttactaccaatttttttgcaccaacaggctgttcaatagtaaatgtcccattctcatctgtgacagttccatttgttgtatttatccaaaagacattggcagcaacaacaggttcaccttggttgtccttcaccattccttttacttgagcgcttacaggcatcaaatgccacagaaaagcacctaagaaaactataaatttcatgtttttatttttctttatctgttacacacttatacaaatttagcaattcctccctactcaaagagttatcttactaaatcaaaagtgtacaaataagattcaaataccctcttggaggctgtcgacacaatgaggtatccgtatagcagctctccttttttacagaagacaacagatcgaagtttatactgtatgcattgaatatcaaatgaataacggacagtgttacgttgtccaaatgaagtgatgtacctaaaacaggcaagttaattttctggattttcacgctagaacaaggaacatctgatgacttccgctccatcatcttgtcatgatggcaagaacatcccgaaccagatttcacgtttttatttccaacatcaccacatccgcaagtacatccataattggaaatatccaccactgtcaataatgccgcatccttatcagcgcactgatagcaacgggactgcacaataggtattccgactcccatatatataatcatggaagaaagaaagattgagaataatatgtaatgaaactctttcattgttcaaattgcagtccaccaatgtcatatactacattcgggtacaaagataacgacttttttcttttgctcccaaacggcatttagccaatattccctaaattctatccctgaagaaaacaaatattgtataaatactatataatcccgtgattatccgtatctttgtaacgaattagatatttgaaaataaatgaagacatttgaagagttaggcgtttccccggaaatactaaaagcaattaaagaaatggggtatgaaaaccccatgccggtacaagaagaagtaataccgtatttattggggaacggcaacgacgtagtagccctagcacaaacagggactggaaaaacagccgcatttggtctgccgcttatccaaaaaattgaagtaaaaaaacgtgtgcctcaagcacttatattatgccccacacgtgagttatgcttgcagatcgcaggtgatctgaatgattattccaagtatattgatggactgaaagtccttcctgtatacggtggctcatccatcgaaagccagatacgcatgttgaaggcaggtgtacacattattgtagccactcccggacgactgattgacctgatggaaagaaaagtcgccaaactggagaccattgccgatgtagtaatggacgaagctgacgagatgctgaatatgggatttaccgacagcatcaatgctattcttgaaaaggttcccgaagaccggaacactttgatgttctcagctaccatgagtcccgaaatctcgcgtattgcaaaaaaatacctgcacgatgcgaaagagattacaatcggtactaagaatgaaggcagcaagaacgtaaaccacattgcctatctggtacacgccaaagataaatatgctgcattgaagcgtatcgcggattattacccacaaatttacggtatcattttctgccgtacccgtaaggaaactcaggaaatagctgataaattgattcaagatggttataatgcagattctctacacggcgagctttcacaagcacaacgtgacttggtgatgcagaaattccgtcaacgtcatttacagcttctggttgctacagatgtagctgcccgcggtttggatgtaaatgatttgacacatgtcattaattatggcctgcccgatgatatagaaagctatactcaccgtagcggacgtacaggacgtgccggcaaaaccggtatttctatcgctatcatcaacctgcgtgaaaaaggaaaaatgcgcgagatagaacgtatcatcaacaagaaatttatcatgggtgaaatgcctagcggtaaacaaatctgcgaacaacaattaatcaaactgatcgatgatatagaaaaggtaaaagtgaacgacgaggaaatcgagtccttcctacccggtatctatcgcaaactggaatggctttcgaaggaagacctgataaagcgtgtagtatcgatggagttcaaccgcttcttggaatattacagcaacgctccggaaatagaaactcccagcatgaacgaccgccgtagcgaacgtgaaccgaaaggacgcaaagaccatggtagcgcccgtgaaaagacagaacgcaaggccgagaaaggatatacccgcctgttcctgaatgtgggaaagacagatggtttttatgccaatcaaatcattgaactgattaaccgcaacatgaagaagcaacgtaccaccatcgggcgaatagatctgatgcagaatttctctttcttcgaagtagcagaaaatcaggcacaggatgttatcaaggcgttaaacaaggtcaatctgaatggcggccggaaaattgtagtagaagttgccggtgacaataatggcaaaaacgacaatggcgaacgcaggagcagtgcggcaaggaatgcttcattcggcaaaaaaggtgacaggtccaataaaaaaacgacctcaaaagaaggaaaaactagccgtgcggaacgtggctacattgaagaacgaggccccaaaacgaaagacgactggaaacaattctttaacagcgataacaataagaaaaagaaatccaagaaataaggaatccaacttaatgaaagaggattggacatagtagaaatatgcaaataacatccacttctcttgaataatagcggagtatgcggaattgaaacaacctgtcatttcaaggatattcggcaaataatataataaacccaacagatttattatattatttgccgaatatccttgtttacatcgaattaatattaacagattttttactatcttccagatgaaagattatatgataagctatctatcggaactttgacatactcagctccctgtcatttcatacttttcctttagtctttcaatttcagttcatcgattaaacaggaagctttcccatatttttcaatcatgtaaagaacatagcggatatccaccccgatacaacgctgcaaattaggttcaaaaacaatatctccactcattgcttcccaattcccgtcaaaagcaagacctattaattccccttttccattaaacattccactaccggaattccctcctgtaatatcattatccgaaataaagcaaacattcatattaccatccccagcagcataacgtccgaaatccttccttctcaagcattcgactacagaaggaagcacatcgaaatcactatctcccttatactgccttatcttgtcaaaaattccttttgtcgtcgtaaaataagaatactcaatagcatctttcggtgagtaaccacccaccatgccaaaactcagacgcatagtagaattagcatccggataaaacaccctatctgcctccatctcacgcattgcttcattcagcaaacgttcatttttctcaatattcatactagcttcttccaccgactgattgaattcataaaatttcaccaacatatcgatggcaaaagaagccgcagggtcatcaaacaagacataagtggtatctcctctcactacctgttcaaaaccatgtggtgtctttaaagaggaacgagtatacaaatcatctacataagcttggtaatcacctttaaaatctttctctatcaatgaataaacatcaggtaaaaattccttgcctacctcagttgcatattctttcaacatagccacaaagacttgtttatccacacttatatccatattggcataaatctccaacaattgccgcatattacgctccaaatcactctcctctgcctcaaaatcaaaattcagtacagctaaggctgccgtaatcaactccggtccattggcaaatgtttctccaaaatatgccatagcccgtgccgcatttctacgattacgataatttaactccagttcagtcaaaacccttgcatatttgcttcgtttatcaggttcccgacgaacccattcttgcaattggcactccaaagcttgttttttctctatcactttcaattcttttaccgcttgattcatccctatactattcttccaatagttagagctttgtgcatacttggaagcatatttaatgcggatatcatcacttttttccattgcatttttccaaatagcttgcttgatggtacgaacattaatcatggcggcattatccgtattgactctttcgtctatcccaaatgaagataaatacctgctggtagaaccgggatatcccatagtcatgcaaaatgatccctgttcataccctcccaaagaaacaggagcaaaataatccggatgataaggcacattctccggagaataagctgccggttgattattctgatcagcataaatacggaagacagagaaatccccggtatggcgaggccatacccaattatctgtatctccgccaaacttgcctacagaagagggaggagcaaataccaaacgaacatcataataatccttatacacagatagataaaactcattgccaccataaaaaggagttatctcagcacgcagcaacgtatcattcgccacagcttcctgagcaatcaatgtggaaatagaatctacaatcagtgcacggtcattttcctttgttccgactggaatagcttgcaacacacgctccgtcacatcctctgtgcgtatcagaaaactgacaaataaatccggattaggaagctccttacttaaggaatcggctacaaaaccatctcgcaaataatcatgctccacagaactatgctgctgaatggcatcatacccacaatggtggttagtaaaaaccaaaccatccggagatacaacaacacccgaacaaaaacctccaaaactaacaacagcattagccaatgcttttccaccaggattatacaattgttcagatgaaagttccaaccccatttctttcatcacttgttgagtttgtttgctaagacaacaaggaagccacattccttcactaccccatatatataaaggtaggaagactagcagcaacagtagttttttcatggttttattctacaattaatttaagtttttttgctccgacacgtgctttcaaccattcggatattttttcttgttctttctcaatgggtcttttactgaatttcatcaagactattgtcaatgtatccgttttagttgagtccacctgtaattccacagtctttgccatagctatggcttctactgtaggataaagtactttaagttcaggaattatttttttatctacagtattatatgcagcatatactttaagctcgttttccaaagacttaattctctcctgctgctccagtaaacgtttttcactattcttatagaaatcctccatcacttgggcctttatactaccaatatccatcgcatcattattcattccttgaagaataactagtttagtacctgccaaattaaaatgtttcaaattatcccttgcggttgctatttctgtttccgggacctcattgcctattagcacaacacgtatttccttcttctcaaaagaaatcttccggtctattacttgagtattattaaaatccaattcttcattaataaaattattggcagaggcctcataaatagtgcttttcacaataccataagtcaaataaatagcaggacacatggtggctaaagtaataacaatgatatattttttgactaatttttcgcgctccttatccacaaattccttacgttggaaatgcatgacacgtaccccgataaaagtagccaaactgataaatactgaattaataaaatacaaatagaatgcacctaaaaaataaagtaaatttccggtagcaagcccgaatccagcagtacacaaaggcggcatcaaagccgtagcaatagcaacccctggaattacattccctttctcctttgtagacaaagcgattataccggctaaaccaccgcacaaagctataagcacatcatatatggtaggagaagtacgtgccagcaactccgattgtacttcatccaacggagtcagcgaaaaataaagggtagctgtaatcacactaaatacagttgccaccaaataactttttagagaacgcttcaacaattcaaaatcattctgtccaatagctaaccctactcccattatcggtcccatcagcggagatatcagcatggcaccaataataactgccgtagaattcacgttcaagcccaatgaggctataaaaattgcgaaaataagaatccacaaattagttcctttgaactcaacaccattacgaatactttctacaatcaaggcttcattgtccttatccttgcgcaaatcaagatattcactaaagaactgctttatatagggcacattctttaaattattcttcaggtcactcattgctatttctttatgtatcggtttataacaggtatttgctgtaaggggaaatccgttttcacaatatatgccacaaacaataacaacagtaatgtacgaacacccaacaacaagaatatattttgaataggaagataaactgaaacaatgtaaagtaccagcgctaacaccacatagttacctattgctttcaaatcataattaataggatattttttctgccctacaaaataagagagaagcatagctactccatatccggcaaaacccgcccaagcacacgccatatagccaaataccggaataaggaaaatatttatcagaataatgatactgcatcccaccagtgaaaaataagctccccattttgtttcatcaatcagtttataccaaaaagaaagattgaaataaatacccataaacatctcggcagccatgacaataggtacaaccttaagccctacccagtaatcacgccctaaaatataacgcagtatatcaaggtaaaacataacagccaaaaaagccagcaaagtgaagataatgaaaaacttcatcgctttggcatacatttcccgactatccttttctttactcttactaaaaacaaacggctcgtatgcaaaccggaaagcctgtgtcagcatggccatgatcatagctatcttactggctgctccataaatacccaactggatagtcgcctccgccttatcaggataaacaaacggaaaaataattttatcagctacctgatttaagattccggcaatacccagaatcagaatcgggaaagaataatgcagcatacgccgcaacaactccctgtccagcacatatctgaagcccaccaattctttccacatacatagcatcaccaaagaagtacaagccaaatttatagcaaaagccactccgacattctctcccttcatacctacaaaataagcgatattcaagacaatgctggcaaaaatgaacaacaatttcaatgcagcaaacttaacagggcgtttcttataccgcaaataagcgaaaggaatagcttggaaagcgtccattgcaactacaatcagcatcatccccatataccacggatgctctccatatcccaagaaacctgctatgggatacagaaaagaaagacaaacaattaaaaacaagaccgcagtcgcccccaccgaaagcaaagtagtggaatagacacgcatcggatcatccacccccttattggcaaatcggaaaaagccggtttccataccatatgttaaaagcaccatcaacaaggcagttatagcatacatattggtaatgacaccatagccccccgattccacaggcaaagcgttggtatatatcggtactaacaaataattcaggaaccgcccgatgatgctactcatcccatatatggctgtttccttggctaatgcttttaatcctgccatcttctaatcatcaaataatgtcttctgactattataaatgctccgtcccaagtgtatataggccagttccgtgacctcacgtccacgcggagtacgttttaagaaaccttctttaatcaaaaaaggttcataaacctcctctattgttccggcgtcttcacccaaagcggttgcaatagtagtcagccccacaggacctcccttaaacttatctataatagtacataaaatcttgttatctatctcatccagtccatatctgtcaatgttcaaggcttctaaagcaaaccgggcaatttccacatcaatccttccggaacctttcacctgggcaaaatcacggacacgcctcaacaacgcatttgcaatacggggcgttccacggctgcgcgaagcaatctcacccgctgctttcatgtcacaaggcacattcaatatattagcagagcgacggataatgcttgtcaatacatcatcgtcataatactccaaatgaagattaattccaaaacgggcacgcaaaggcgcagtcagcaacccactcctggtagtggctccaaccaaagtaaacggactcagctccaactggatactacgcgccgaaggtcccttgtctatcattatatcaatacgataatcctccatggcagaatacagatattcttctaccacagggctcaaccgatgtatttcatcaataaaaagcacatcattgggttccaagctggtcagtactcccgccaaatcccccggtttatccagcaccggtcctgaggttactttaaaacctactcccagttcattggcaatgatattacttaaggtcgtcttgcccaagccaggaggtccgtgcaaaagaacatggtctaacgcctcggcccgcagacgcgccgccttgacaaagatgcgcagattatctaccaccttatcctgcccgctaaaatcttcaaaattcaacggacgtaaggcattctcaaaatcgcgttctttagttgtgagctgttgctcgcgtatatcaaaattttcttccatttttttgtttatgacacaaaggtacaaaagatattattattatagaaagaaagatggaggaattcattttcagtccctctatggtccttcttttcaacattattattgtattaattattattcattatgggaattacattaggaaagaaacaattgaacaaaggaagagtttcgctttatttaaattacagttataacggaaaacgccgcaaagagtatttgggtatcattctggatgctcctaccagtgcagagcgaagagcggagaacaaaaacaagatactaattgccaggcagataagagcaaaaaaggaactagaattcttatccgttgaatatcatctgaacgatatagaaaatacattcgatgatatacttccaacagataaaagcaatgttcccgatttctatattctgataggacaattcctggatacctatcacaaaaaggacaagaaaatggttagggcatgtatcacccatctgcgactgtttacaagaaagaaaagcttacctgtaacccttctcacaaaagatttttgtataaactttcttgagtatctcagggatcatctccgaggcaacactcccatcggatatttcaagaagttcagaatgtgcattaataaatgtatagaaaaaaagttaatgacatctaatcctacagatggtatccgcctgatgcagtttgatgaagtaaccaaagcaatcctcagtttaaaagagattcagaaacttgctatcactccatgccccaacaacgaagtaaaaagggcattcttgttttcttgctattgcgggctgcgctggtgtgatgtacatcaactgcaatataaagacatagatttctcatcaaaccgccttactattctgcaacagaaagtacagtcacactccaaaaacgcaatcttgcatctaaacttaaaccacactgccatcaaactcctacaaaggcataaaggcattaatgaggacttggtattcgggctcccctcctattcttacacactaaggattttaaacaaatgggtaaaaagagctaatatacacaaacacattaccttccactgtgcccgacactcatttatcaccaacattatggcaaatggagctaacatcaaaacagccgccagtcttgcaggacattctactacccggcacactgaaaaatatgttcatatcatagatgaactcaaacaaaaagcagtagatagtttaccggatattattgtcaattataaataaaaaagaacctgaaatggcccttacatcattaaagttgtcacacatacaactggtattcaaacaattagtattactgtatagtatccggcacgaatacgacctacctgagtaatgcggtgaacaactacttcggatgcaacttcaagc

SEQ ID NO: 14485 - DNA, 374 bp, Unknown
  gut microbiota DNA sequence
ataacggggcgttccttgctacgttggcttaccccgatgggagcgatgaaatcctgcgcgatccgtccctcactgagcagacggttgatggtgtccatgacaccgccttgcctgccttctatcatccgctgtaccttgttaatgactacctggttgaggccctgctgtttctgtaccgatgcagttgccggcattactgttgtttccataatactatgtttttaatgttgatgaatcagaatttattcttagaacttgtcttggttgttttagcatgtcccatgtatgtttcttctgacaaacggatataatcctcttcgctatatccggtcagcccgaacagttcataatatccggggaaagttttttttccc

SEQ ID NO: 14486 - DNA, 863 bp, Unknown
  gut microbiota DNA sequence
aatttctcccttaaatcaccttgacaagagtcttgccctacatcgcaccatttcggttccagacaaatatctttcccttgcagtgacttcagtttattaaccaacgcccacttcaacggatacttaatatacttgtgcatcacaggactggcagttcccaccatccagcagtttttgggacaacggcgcaccatggcgcgaacctcctgtgcctgctcactctcccatatagtcataaagtcgggagtttcatgaatgtttcccatcgacttcttccaatacttctcttccagcccattacaaggatatacatcaccaaagggatcaatgaagaagttagccgaaccggcctcacaaggcaacatacggcgaccgccttcaatataatttatcagtcccatattgaaccaggcacggaaccaactcttcggatgacgctccttcagctgccattctatcagttgcttgaagtcaccacacacctcatttttattagtgattacattgtcttctttgtggaagtagtacgaattatgaaaagcagctgtggcgaactccatccccaagctcttgctcagttggtagagcgaaagcatgtctttagaattattgttagacaccgtgcaaccgaaaccgatatctttcagccccatttccttcaatgtcagcagtgtacgaagtcccttgtcgaagccacccgcatgtccacgcagttcatcgttcttacaactcaatccctcgatagagatgcggatgccgatatttggaaacttctttgccagcgccaccacacgatcctcaaaccatccgctggtcgaaatgacaatacggtcggtatgccggtagcattcctccacaatctc

SEQ ID NO: 14487 - DNA, 225 bp, Unknown
  gut microbiota DNA sequence
atgaagagtacattttcagtaatctactacctcaagcgtcaggtagtgaaaaaggacgggacagttcccgtcatgggacgcatcacggtggacggcagccagacacagttcagctgcaaactgactgtcgatccgaaactgtgggacaccaaaggtggacgtgtcacgggcagaagcacggcggcactcgaaacgaaccgtatgcttgacaagatgcgggtacgc

SEQ ID NO: 14488 - DNA, 27447 bp, Unknown
  gut microbiota DNA sequence
atatttatattgtcttggaatcgtatatttaatacaggccttaggtccctcttttaagtgacaagtttagttttatcaattatatatgatatctttgcaactttacatttcctactattgggaaatgtaaaaacatatcggatgatttatttattgaaacattgcaaaactatactatcaagatgggctggcacatttacaatatggcagtgacaagctgattaatttttatttgttaaacgaacaggaatataaatttgttattattgaatgcagcctcaggtagtgaaattgagcaggtactggaaaaaatggtagattttgggatggatgtaggtaaggatatatttgtcgctattctgatatatttaatcggtcgttttatcattaagcagatagtgtattgatagccaaagttcttgaaaaacggaagatagaaacgttgggtagctcaaagtgttaaactttatccgctgttcggtctgaccatgtccaattggatgtttgatatgcatgatctggatgttgactgggatggagaacatgttcatgttaatatgggggtaaccatagtgaattccgtatcggggttagtctcggagtcggggaggaactcgctttgggacgtaactggactatgaatgttgaattcggataccaattgattgatgattttgaccaaggaattattaatttcggaactgcataccagttctaaaaacatatcaagaagcagatcagttctatacactgtctgtctcttgaactttattaaaatcactatttctaggtatttcagaatctctttcaaaccttttactttgcagcaaacaaattaaatgatttgctgtatgaaaaaaatgggtataatttatggttcctctactggaacttgtgaaagcatcgcacagacaatagctgaaaaattaggtgtggcatcagttgatgtaattgatgcaagcaaaattaccacagaaaaagtgggaggttatgatatcttattattagggacttctacttggggggacggtgaattgcaagacgattggtatgatgctattaaaacggtgaagactgcagatctgaatggtaaaatcgttgctctctttggttgtggagattcagagtcctattgtgatacattttgtgacggtatgggagttatatatgaccagttaaagaattccggttgcacttttgtaggagcagttcctgccgatgagtattcgtattcatcttcgatagcggtaatcgatggaaaatttgtaggtttggctcttgatgacgtgaacgaaagtggcaagaccgaagaacgtataaacaattggattgaagaaataaagaagaacttgtaattttgacaattgccttatgatagcttcagacattaacccggtagaattgaaagtatttctgaatcatatttatgaatttaaaaaaggagtacgtcagatggtactctatactaccaataggaagtatgaagattttgctgtaaaacggctgaccaatcaaaagattaattacataatccagcctgtggggaatgataagataaacctatttttcggtagaaaagaatgcattaatgccattcgtttcctagtgactcagccactgaacaaactgtcacccgagcaggattttattcttggagctatgctggggtatgatatttgtgcacaatgcaaacgttattgcgaacgtaaagtacaataatctcaatttcacgtagttttaaatgtagtagtaaagggatgtctgaataattctcaggcatcctttttcactttttatgtgaaccatctttatatctattttgttgcattattagcataaaccttaaaaatgagaagatatggataaagaaaaaaagaaaaagatggaacaaaagaatgagctgacgaatagtggtcagcggtttcctgttgaacaagtgtccaatactggtaagcctaccaagaaacaggtgaaagcagcggtaaaagagttgaatccagatgtgaacagtttggggagtagagggtaatttaaagttggatacagtgatgggtataactgaacaaattgaagaggcgaaacgatcggattcattgttgctgctggtgttctatgcagattggtctcctcattatgaatggattgaaccgttggtacatgaatttaaaaagcgggttaacattgtgagagtcaatatagaagtcaatcggaaggtagccgatacttatgaaatagaaatagcccccagctttgtcctccaacgtaaggacaaggtattgtgggaaaaaacaggcaaactattcccgggagaattaagagatgtcattgaaatgtttaagagttgagatccatacatccgtatggattaaaaaagttccgttggtatgcagctacgggactttttttcttgtaggcggttttgtacaatgaaaaacatatcgtacctttgccaaacatttgattaaatattaaagaatatatgttcagaagtcatacttgcggagagctcagactttccgatgcaggcaaaagtgtaacgttggcaggttgggtacagcgtgcacgtaaaatgggagggatgacgtttgtcgatcttcgtgaccgttacggtattacccaattggtattcaacgaagcggtgaatgccgaactttgtgaacgtgccaatcacttggggcgtgaatttgttattcaaataaccggtgaagtgaacgaacgttcaaataagaatatgaatattcccacaggtgaaattgaaatcatcgtatcggaattgaatgtacttaattcagcggtaactcctcctttcacgatagaagataatagtgacggaggtgatgatatccgtatgaaattccgttatttggatttacgccgtaattgtgtgcgtaaaaatttggaactccgtcatagaatgacaatggaggtgcgtcgatatttggacagcaaagggtttctggaagtggaaactcctatgttggtaggttctactcctgaaggagctcgtgattttgttgttccttcacgtatgaacccgggacagttttatgcactaccgcagtctccgcaaacactgaagcaattgctgatggtttccggctttgatcgttacttccagattgtaaagtgtttccgtgatgaagatcttcgtgcagatcgtcagcctgagtttactcagatagactgtgagatgagctttgttgaacaagaagatattatttccactttcgaaggaatggcaaaacatttgttcaaggagttacgtggagtcgaactgagcgaaccgtttctgcgtatgacatgggcagatgccatgaaatattatggtagtgacaaaccagatttgcgtttcggcatgaagtttgtggagttgatggatatcatgaaaggtcatggtttctctgtttttgatgatgcagcatatattggtggtatctgtgcggaaggggctgcaagttatacccgtaaacagttagaccaattaaccgaatttgtcaagagacctcagatcggtgcgaaaggtatggtttacgcccgtgtggaagctgatggcaatgtaaaatccagtgtagacaaattctattcacaggaagtccttcagcagatgaaggaagcgttcggtgccaagccgggtgacttgatcctgattctgagcggtcctgatgccatgaagactcgcaagcagttatgcgaacttcgtctggaagtgggacgtcagctgggactacgtgacaagaatgaatttgcttgtctgtgggtagttgatttcccgatgtttgagtggagtgaagaagaaggccgtctgatggccatgcaccatccgttcactcatccgaaagaagaagatattcctttgttggatacagatccggctgctgttcgtgccgatgcttacgatatggtagtaaatggtgtggaagtaggaggcggttcaattcgtatccatgattcacaattacaggccaagatgtttgagattttgggttttactccggaaagagcacaggaacaattcggcttcctgatgaatgcattcaaatacggagcacctcctcatggtggtttggcatatggccttgatcgctgggtttctttgtttgcaggacttgatagtattcgtgactgcatagcattccctaaaaacaatagtgggcgcgatgtgatgttggatgctcccgctgctttggatcaatcacaattggatgagttgaatctggtcgttgatataaaagaggaaaagtaagttttgtctgcttttatagagtcttgtataaaagaccgataacgggggatccgaacatagcgtagcgaatactgtttcagctaattcgttacgctttatctttttgatttaaagtagtccgataagctgaaacagattacaaacaaatgaaggaagcatataaaaatcaagcgtatgaaagagaaaaatacgatcaagataaagcgttataaatcaccctgcggagtgttgctgctcggttcgtttggcgaaaaactctgcctgtgtgactggcaggtggaaaaacactgcgatcgtgtgaaccaacggttgaagcggatattgtgtgccgaatttgaaataagtacgtcagaaataatcgaagaagcaatagagcaactcaacgagtattttgcaggacaacgcaaagaatttaatgtgccgcttctttttgtgggcacggattttcagaaaacagtatggaatgaactgctaaagataccgttcggcaaaacaatttcttacggtgaaatggccaagcatatcgggaggccccaagcagttcgtgcggtagccaatgctaatggtgcaaattccatatcaatctttgcaccttgccatcgtgtgatcggtagtgaccactcgctgacgggatatggaggcggactgtccgctaaaaagtttttattggaattggaatcacaacctcggttaatgttatgaacagacaagaaacatttccaatgctgtaataataaataaaaaggaatgggtgatgaaaatgcccattcctttttatcatatcttcttaatgaattaccatgttgttccttggaatacactactttcgttataaggaaccagatacccgttcattgtcagcgtgttgcccgagaaatttggatttatagtaacactagcctgattggttccgccagtcagtacaatggaaacggtggccgaaacggcaataccattaattccataattatagtacacattaccgtctttatcctgacgcatgcttattccgttcacatttccctgaaccgtgacacctcccaagccattcggactccagttatacacaaaattagtaaaggcggtctgaacaataccttgcccattgtttacttccacataattcgtgttagaggagacaaaacgcattattccattacggaatacaacgttatcagcttctaatacaaaagaaccgttttttaaagcattaattgcctggacgtaggatacagagtcctgctgagcttccaaggctttcttttcctgacgttctttcttccatgcttcacgtttagcgtcttctctttgttttctggtttgtgcatttgttactccgctgaagcaaacgagtaacaatgcggctaaaaataatacttttttcataattaagctgtttagtaaatcaataatatcttttgaatattctgataactaaaacagctttaaccatgaattgtttaacgaatatgtgaatttatataacgataacgtttgtatttaatctataaagcgtcgggttagattttcaaacttatcaatacgccggtcacggagaaaaggccaccagcgacgaacattctcgctacgggtcatatccagttccactaccatattttcttcatccatattgctggcttgtaccagtatttctccttgaggacctgccacgaagctattaccccaaaattggataccatttgtctgaccggaaggatcgggctcatgtcctacgcggttcacggcgataaccggcagaccgtttgccacggcatggccacgctgcacagttacccatgcatctagttgccggattttctcttcttgagtgtctgtgctttcccaacctatagctgtaggatatataagaatttcagcacctttcagtgccatcagccgtgcaccttcgggataccattggtcccagcagacttgtacacctagttttcctagtgacgtctgaatgggttcaaatcctaggtcaccgggagtaaaataaaatttctcataataagcgggatcatcgggaatatgcattttgcggtattttcctgctatactgccatctttgtcaaaaacgacggctgtattgtgatacagtcccggagcacgcttctcgaataacgaagtaaccagtacaatgccgtatccggcagccaactcactgtagaaaccggtagaaggaccgggaaccggttctgccaaatcaaacatatccgtatcttctgtctgacagaagtaagaggtgttgtgcaactcctgcaatacaaccagctgtgcacctgccgccgccacctgttctatattgcgatgcagtttactcaaattatgacggatatcatttgtgcatgtctgttggataattcctattttaatcgttcttttcatacatatatttattaatatacaccttcgggatattgcatggtgacgcaatgcaacgagccatgttgctttatcaaagcagtgcagtcaatacctactatttctcttccgggaaatgcttccgccaatacttctttagcgcacatatcatttacaaaatcagcataagtaggatagagtacagcttcattcattatcaggaaattggcataagttgccggcaagcgatgatgttcctcatcataaacagcactcgccataggcagcggaagcaggcggtatggcctgccgttcaaagtacggaacgcttttagttcttcttccatcattgccagttccttatagtgttcatctttttcattggtgcactttacatacacaatggtatcatccggacagaaacgtgccaatgtgtccacatggctgtctgtatcatcacctgccagataaccatgtttcaaccataggacctgttttaagttgaatgtttcttttagaaaatcctccacttcctgtcggttcatttcatttctgtttttagccagcaagcattgctctgtagtcagcaggcttcctttcccatcactttctatggaacctccttctaaaataaaattccggcagaaaacatattcacctttcagaacaggatggtgaaaatatagttcgttattaatctggttatcataatttgcggcaaacttcattccccaaccattaaaacagaaatccagtagtaggggagtagcgtcttctttcaacaaggtgataaaagcatgatcgcgtgcccaagtatcgtttgtgttgatttttgatgtgatgagtttttggatatcagctccataattatctatactatttcttatggaatcggggtctggagccacaatcaacaaattctgacgtttcaaaacctcataagctatcttaagaaaacaggcattcacttcttccaacatgcatgcccagtctgtgtctttatggggccacgttagttgaatcaaactttgtttatgccattcggcaggtaaataggacatattcatatttttaaatttacttcgcaaagatatgaaataaactttataggttgattagtcatcgcttcgtttttgtaacgaacctttccttcttttccataagaaccagcggaacagttcgtcccaagtattgaaatcttttttatacatgagacctactccttgagtggtcagggtagatttagtaaaatagcggtcattggtctgattatatcctctcaaacggaaatctccgttttttgtcaataaccatatcgcttcaaagtctcctacgaaattgctatttgccatcacattctccttatagccgaagtttccatttatcatcagcctgttattcaataacctgccggacaacatagcttctgcttccacatctgtccaacctttttcaccggtgcttaagttggcacctatgttccagtttttattgcccatccattgggacaacatattattcagctgaccggaaagtgtactgaaggctaaagaactggtcgcattagaggattggtcattattggcataatcataggtgtagaacttaccaattcccagcaaataaataatctgtgtattcatttgttcttccgtactggtagcactacgtaccaattcccggtcttcctcgcttacagtgggcagttccaaatcgaatttaatatccggattggataaatttcctgtcagattcatcagacagtttaccttcaccgtaccttggttacgcgagggatctactaccaaatcacttaaagaagctgaattaaccgtgtacaccgcctgtaaatcaagatttgcttgataaggatcacctgagaaagtcaccgtaccacccgatttcaagataaagtccttgcgtattacttcctgcatgcttagtttatacataccttgatctataacataactaccaaacatacgaaagtcacctttattgaaaaaattcacttgcagatttccatttccggttgctgtaatattatctcccgctacaggatccatgataattttcatggtagcgttgggagttgcttctatcaacatattgatgcggagatccataggaggtccgtcttcctctttagtcttacgcacattagagtggtggtaaagatcggtttccacatcatcgtgaatgcgcttgggagttttgtctacaaaagtaataaactggttgctcgctgcttccgtggtcactccggttatataagtgaagctggtattgctgcctgtagtcagtgaagcgtccactgtcatcgcattatttccaccatccagcaccacatttcctgtaccatatacttttccgtaaaaaggcatattcccggcttcgtaggtattgtacatcaacaggttgtttcctcgtatattgaaatggtacattagatttttcagctttgtgtgatgcagataaccatttaccagtccgtcatgtccctcacggtcatagacttttacattcctgaaatccagactgcccgaagatatatgtatggagtcatcccggatttggaaataggtgttcaacacatcaattttagcatccattttggcccgcacttcaccttccagatccaaatgcttgaaatcaccatataaacggacattcccgttgacacgaccatttatttcactgaaaattccttctataaaaggttgtaagaatcccagattcgtactatctgcccgaatcaacaggtcaagaccttttaacttgggagagacataccctgtcacatgagtggaggaaattcctttttccgctatttgggcatccagtcgtactccgcccaattccttatcccatacacctgtaatatcggcttctcctaataaagaacggttcagacagaaattgtgcacatttagacgggttcgcatcacggggttcttcataacacttttcaaatgaacctttccagttacaagtccgccaaactctacatcgtcaaactgcacgatatccagtacatagtccagcttgatatttctcaaatccacccggcaggaatcactttctttcttggtcagtttaccatctatccttaaatattggtcttcatgttcaaacaggaaattattaatgaatacgcgtcccgaatctatggcgatatgcgaaggatgaatgttccataccgtatcatttagcactacttttgtgggctgtatgtttatatctgcctgaagaataggatgggggccttccgttttgaagaaacgggtatcggcggcaaatttaccaccgtaagtcacatcagtattgtttccccagttaattgttgtttccaaatgatcgtttttagcattggcttccactgagaagttaagcattgcaccacttttcattaacataccgcctcgcagtgagcatttgaaccggtcggaaggattctcacaaaataaaacgcctgaatcataacgtgttccattgtatctgaattccggaaaatgtccttctacgtgcaacttctcctcgccatcgttaaaatatccttttaaagatgccggcaaatataattccaatggaatctgaaataatttggatagcacttcggtattctccaggcagatatcaaactggaagttattatgaggctcgggcatattatcctttattgtcagtaaggacggaatatagcgttgtaccgtctttaccacgctggccggaatggtgtggtaggaatagtcaccgcgtatcactgctgtcatgaaggatgaatttatgcgcaactctttttcaccgcttacctgtccggctgtaatagtcagattgtcaagaaaacaccctctttcatcgggagcgtttaattgcaggctgtccaatgaaatacgcccgttcatgtcgtcaatggatttgccggtgaaatcggccgtgagtcccagcgatatactggcattctcatatttgtccgacaaatggaggtcgtgggggcgcaggttctttacggatgccttcagattaaagtcagggattgttttggcaacattgaaattaccgtctatctggacagaaccgtttgcgtcgtccatggacaagcgcccgttaaagcctccatccttatatacgccatccaacatgatattttcatattgatattgactatattcaaaagaagatatgattcctttgatgtatgactccggataccggttcttatagttgaaacctttcagttccacattgaaatccaccttgccgaatttcttttcctgattaagtaattttcccaaatccaggtcagcacttgctacactacccgaataggttctgctcatgctttgttcatcaatgctcatcatcacgtccgttttcaccatgcctgcccctgtatagaacaagcctgtcagtgtgagatcatgcagatagcccgccgcttccccgttaaaacgaatatagtccaaacgttgcaaaatgggaggaacctttcccgtcaggttcgtcatcagaacgtttatgccctctttcgtcatgatcaggttacccagtttgccgtaaatgtacatatccatgcctgcatcccagttactcagggccgcttcccctgcaatcatcaatccgtggtggttagccagctgcagggtggggcagtccaaatgcttgccgtgaccggagaaaacaagatttagatccaacggttcttcaaaacgtgacaaggcaggcacaaaaggagccaaatctttcagtataactgaagccttcaaagagccatcgtatcttacattttctgtcatttggggcaattcgggcaggctgtcatacttcaaggtcagactatctatctttaaagcggtatttgaaagttccacaccaaaatccttaatatccaaacgtttattgttggctgtaactttcatggcaaatttctgcaatgaaaaaccacattgttcgtcaaagctgacccgccggatggcagcattcaacgagtcgctgcgcaatgctttcagtgaaagcgtcgcagcgagattttttaccgatagatgatgggcattgaactttccgggagtttccggttccgataatatatcgtatgtcactctgccacgccttatcaacacggaattaattcgtaaatccaaattagattttgttttaaccgtatctttggatgcgaaagcgtctaacacaaactggaaattaggggcagattctggagtttcccggttcaaattgaccgtaaatccaaaaagctggacactgctgatggtgactttaccgttcagtaaaggaagaagatcgaattttgccgacaagcgggctactttcagcatctcctgattcttccggtcatgcaaaaggacatcttccacaatgatgcggttcagcaaacccatatcaatccgtcctatagaaacctccgtattcagtatgttttttaattctttagttacaaaaacagataatttgccctgaacatacggtatgttcagcagcacaattattcccaggtagacaccaatcagtgtacctagcagaatacgcacagtgtacttaagactcttactagaaatcattgtttattttgggctaacaaaaatacgaataacgtacgacgtagcccaaaataaacgatttttttacttgtttttatgcaatcttttcaactcgaaggagaaaatgacacggaaacatccgataataaggaaagtgatggacagcatgtagagcacggtgacagcgccaagtccgggttgccagatgatagccatagagcaaagaatggccagaatgccaaacaccagataccatccccagtccttcgtgccatagcgtttcaaatctgtggaatagccacacaatgtaaaccctctgaacatcaaccaaaaagcgacaataaacggaatcagctccatgctgaccaacggatagaataccagataaatacctatcagtaaatcaataatacctccggcaagataccatccccaactgctgattgttcttttgtttccggcagcaaaaaagatttccagaatgccactgaccagaatcgagatactgaagatgacactcagtgccacataactgctcacaggagcgaacaataaacatagtgctaccgcaatgtagagcaagcccagcaacagggacatccaccaattttttacagcgtagcctaagccaccaactaattcattcatatttgttaagttttaggttataatttgaactaataacgtcccctttgcaaaaaggtttacctacaaatacaaaaaaagtctttaaataccgccgattgacttttagaactcaaaaaatattccgaactttgcacgctgaaaactaaattgatagttctatttacattttgaataaaaaatgaatgaaaaaagaatgaaagataacaaaatcccttcaccgttagtatcccttttacccgtattcgtacttattttattattgtttgtcactatccgtacatttggaagcgatgccttgtccggtggcagccaagtctgtctgttagtggctacagcagtttgtgtgctgacaggtatggcgggattccatcgtccatggaaggacttcgaactggctatcaccaataatatagccggggtaagtaccgcacttattatcttgctgatcatcggagctttgtccggagcatggatggtcagcggtgtagtccctacattaatatattacggcatacaggttattcatcctcattttttcctggtatccacttgcattatttgtgcggtagtatctgtcatgacaggcagctcatggactaccatcgccactatcggcatcgcactgatgggaatagggaaggcgcaaggtttcagtgaaggttggattgcaggtgcgattatctccggagcctatttcggtgataaagtttctccgctttcggataccaccattctggcatcttccgtaacggatacaccgctgttcactcacatccgttacttgatgattaccaccgttccatcacttgtcatcactttgataatctttaccatagctggattgtcacatgaagccactgataccggtcatatcgccgaatacacccgtatattgagtgataagttccatatttcatggtggttgatgattgtccccgttgtcacagcgatactgattgcacgtaaagtgccttccatcatcactctatttgtttctacggctctggctaccgtctttgccttgattttccagcccggactattatgcgaaatcgccggacaaggagccgaagggattgccgccttgttcaaaggaggaatgggaatgctttatggtggaacccaattggaaaccggtaatgcggaaataaacgaactgatatccactcgcggaatggcaggtatgatgaataccatctggttgattatctgcgccatgtgtttcggaggggcgatgacagccggaggaatgctcggcagtatcacttctgtctttgtacgttttacgaaaaagcgggtaggaatggtgtcatccacagttgcatcgggcttgttcctgaatcttgctacagcagatcaatatatatccattatcctgacgggtaatatgtttaaagacatctatagtgcaaacggttatgaaagcaaactgctgagccgcacgacggaagattctgttacagtcacttcgccattgataccctggaatacatgcggtatgacacaggctactatccttagtgttcccaccattgtgtatctgccttacgccttctttaacattatcagtcccttgatgagtatcacaattgctatactgggatataagataaagaaaaaagcagaacagccgggcctgtcataataatgataggatctgatgattatatatctttcacgtgaaagattagcagggttcaaaaataacttgtacatttacccaccctaataaatcattttatatttttacaataatatgaagaaacacatcacattcgctcttctgtttgcggctgcattgacagcccaggcacagcagggaggcatttcaggtgaaatgctgaatcaaatcaaacaaagttataaggcaacccctgccgacaaagccatccgtaacgccttaggcggaacaagtatcaacacgttggcattgaaccaagagaaccgtgccgattttgatacggaattttcacacaaggtgctatccaaggggataaccgaccaacaatcttccggtcgttgctggctttttaccggactgaacgtgctccgcagccagatgattgccaaatacggactggatgagatggagttctcacagaactattgttttttctacgaccaattagaaaaagcaaacttattcttacagggaatcattgataccagtggaaagcccatggacgacaaaatggtggaatggctgttcaagcatcctttaagcgatggaggacaattcacaggagtttcggatattatagagaaatacggggtggttcccaagagtgtgatggtggaaactttcagcagtgagaataccggaaagatgagtaatctgatcgggttgaaactgaaggaatttggtttacaactacgcgaagctgccactgctggggcaaagcctgccgaactggaaaagaagaagacagaaatgctgggaacggtttaccgtatgctggtgttgacccttggtgaacctgtttccacctttacatggggcctgaaaggtggagaagcgaaagaatatactccggtgtctttctataaagagtttttgggaaatgatttgaccaataactatgtgatgctgatgaatgaccccagccgcgaattctataaatgctatgaaatagattttgaccgtcaccgttatgatggcaagaattggacttatgtaaacttgccgatagaggatattaaagaaatagccatagcttccatcaaggacagtaccatgatgtatttttcttgcgatgtaggcaagttcctcgatagcaaacgtggtttgttggaccctgataattatgattacgaatcattgatgggaactactttcggcatggacaagaaacaacgtatccagactttctctagtggcagcagccatgccatgaccttgatggcagtagacttggataaagcgggaaaaccgaaaaaatggatggtggaaaacagttggggcagtgccagcggatacagaggacaccttattatgacggataagtggtttgatgaatatatgttccgcgtagtagcagaaaagaaatatgttcctgctaaagtactggatattttaaaacagaaaccgatccgtcttccggcatgggatccgatgtttgctgacgaagaataagcgccatctctttacattgtatataatttaagcggactgtacagaaaagaaaaactgtacagtccgtttttttattctaaaacattgttcatgtcttccatttttacttttcttttacttctttcttgcaaaagaaacataatgaggaagaataggtttgttgcagtgatgatttattgtataataggcttgcagaaaggtgtttcttgcatatttaggtataataaaaaatgggaatctcttcgtaagagaaccccatttctgtgcaaatatagcccatatttgctttaaacgcaattttttgtattgaaaaaataagaaaaagttgcaaacaggtgcatctcgtttataaaaacagcatacgacaaaaccagtaaatattcaattatcagagatttaacttgactttggggttctcttacgaagagaaccccaaaatatagaggatatctgatagcaaatctgttcctctttttcaaataaaggaatgataaaatgtaatgttttgatgggaacaacgaatgacaatcaagacataacgagcgaggcgcctaagttactgctctgcagttcaatcgcttctgcttcagacccggggtcaaatgcagtaaccaagccacaggctggaatagggaaagaataccctgaactctcgtggtactatatgtatctttcctataaggaactgaagcgttatattgcagtcttcagtggcagaaaagcagtaaagctccgtacttcggaagggataaccgaggaatgttacttctgtttcaaagtattttcttatactgaggcaggtcatcggaaacgtttcgaacagtgtgattatactaaacaagagtatgctgctcgccgtgagtctgccagaatcgtgaaggaagccttttccgccggttctgcctcacaactcaatgccctgacagatgaaaaggaagtacaaggtagcggttggttatttgtgtgcgctcctttggagcaacttcagcgcatcttgtctgccatgctccctcgccaatatctggtaacggactacgttacccatcgtgctgcggttattccccagcgtcagatggaggaattcatctatctatatgaatccatgccttacaacattgaactgttgaaccgtcctttggaagcttatcttcagaagaagcaacgtattcgcattaccggtggtatttttcatggtaaggaggggtgcattatgcggctgcatcgcaatacaaggttggtgttcgcttttggaaatatgacagtggctatcagctatcttcatgcttttccatttgagaaggtggactagtttttataaatttatctcttatttcaataatagaatatatacaaatttatatgagtaagaaagaagatctgaagcaacaaatacttcagttgacacgtgaatattataacgaagttcataaaacttccaaagtgtttgaaccgggcaaaagctttgtcaattatggtggccgttatttcaatgatgaagagatggtaaacttggtggactcatcacttgatttctggctcactgccggtccttgggcccataagtttgaaacccgtctggcaaaatggctgggggtaaaacattgtgcgcttaccaactccggttccagtgccaacctattggcattctatacactgacttcccccaaattaggagacaagagaataaagaaaggtgatgaagtaatcacagtcgcttgcggctttcctaccacggtaactcctattatacaatatggtgcggttcctgtttttgtggatatcacgattccagagtacgatattgacgtcacccggctggaagaagccttttcagacaagacaaaggccgtaatgatcgcccattcattgggaaatcctttcaatcttgaagcagtcaaagcattctgtgacaaacacggactatggctggtagaagacaattgtgacgccttaggatctgaatataccattgacggagtgacgaaaaagacaggtacatggggacatatcggaaccagttcgttctatcctccccaccacatgaccatgggcgagggcggtgcagtctatacagatgacgccgaactagacaagatagtccgttctttccgtgactgggggcgcgactgctggtgcataggcggtgtggataatacatgcaaatgccgtttcacaggcaagtttggtgaactgcctgcaggttacgaccacaaatatgtatatagccatttgggctttaatctgaaagtgacggatatgcaggcggctatcggttgcgcccagcttgagaaactggattatatcgtagaatcccgtcgtcgcaatttcaagatactgcgtgaaggactggagggaaccgaaggcctgatacttcccgaaccgataaaaaactccgatcccagttggtttggcttcctcatatcagtaaaatccgatgccggttttacccgtaaccagcttagtgaatatctggaaagcaagaaaatccagacccgtaatctctttgccggcaatctggtgaaacatcccgcattcgatgagatgcgctctaccggcaaaggtttccgcattgtcggtgaattgaaaaatacagactttgtgatgaccaataccttctggatcggtgtctatccgggcatgacggaaaaaatgctgcaatacatgatctccaccatcaaggagtttgtagcttctcataagtaaaattcaaaataaacaagacatgaaagcggtactatttgccggtggtttcggtacacgtctgagcgaagccaccaatctgatacccaaaccgatggttgaaatcggaggaaagcccatcctgtggcatatcatgaaaacttacagccactacggtatcaatgaattcgtcatctgctgcggctacaaacaatatgtcatcaaagaatattttgccaactatttccgtcataattgcgatatgacggtagatttatccaacaatacggtgaatatacacgacaaccattcggagaactggaaagtcaccatggtagataccgggctacatacccagaccggaggccgcctgaaacgcatacagaaatatatcggtaacgagcgttttctgctgacctacggagacggcgtttccgatatcaatatagcggaaagcatcaaagcacatgaagcctccggttgtgccgtttcactgacagcctacaagccgggtggcaagttcggagccctgcagatcgatctggaaagtgacaaggtcttgtcctttcaggagaaaccggacggtgaccgcaactggatcaatgccggctatttcgtgtgcgagccggaagtgttcgactatataccggaaaatgatgacacggtgatatttgagcgcaagcctctggaacaattggcaaaagacgggaagatgcacgcttaccgccatacaggattctggaagccgatggataccctgcgagacaatacggaactgaatgagatgtgggacaaaggaactgctccttggaaagtttggtgacaaagtcgtggattgtttgtataatcaaaaataaatagcattatttgcagaaacaaaagatacagaatggacaaggaaaagaacatagcggaagaaatcaaaaccaaggacgatataaaaaagttctttcggagaatgattgaagacaagcaggcggttgctgattgtatccgtgcgggtcgtcctttgtccgatttgaaagaccggggtattaaaatagccaagttgaccgatgtcctcagctaactgctgcccggctgatgctatattctttagtccatatcaatgagacatctccttatgaagtttttgcatacaaagaagacaccgtctatttcataacagatgacgacagtgaatatcttgtcggtttcattgaagaaacaaatataggaattcagcgtgcctatcagttgtttattataaaaaaagaaatggaatacatatcggtacggatgtgaagatcgggcggacagtttcatccatcgttcattcattttttcgtaacccttccaatatattagtttatatttgtgataccagtgacaagcatcaggcggctcgtgaccggaagtttaaaatctggtttaaacagtatgcttccttggatgatctggtgtttgtctcggaagtgatagatgtggaggatgattcttatttcgcttctatgattctttccagacgaacaactgatttttatcagatacagacaactttccatgattatttccaagatttacgttctaaattagataatcatttaactatttctatttataaaaatcaacatgatagacattttccatgatttctatcgcgggaagcgtgtgcttgtcaccggtcataccggtttcaagggtagctggctttccatctggctgcacgagctgggtgccgaagttatcggtgtggctcaagacccttttacggagcgtgacaactttgtgctttccggcatcgggcagagaataaagacagatatccgtgccaacatccgagacggtgaacgtatcaaagaaatcttccggcagtatcagcccgagattgtgttccatctggcagcccagcctttggtacgtctgagttatgacattcctgtagagacctatcagaccaacgtgatggggactatccatattcttgaagctattcgttttacagacagtgtaaaagtgggcgtgatgataactaccgataaatgctacgagaacagggaacagatctggggatatcgggagaacgaaccgatgggcggatacgatccttattccagtagtaaaggtgcggctgaaatagccatagcctcctggcgtcggagcttctttcatcccggagcgtatgaaaaacacggcaagagcattgccagtgtaagagccggaaatgtgataggcggtggcgactgggctttggatagaattatccccgattgcatcaaggcattggaagcaggcaaaccaatagaaatccgtagtcctaaagcaatccgcccctggcaacatgtgcttgaaccgcttagtggctatatgcttcttgcgcaaaagatgtggaatgaacctgtgaaatattgcgaaggatggaatttcggcccgaaggctgaaagcatcaccaatgtgtgggatgtagcctctatggtgatagagaattacggaagcggtgaattgaaagacctttctgctccggatgctttgcatgaggcaaagttgctgatgctggatatcagtaaggcaaaatttcaattgggttgggaaccaaggatgaatattgacgagtgtatacagctggttgtagactggtacaaacgttataaagaagaagatgtgtatggattgtgtctggaagaaatcaataaattcatcggataatggaaaaaatatttcttataggtggtagtggattcataggaaaaaatctggtacgatgtctgtcgccttattatcagatatctattttcgacaagtatattgatcatgatttttttgcagattatccttctgtaaatgtatatcaacttgacttggtagcagataacataccatcggaaatcattgctcccgattacatcatcaatctggcctctatagtgaccgccgagcgtgatttgtccttgtttgataaattgatatcatccaatctgaaagttctcctgaacttatatgaacgttttaaagatacctcttcattgaaactttttatccagttcggcagttcagaagaatacggttcaataagttcgccattcaaggaagaaaaccgggaatatcccaattctccttatgctttggtaaaacaactgacaacaaatacagccttgatgctccatcgtaattatggctttccggcaatggtcgtccgtccgggcaatctgttcggaccgggacaaaataaaaataagtttattccctatgtaatagacaagcttcggaaaggggagcctctgaatgtctctccttgcgaacagaaacgcgactttatttatgtggatgattttgcagaggatattcatggactacttaagaattataaaaagtgtgagggtgaaattgtaaatgtgagtagtggaaatagtatttcgttgaaaactataattgagttttatagaaatgaattgaattccaattctgcaatcaattatggtgtgctaccatatagggaaaatgaggtcatggatttgcgctgttctgttggaaagttactttctataatatattcttcctgtccaatagaacaggctttatttaaaatgattcaataatccaagttaatatcgtaggagtaagtattgctggactaggtacgttctatcccaaaagaaacagatgctatcattttggaaaaggatgatgtttatggaaatatttgtaactatttattgcgcctttataagccgaaactattgacgcttcagataatagcactatcaatgaaatgaacagactttgatgaacgggttagagttgtaggaataattattgtatcaattttatggcttcattaaagcaaaatatattttggaattctgtacgggtaggaagtaacttagttttccctttggttacttttccttatgtatctcgtgttttaggcccagacactattggactgtttaattatgtcacagccattgcagcctattttacattatttgcctcattgggatttcctatatatggggtacgtgaaatagcaaatgtaaaggataaccctaaagaattgggcaatattgtaaattcaatatttactgctaatgtaatagcaacctttattgtttatctagcatattctgtggtggcattattgattagtggagaatatttattgctttattttattataggattatcggttttgatgagctgtatcagttttgactggttttaccaaggtatagaagattttaggtatattacagttcgaagtctgataataaaagttgtttcaatagttgggctttttatttttgttcatgataagtctgatttactggcttatgctatactttcaattgtaggaacttgtggtaataatatattaaatctgattcggattaataaatatgtaaagcttcgcttttctttagttgattgttggaaacatactaggggagcttcgactttatttctaggtactatagctgtcagtctttatactaatttaaatagtattatggtaggtgctttgggaacaatggaagctgtaggattttttacaacaggcaataaagttgtgagtctggtaatgactattattacagcggtgacttctacaattattccgagaatgtcttatttagtaggtaacggtaaggaagaggaagctgtttttttgcagaaaaaaactattaatttattgaactatatgtcattacctatgatagcaggtttagttatcttggcaaaaccgattatattggtatttagtggtgaagaatttctgccttctgtcatagttttgcaaatactgtcatttttacttattgttattccatggtcgtcttttttaggcttgcagatactttatcctattagaaaagaaaagtatggtaattatgctgttattatcggagcattggtaaatttagtgttgaatttctttttaattccccggtatgcttatgtaggtgtagctgtctcagtagtgtgcgctgaaactgtcattactttggcacattatatttttgcaatgaaatatatgaaattaaaacttcatgattttatccctattaaatccgttgtttcaactttggtgatggctttggtagtttacgtatgttcgtcttacagcgattatcctgtttgtgttgtagtttgggctatagtaggtgcattggtctatgtgggtactttattgctaatgaaggataagtttatgaaagaaatgattttcaaaataataaaccgatgagagatatattagaaataaaagataatttttccatttataaaggaatcaagagtagcctgttatggggcaatccaagttattgcaagaaacctaaagtatccattattatgccagtatttaaccatcctgattattttcggaaatcattgagttccgcaataaatcaagactatactgatgattatgaaattatagtggttgataataatgaccagactgatggaccgactagtaatcaagtgattgtagaagaatttagaaaccctaaagtcctgtattataagaatgaaaagaatataggaatgtttggcaattggaatagaggtattgaattggcaagagcaccttttgtgacttattgccatgatgatgatatgctgttaccgagtgcattatctagattgatggagcttcaaaaaaaaacaggtgataaggctatattttctgcatacaacaaaatggatgataaagagacaatatttttctcaggcgaatatatttctaaacgcaaatggggaatgctagtttcatgtgattattatccttatactttatttaatcagtttattagttctgctggatttggtgtgggatgtttgttttcaagaaaatgtttattagagattgggggatatgattctgaattctatccgtcttcagattatgctatgcaggctcattatacattccgttatggtagtgtttataattgcattcctacatttaattatcgcgtggtggaaaatgaatcattttctgtttatgataagtttgtagaagtagaccggcattttaggaactgtatgaaaaaacatattagtcttcctaattttattttgaatcgtattataaaggcaaactataatatttcccaaattaattttgccattatttggggaaaagagaatatttcgctgcatgaaaatgttagatttggtgacaaattgataatgtacattgtatataaactagcgttatttagaagatataaattaatttgtaaatagagaaattatttaggaacaaaatttaggttttaaaatacatgattttatggataaaatattgactgtcgttatacctacctacaatatggaatcttatttggaaaaatgtttagattccgtattagttgagcaggttataggactgatagaggttatgattgtgaatgatggtagtaaggattcttctttgctaatcgctaaaagataccaaaatagatatccaggttctattgttgttgtagataagaaaaatggtaattatggttcttgccttaatttagcttttagtcttgcaaaagggaaatatattcggactttagatgctgacgactgttttgatagcattgagcttgttaaatttatagagaaattgtgttctttacctgaaaatatagatttggtattaacaaattatgttgtaaatatagttggtacaggtaaaagcaggctaattaagcagaaaggattttttgagaaaatttataaccatattattgattttgagaaaaatggaataatttataatattcatgcggcaacttatcggacttcggttttacgtgacaaccatataagattatcagagggaataagttatacagatattgaattgttagtttattcattatcttattgtaaaagcctcgtgttatttgatatctctttatatagatatactattggaaggcaagaacaaagcgtgtctatgtcttcttatcttaaaaatatagatcatatatctataattttgcatcgtatcgttgataactataatatttttttttctgaatctaaattagtatataaaaatcagattgatgctctatttccacttataagcattttttcacgtttgataataattgaaaagagaatcaaacgtagtgaaaataattcatatgttaggttacttgaatctgttatggaaaaagattcatatttgtcgtgtaaaatgttagctttaaaaatgacttgcattttttattttaaattatggtataatggtgacagatgtaaaaataaatttgctttaaattctctttttcttttcatttcttatttgaaaaagattaagacatacattttgcagtaatgaaaaatatgaatagtgatgtctaatcactagtgttatgtcgtttttatagcatacacattacttagtatagctaaacggaatgtattaagtgatctatcaattaatgttttatgattgcaatttggttagtagttttaggaattacctttgtcctatgcatgaagcgtacaatttatggttgttgtatgcttgtttatgcacgaattttgattcctgatatagttaggttgacccccttagctgatataagtctaaacacaggtataataggtgttattggcatttttctgtttagagatttgttattccagaaagtaacattgaacggattggtaaatgataagtacattcggaatattttgttttttgcaattctattgttattgtctattttattgggaacatgtcttaattttagcaatcaaataggataccttaagcagtactttattacagacttatttcctcctattgcagttgtagcatcaataagaaataatgaagacgctcgattgcttctaaagagtgttttgatagctgtattaataaataccgtttatggtattttcacagttattattggaaccaacccatatttgttttttttgaacttgtactatgcatcagatttttctaagcttatagatgattctctatcttcacgcagtggtataataggaacatcatctacttttcgacatgctaacttttggggaacgttcctgcctttggcttttgttcttgttttctattattacagattgactaaaaagaaactcttcttatggactaccatatttacttctatttgtatattcatttgtactaaaagaacagcaatggtagcttttttcttgacattgcttatgtatttttggtatgctaatccaaaggtgaaaaagaatattataatttattctttcattggattgctaggtgttttgttgttggtttattttgttccacagctggaatcggctaagaatttgatagaatcctctcttttcttttgggatgattctctaagagacaaacatgatgtgggaggttcttctatgtctatgagaataaaccagactctgtatccatgggtgatgatttcagataacatattatttggccatggattcggttttacagcagaaaatttcaatacgtttggacttcatcctgttatggcaaattttgaaacaattttagcccaagctgtatgtaatggtggcctccttggcatttttacatggatttatttttttgtattcaatttcaattatagcaagaactcggtccctgctcatttaaggcaattcccgaagttattaaatctgtgtgcgttagctattgctgtcgcgaatggtttggacgttgttttattctattttctatttaatattttaatgaaaaaatcgtatctaataaatgattataagtaagcaaattcattatgcaaaaccttcaatctaatgagaaaatttcagttataacaatatgctataat

SEQ ID NO: 14489 - DNA, 882 bp, Unknown
  gut microbiota DNA sequence
aaaacaaagactgtctttgtgcaaaccatgcatagaggtatacgccttccgcgtgcggctatggaaagtctcccccacccgcagcagctctatgccgccgtatgaaaaaaccaccggcctctcctgataagttctgtttgtcttcaaatcagtgtaacagtcactcccatcctctttggtgacagaaagaagttctcccttcaggaatctcaatctccggcaacagcctgtcaccaccatggggactccggactcatccaccactcctgtccggccatctttaaaacggacagcagcccggtttgcacaaatatcaaatacttcccggtattgaggaatcactgtgattttgttcccgcacctcaagccccacaaaccactctgccggtcatgaaaggctttcaaaacagtccattgttcctcaccgaccggaccacctcctcccaaacaaatcaaatccccgttccgaacagcatccagcagacgggcgtgtgtcatcacaatttccagtccttcattccgtttgctatcttccgatagagagcaagacacagacagcccgttgttctccatccgtgtccggggctgagcatttcccgccatccgtccttcgaacatcgcctcccagtcacggtcacggacaggcagaccgaatatccggtgcaatcccacattatctatcagcacacatgattccttattatccgacttccgcagcccccggcccacctgttgcaggtatttcgccaacgaaagcgtgggacgtgccagctgcacgaactccacatcgggacagtcaaacccttcagaaaaaatatccacattgaccaacacgctgatctttccccgcctgaaatcctctaccagtcttccacgttccaa

SEQ ID NO: 14490 - DNA, 197 bp, Unknown
  gut microbiota DNA sequence
gggaagaaaggaattgtctatgccgtaagtattgcacacgcccgacagattgcagcctattacagcttacatggtgtggagtctgttgctatcgatagcaagactcccgctttggaacgtggaagactggtagaggatttcaggcggggaaagatcagcgtgttggtcaatgtggatattttttctgaagggtttga

SEQ ID NO: 14491 - DNA, 20208 bp, Unknown
  gut microbiota DNA sequence
ccgttttttaactcataattccaagtttttcatgtattccgtcgcaataggctttccataatcggggtatatctttccattgataggcttttgcaaacggactggtgaacaacgcgatgaaaatatatcccattactccgttgaagccgcgaagatatttcactgctatgttgcgtccgtagtgatggtttaaataagttgaattacggatctggtaaaagcgtttccactttttcttcttgcttcgctcattccatgtgtcgttggagaagaatttctctttatccatcagggcatcaggtatatagagtattttgtaccctgcccgtatggtgcggagacagtaatctgtatcatcacagaaaatgaaaaggtctttattgggaagacctatcttctcaacgacttcgcggcggatgaacggaccttcgaaagctgttcccgtaatttctgtcggtgaggtgatgtgccgtcctgccagtttcttgctgtacatggatacaaaaggattgctcaggttgtatgcctggaagtcatgggtgaatatttctccttcgagcaacctgcgaggggccagtatgccgatatctttcttgtcggtatacggcaagagttgttccagacagtcggcccgcggaaatacatcgtcatccatgcaccaaatccagtcggcacccgcctgataagcgtattgtatgcctgtatagaatcctcccgcaccgcccacattggtctgattgattactgtcagcccttcctgtgcggcaagccattccgttgtaccgtccgtgcttccgttatttactattacaatggaagatatcggcttgttttgttgcagacaacgaatatttcttttcagaagttccattcggttgtaggttacaactacggctataatgttcatgatgcatttagtttttagtaaaggttatctatttttcccggctgtacgcttctataggctctcatgagctcaaagcatttttccacatcaaagttccgtgtcttggcgtattcttctgccatccatcggtgcatttgtggagttgccggcaggcgttcaaagtttttgcagccggtcttcatatctatggggccgatgtacatccggttcaaatcgacaatttctattgttatgccattgggagttttctgaaacaggatgttggcacgtccgtagtctttgtgggcgtatccgtgttcgtgaagacgggcggtcactttgcctatggcgcggaatacttcctcggcgtagtcaaattgctgtgtgaacaggttgtcgtaaatgtaggggcaggtggagaggaggctgatataataacttttatcgaacagcagccctgaacgtatattcatatatcccaccggttgcggggtgcctacacctattttcagcagcatttctgcatggtcgtaagagcgttttgccttggatggacgaaatatgccatatacaaaccggttgataaggtgggggctgtgaaaggatttgataacatattctttgccattgtattccattttccgcaattcattgcgcccttggtgaataacagtaccttcattcctttggaaacgttcgggaatggatactataaattcttccagatttttgaaatcagggtgaatcactaaggtgcggggatgaaacaaacgctctgtcttgctcatatcattataatagtgttaaattttgtctagtcctttggtatatttcaaccagtaatattttaaaggattcttgtatttcagttgtttccacggacggctgctatggggcctgtgccatacgggcaacgtggtgaacaggtagttttggaaacctcgtttcagtgactcgtgcgagatggtcacatcataccagttcttgcttgggtctaatgtttgaaagtcaaatgctttcagcagtccgggggtgagtagtgaacagcagaagctgcaatgctttttttccgggtacacttgattctcgtgtcccttggcgtgtaggtaggggtaattgattatgcctttttcatcggttgtcacagctgctgcaattccgcattgtttctgttgcaatgctccattgtatagtgattgcaatgtgttttttttgacaataacatccgattccacaatcagcaatcctgcatctgcttcgatggcttctttttgtgctgtttgtaacaccagtagatagttgggagaggggtggtcggtcaggtctgataagttgaccagacgaaaattccattgacgggcggcctcttccagccgatgggtattttcttccgtgctgaaatcgttatagacagtgtaagtgaaaggaaccaaaatatccgattccatgattgcttttacggtttcaagcgtggagtcaatcgaatcttttacgggtgttatgatatgaaggcacttcattggtttgttatctatattgtttgtcaatttaggaatatcatgcaaatttagcggaaaaccttggggagtccaaggatttccttttatttaaatgtctttttgcataaggcgagggcagcggctacggtatcgtccatgtcggcgtatgcgtattgtgccagacggcctccgaataaaacgtctttccgctcagaggccagttttttatattggctcatcatttcggtgttccgcttgtcgtttatcggatagtaaggttctttgcccggcgcgaaatcatcgggatattcatacgtgattacagtggtgggctgtgtgccgaattcaaagtgcttgtgctcaatgattcgggtatagggtacctcacgttctgtataattgactactgcgttgccttggaaatcttctgtttccagctgtttatgttcaaagcgcaggcttctgtattccagatgtccgcattggtaatcgaagaactggtctatgcatccggtgaacaggatattgtttgccaatgcgtccagttcattgcggttgctgaaataattggtgttgagacgaacctcggttccttccagtaacgcatcgataagggcgttgtatccgcctttggggattccttggtagctgtcattgaaatagttgttgtcataaatgaaacggaaaggaatacgtttgatgatgaatgccggtaattctttggcggaacgtccccattgtttctctgtataacctttgataaggcgatggtaaatgtcttttccacatagctttaatgcttgctcctccaggttggcgggggtggtgatatggtcaaattctttacgttgctcttctatcttggccttggcttccgccggggtctttactccccacagctgataaaaagtgttcatgttgaagggaagattgtataatttcccgtcaaagtaagccaaaggggagttggtgtatcggttgaattcgacaaagctgtttacatagtcccacacttctttattgtcggtatggaagatatgtgcaccatatttatgtacatggatgccctctatatcttcacagtagatattgcctccgcgatgattgcgcttgtcaattaccaggcaatgtttacctactcgttttgcctcgtgggcaaaaacggcgccgaacaaaccggcacctactatcaaataatcatatttttccataatcacttagtttcttcctgttgtctgcgcagccactcttctttggttcttttccagcggttatggctccagagccaatattggggatgcgcttttattgtttgttctaattctcgggtaaacaaatcggtcaattcaaaatcgggtacttgccggggggtatcgcacaatggtttgagccggcagtggtagtatcctcttttgacccgtgttacgtcagcataataaatcaaggcgtccacttgcttgcctattttctccgtaccgatgaaaaccggtgtttcttggtttagaaattcagtccagtgatgtatgctgttccacttgggtgcttggtccgaaataaatccgataattgccttttgctttgtccgtttcaattcaatgatgcggcgcaaagtcgttttcatggggatgcattcgcctccgaactggttgcgtaatcttagaaatagtttgtcgaaagcctgattgtacagtggatgatagatttgtccgcaggatatgtctttggaaatccaataaggcaaggatgcaatccattcccagttgcaataatgccctaaatagataaaacagaagtctttattctttttgttcatgttttccactatctcgtccagtccttcaaaagtcattcttctcatcagttgtttttttgaaatggagaataacttgagcgtttctactatatagtcgcaaaagaaagagtaaaattgtttctcgatttggacaatctcttttaaatctttctcggggaatgagttcgataaattattgcgtatgattttacgtctgtagcggatgcaataatagagcggataaaaaagaagatcggatatgaaatataagaatcgtaagggtagaagcgaaagcaaataccacaaaaagaaaacggaataatatatgagatttatttgtttcatttaactgatgactttgtttatgtgttctattaccatttcgggagttatgccttgcagacaggcataatcttttctataacagtgcttttctccggataaggaacaaggacggcagggcaggtctatctgtattatgtttgccgcagactgattccatcctgcaaagcctgcacagggatgcgttgccccccaaatggacacaaccgggatgttcactagtgatgcaaggtgcatattggcggcatccattaccagcatgacgtccatattgctcatgagggccaattccatatttatggttagtttgccggctgttgagatgacattggggaaatgttgggcccattcttccaatactttgatttctttttttccgcctccgaataagaagatttttgtatggtcgcgtgcagataaatgtttgaggatctgctcttgctttgacaacggatagattttgcctacatgtgttgcaaagggagcgattccaatccatgtttcttggttcttctcaccggttaacggcgccaggctggaaatattgcctttattctttccgaaaagggagaggaaacttaaccggatggggtaacctatctgattgagcgtatgggcacagcgctgaaaaaaggagtcttgctctgtatatattttatgtttccgccgtatcagtttttgcagttcccgcctgttctgcttgatgtgggctgcttttatgcctgccagacgaaaacgccagcaaagaaaacggctgcggaatgtgggctggaaagcggctacggcatcaaatttttcttcttttaaatcattgtacagccatcccagacccattaatccggcatgttctcctctgaaatctgctccacggaaaataacattgtccggcacattctcgaataagggggagaatgtgtctatgctcagcaccatgatttgatgctgggcatattgcgtagccaatgagtgaatgaccgggattgccattgccacattattgatggatgaaaagcagattacaagaatcttggacataacagctgttttattgaatgtacaaatctatgcaaagttttctaatcagccaattattattcggtaaaagtgtctacctttgttcccaagcaagtttttgaaagatgaaaataattgtagataataaaataccttatatacatgaagctgtcgaacagatagccgatgaagtggtgtatttgcccggcagtggttttaccgccggggatgtacgggatgctgacgcattggtgatccgtacccgtacccgttgtaaccgcggactgctggaaggaagcaaggtgaaattcattgctactgcaaccatcggctttgatcatattgatgtggactattgtgatgaggcgggaattgtatggaaaaattgtcccggttgtaatgccggcagtgtggagcagtacctgcattcggtattattattgttgaaacgccggaagggggtgagattggaagaaagctgtctgggtattgttggggtaggacatgtgggaagccgtatccaacgtatggcggaggcattggggatgcgggtcttgctgaatgatcctccacgtgcggaccggggggaaacaggatttgtggatttgtctgtgctggcacgggaatgtgatataataacctttcatactccgctgaacaggaatgggaaatataaaacgttccatctggcggatgcggatttctttgtcggtttgcaacggaaaccttttattgtgaatacttctcgtggagaagtaatggagacattggctttgcttgatgcgctgaagacaggccggatacgtgatgcggttattgatacgtgggaaaatgaaccggatattcacccggatttgttgcagaaagtttttttgggaacccctcatatagcagggtattcagctgacggaaagtcgaatgctacacggatggcattggaggagctttgtaacttcttccatatacaggctgattttaaaatagtaccgcccgctttgccgtatatggattattcttctgatccggaagaggcttttctacaggtgtatgatccgactcgtgacagtgatgcattgaaacggcatcccgaagaatttgaacatttgcgggggaattatccattgaggcgtgaaatttcttttttatcgtagggggacatttcaatgtacccctacggtggccagaacttttagtctgcttttgctgtttgcatctcttctgctacaatctgttcgcaatcttcaatgctgtatcccgatgcgggttcgctccaataccataaggcgggagtttgttgtaatgtatccataatcaattattttttagatgggttattcaatgttatagttgtttccgaatgttggttgccgcccagaatgccggttcctccctccacattgctgtaaacccgtagaggttcggctagtccaatgttacccaagcctccttctaacgtgcttccggcaattttttgtaaggacaacaggtataaaaagtaggattcggaaagggaatagatggaaatgattctttgttctgtttcgtctaactctgccgttgtctcttttatttgtaaagtataggtttgtccgttaatgctttggtcggtaaagagggctcctcctcttttttccaatccgttgaatgccatactttcgtccaatatggcatcctgttccttgaatacaggatctatataatctatttttgtttcgtagtaaccgtaatagcccgtttttatttgtgtgattttggccagataataattgttcttttccggaaattcatcaaacgtgacttcatagtatatttcaaaatagtcggaaattgttccttgataaactccgttacctttttttattgtatgactggcgttttttataggtactttctttggtatgatatcttctgccattactgtaccatattcgggggtggatgcaacaatttttatccggtctccttctgccgggattgtatttgaaaggaataaggtatccggctggtctgggttccggggattattcagtgttttccattgcatggtttctatgtattgattgttgatatagagctccacatgggcgtgagggagattgacataaggcttcttgtctggatagaaccaggtccgggtgatggaggccattaccactgtgtcgggggatactacactgtttattaccattttgggcgtagtgcgatattcgtccaaatctatttttcgataacaggaggtaaggaacactccgagaagtaatgtatatagcagatgtttcataatcatttaaaatttataagtgtaagaaactgatggtataatgggaactatgcccagggtatagaagcagtcgttattataccaccatcctttgcgtatgctgacgggtgccatgtaggaatagacattgtagatgctgatattccatattcccatccggttctttttctttggccggtaaatattgatgcccaagtcgagtctgtgataggcgggaagttggaaattattacgttccgtataatagtctaatccgcctgaatctatataaggaggaaccaggctgcctcccggaaacggatgttggggagaaacggcctggtagttttcgaaagaaaccgtgagccggttaccggttgcgtaggtccagcttccggtcaactccagtttgggcttgattttccaattggctattatattgaatttatgccggttgtcgaatttggcaggaaaacgcttgcctttatttatctcagtgaactgtctgtcattccagcttagagtataacctgcccatccggttatttttcctttttctttgtggacaataagttctacgccgtaagaacgtccttttccttgagtcagtttatcttcccagctggtggaaggagggagaaactggtagttgtctttatagtccatcagatgtttcatccatttataatatccttctatggagaaagagtagattttgttgccggtggtgtaataagctcctacagccagttggtcgctctgcatcggtttcagcttgcggctgaccggtatccatgtgtctgtgggcaggttgatgtagctttcattgacttgatgtacatattggctcatccgggtataagaggctttgaggctgagttgcggattgatcaggaaacgactggaaaaacggggctccagagaagtgtacgtttttccgtcaatggtgtatagtccgaggtgaaccccggcgttcaaacgtattcttttgttcattttccagtcttcttccatatatatgcctaattcatgtgcaggtagggcagtgtcgttgttttgtctggtctgggtggtcataccattggaaaaatacgatttttcgtctacgggatgaaaacggtggtaaatataatgagtgccgaaatgcaactgatgggaagcattggggcggaaatcgaaattggctcgtatgctgaggtcgtcaatgcggttctgggttgaactttcctgtgatacgtagttggcttctgttccttggtagtagtctcctttcaaggtggaagagtagtgggtaaaggcggcattcacattaccgaagagttggttgttgaatacgtatgaccagccggtaaatgccatgatgtttccccatcgcagtttgccggtgtttctgctttcatatccgttgtcaccttctcttttttctcctcccttcaaaaaatcgtttccccagtaaagaccggcatatccgcggctgcggtcattgaactggtggttgagtttaaagttcatgtcggtaaaagcgtatcgtgccactatttgggtttctcctttatttctggtagcgttccagatggcgatggttggggccgaaagcgcgtcaatccatgaacggcgtaatgcaaagttgaatgaggtccggtctttgaccaacggaccttccagattcaggctgcctgaggtcagtcccagcatggcgcttccgtgatattctttcatgttgccatcctttgtatggatatcgactacgctggacagtcttcctccgtaacgggcggggaaggcggacttaaagaattctacatcctttacggcttcggcgttgaaggaggaaaacagaccgcccacgtggttgatctggtataacggattcccttctatcatataaagattgtcgtctccattaccgccccgcacatacattcctgccaatccggctgtgcctgccgatacacccggcaaggtctgtagggtttttataatatcagcttctccgaataataccggggtttgttggatcaggtctttgttgagacgggtatgtcccatatcggatgtttggactaatggagaagaggtatattctccggtcactactacttcggctaattgctggtggctgttcagcagaaccggaagcagcgtgtcttgttccaattgtatgaatgaacggtggaaactgtcataacctacataggagatgttcaggtatacatcgtttccggcttccagggtcaggctgaaaaagccgtcggcgttgctggttgttccttgatggcttttagcatcatagatggaggcgcctataagggactctgaggaggatttgtctcgtatgaagccgctgattacaatgtttttctgttttttcttgaggatgatgtatttgcctgattgtatatattctacgggcagtttttgaaacagaatgcgcaaacagtgggataacggctgggcggttattgttatatctatcggtaacagatgttttgttaaagaggattcatacgaaaaggttacacctgtctgccgggtgatttctgctaaaactttacggatgggggtttgtttcatatctaatgttacgaggggttcgtcatgttctgttccttttgcctcaatgcaaatgtgcatgaggcaaaggagcagaagaaaagaaaatttagaatggaattgcatcattgggttatgtctagttttgtatctagtgtttggtttatgatttcaattatgtcttctatcggagtattgtcaaaggtcgtggtcaaatagtactctttttgtggaattccgccgatatggaccttatagacttcttctagttcttttactacctttttcaagggggcttcattataaacaaacacgtgagtcttccatgcaaaagtgttgggatcactttgcttttctatttgcatttgtcctttttggttaatgaaagcatacatgccttttgtcaggatagcttctttttgttctttgttataaaaacggacttttccaaactctacggttgccgaagtttgatttgcatttgccgttacttggaattgcgtacctagtacttgtatgtttgccagttcggtctgtaccctgaagggacattgttcttgatgtgtgactgaaaaatatgcttttccgtttaaagtgacgttcctgttttttttgccgtatgccaagcggtcatactgtaaggccgaattctctgccagcgtaatatggctgttatccggaagcgtgacttctttgacagcgtgtgcggatgaggcaatgacaatccaatcttgcctgtcgtatatccaccaccaactgaatccggctatcaggaaagtgacagcggcgatagttattagtctatataataagatagaattatttttctgtttgccgatacctagtttttgccaggcttgtgtcgtgtccagcctgttttcccgatagaaccgggctacaaaacgaatatctttttcttctttctccatacgatcttttttctttttattgttaagacagggaaaagacaaaatccccctattcgcttgccgatttttttatccgaagaaaaaagtatatattttaatggctgtttctcgtaatgttttcagtgccttactgatttgatgttcgactgtctttatagaaatacccagctcggtggcaatttcctgataagtaaggccgtcacgtttggaaagcagaaagatctttttccgttcggtaggaaggtggtcgatagctgtccataaacgagcatcacgttctgaccggatgatgcgttcttcttctgttaaatcttccaagtctgtcagttcggttgtttcacagtgtgtttgccggttggttaccagtgtgagtgagcggttacgtacagtttggtacatataagctttcagattttgaatagatgtgcctccgacaagcttttcccatacatcagagaaggcttgttggacgatgtcttctgcgtcatccagattttcagtatagcgcagggcatacatattcagcggacggtaaagacagcgaaattggtattcaaattcctttgccgatagtttcatattacgtttttatgtaaacagaggcaaacttacggcttttttttcggtagtcaagcgatacgaggtgaaaagtctttaatttcatagtcagtgtaagggatatcgatcttgaacaaaaaacatttttcccttttatattattttattctgtcaccatatcttgttgtaaatcaatataatgccgtgcgaatacttttcgaattccactgaaacggtttgtagtcctgcttctgcttgcttttcatacggcagaagcaggttttcttcatgcgtgtgtcttttctgcagctgttttccggcaagagcataggcggatttgtgtttctatccggcggcatccgaaatatcaccttggtgaagcgcttctttcacctgggtgaagcaagtagttcaccttagtgaaatggcattttcactaaggtggaataatggatggaatggggtggctgtatgataacagcctttagttaatgtgattagcgttcactgtaccggcttcggaatttagtatctgcataccgattaaaagggatatgggatctttctcccgagaagtctccagaaaaggcacattaaaagcatggctttatgtcaaagctgtggcaggctatccgccttaacagagccttaaagggcataaagcggttatggaatagaataccagacgggctgatagctggtacaagcccccccccttatgcacgggtggcatcgttggtacgctcgttgcagaatggttttgaataatttgccaatgggtcaatgtgctaatatgccaattggctgcgctctattccgcatgataattggcatattagcacatttgtgaattaattcattattaatcagttatacgataactcttatatcgaagttacgtttttgatagttaaaaagcgaagaaaggacgaacgttatatccggaatcggaaagcttgctgtaagttttgacagctactctttcccaaaaaacgccatcgagcatctcaaagtgccaaataagaatccaggcatctgtcgctacattggattcggtggtgcatctgaaaatgtttctgttgccgacaatttctcccaacgtacttccggctttggctaattgtttacttattttttctcttgtttcggttccatatatcagagtttctaaactgtatgcagactgtctttcaaatgttctcggagattttccccctatatttatgagcagatcgaaccattgacctatactcggcatgaaccacggactgcatatattttcgtcattcggtattttatttttcgtccgataatcttttatcttaaaaaaagctttgtatgtattcttaagttgagtatcatcatgagcattcaatatcacttgcgtttcagaatagccattcatgttattctccagtaaatcgtttgttgtcatattagggatatcgggttcatctaccttgtctccccattttgccactcctatgttttccaatcccatcacataggcatgtgtccatcctttcttattgcattccggatcggtcattttttccggatcgcaagtaattaccatccctgcagcatctttgtagtcggggattgtgttgccctcaaagactccatctccggggaaaatctctattttattgtttgccgtgaaaaaaacaaaatcaccgggagtgagttcccgtgttttctctatggcagataacgggcttttcacctctaaggtgtagcagcatcctgcagtgaacgctgtggagggggtgaatgagtaggtcagtgttttgtctgtgcttgtgccggaagttgatacatcggttattgaatagctcccggctatggctgtcgctgtcttggtggggaggacaatggcacggaaactgccgtcgtccattttgcagggagtgacattgttcagtttcacgtttttggctgtgacatcgacagtcaggtctgataatgttccattgttgcgataggtgaagactgcatccgcgggtggaacatatttgaaatgcgcttgtggcttcaatatcagtaatgcgaaccgatgctcgaattcaaaagtcagggtttcctcgccgacctttcctacggcggtcatcaggtcacaggcggtatattcatcggaaccggattgatccgctccgggtttcagcttttcgttgtccactagtgaggtcatgatttcgtccgtggttttaccggtatctatcgtgacaccttccttgtagggatagtatgcgatatagtccataccttcattccaatagagcgaagtgccggcaggaggaatccactcacctgtgtcaatgcctgttttcttataagtcagtttgatgttgttgacggcatctgctatcgcattatttttaacggcgaaaatgccgatggcgtctcctgcactaaactgcgtttcggctccgtcttccaagggagtgcgtgcaaagggggatccggatatggagagatgattgaaattgcttgccgtggctttcacgatgaggggcgtctggttagttcttttgccatcctctgggtcgttttcgtgcgtacatgcgccacctatgacaaggaggccgcataataccgtgacgataaaagagtatttcatatgtatatatagtttttctttcagattcaattaattgttccgtccacagatccctgaccgccattcccccatgtgggatgactttctgttgtggcagtgactacttttttgtctatgccgatggtgtagctcacgaaagcccccgacagccatttgtcgagtgagggtaaaggctgattggtcaacgtgacggtttgcgttcctttgattcctatgtatgtataggtgatgttgaatgtgtttcctatatttgtggggagcaggaagtaggtacatagcatagcttcctccggagtacttttatccggtacggacagggattttgtggtagcggtaaatgtttcggcagtaaccgttgacggataagtccaaccgaaacccttgtcgtcatcgtttgccggcacatgaaaagccagtgtcccgctttttgctcccgtaatggagaaagctgtgattacctttcccgttatgtcgtcattacttttcacattgaaaaccaccttggtaagtgcgtgttgcattttgaaatccacactgcccccgttttggtttataatgggggtggcggcaagcaggtccacctggtcggcttctgctgtgggtgtagtgtaagtgaatgaaggataacccttttggattgcgttgctcggcgtaacgcccgtggcattgtggggtgcataggcaaagaaactgattttatccgaatcattgtttggccaatacttcaggggagtgtattgccatgtgccgtttttcttttccaccagctgattgtacatgaagttgggggtggaaactgttgcgtcaaagttgccgtggggtaagactggcaaatactccgatggaggtaagattgtcgttgtttatatcgccggcccttgtggcggtcgttacattgttggagaagcctatgggaacatttacggtttctgtgcctgtatccttttcgcaagacgtgagtgtccatgccgaaaggattataaaaaagagtatctttcttaatcttctcattgttttatttatgtgtcaatttcaatttgtcggttggtgtgcccggagaaggacattcaaccattcaaccttatccgggcttatgcaatatttaatttacatcaaaattaccggtaacgctaccccagtcgttcactttagccgcacttacttttatttccttcagagaaatagtgaaagtgtatgtgtaaaatttacctcttttcatgtgattggcaggtaatgaaactgctgtttccaaatggcttactgcgtatttgggattgtcatcgctgctatctgccgttttggatacaatatcgtaatggaagccaatctgaatatcgccacttgtacatccgccggcaccgtctgccgcaacttcttcagcattatcgttgattggaattaagtacaggtattgatcttttttgaataaatctaccggagtttctttgttcccttttttcagaatgatgcctttaatggatttttccgtaccatcggcccatatttccgtgatctccttctcttccattttcatgatcttttcgatactgtaatcgccttcagcgattgtagcgttttcatagtcccaatgaaggtctttccatgttgccttcgtataaaatttagaattttcgttggttaatttattagtctgatcaaaagacaggctccctcccttttggcctattatccacatgtgagtgatatagatgaagctgcttgttccgtccaatccgctatagtcagcgcctaatttggctttaaaatttattttagatttttatcggtttgacttaaccgattgaagaataaacttttagcgaattatttgagaaatagaggtaacgatttagcaaccgtgcgaatttcagcgttttgcgttgctatgctgtcaaataactcttcgagtcacaaaggtaataatatttttggaaaagactgagaaaattctacaaatatattccacgaaaattgatgtttccaatataactaaataagtgtcgaaatgttacaatcaatagtctatcaaataatcgagttttttgttagcgttttctgtataaaaagctaatgcctcaaaatatcatcactgaatattttgtccatctgataaaaatacatacttttgcaaatcatctgatgatatgatgaataagagtagaaataatagtatgattatacagaagaagtctttggcagatatggtagccgagcagttgagacaacagattacggaaggagtttatacaatcggggataaacttccgaccgaaccggagttgatgaaaactttcaaagtcggaaggtcgagtatccgtgaagcggtaaaattattggtaaatatgggtgttgtccaagtccgacaaggggcaggaacatttgtcgccgaagcatccgatacgaacggaggcagtataaatatgaatatcgccgaccggacggaactcgatgaggtgaggaaaatattggatattgcaatcgtggagaaagccgtggcaagaagaacagaaaaagatatagagcgaatgcagtcctcccttgaagcaagaaaggcaaatgcgaaagacggtttgttgaaagaatgtatcgaagccgacatgaatttccatattgcaattgccgatgctacccacaatcgaatattggcagacatttaccgttctgcttccctgcatttgctttcggagttcaatcgtatttacgatggtacggattgcttcataaattcacaatcttctcacgagaagttgttgagatacatcattgcaggcgatttgaagaacgcccggaagacggcaacacggattgtagaagagccatagaacgagaaacaactaaaaatatgacaatcaaatgataaagaatacagaaaacaacaacggaaaagtggtcgttctttttgaagtaacgccaacggcagagggtaaagtacgctatctcgaacttgccgcccaattaaaactattgctttcagatgcaaaaggttttattcgttccgaacggttcagtagtctgaatgaagaaggtaaactgttgtctctgaatgtatgggagaacgaagaagccgttgaaaagtggcgtaatgaacttcaccaccgtacgagccaatcggaaggacgtgaaaggctttttgaaaattaccgaatcaccgtcgcttccgtcataagggaatatgacgattccaatcggaatgaggctccagcggattctaatgaatatttccacaacaagcaagctgatgaccgaccgtaatatttttatctatggcgagacagaggtgtcctatttgaaaaagcgggataaaaaacttgccgaggtaatggaaaaggttgggccgatagagcgggaagttattcccgacttgtttgccgctttggtcaattcgattatagggcaacagatttcgacaaaggctcacaagacaatctggaaaaagatggtaaccgtcctcggcgagataacaccgcaggtcatcgacagtttaagcgacgaagagttacagcaattcggcattacattcaaaaaagtggcttacatcaaatcggcagcacaaaaagtcttatcgggtgaacttaacatcgaatcccttagggcaatgtcggacgaagaggtctgtgccaaacttgtagaactcgacggtataggaatctggacagccgaaatgcttatgctgttttccatgcagcgtcgcaacatattgagtttcggcgacctcgctcttgtgcggggtatgcgtatggtctatcaccataaagtaataaacaggcaactgttcgaccgatataagaaacggttttctccttatgcttccgtcgcaggtctttacttttgggctgtggcaggaggcgcaatagaaggaatgaaagattatgcaccgaccaacaacaagtatgatgaaaacagaagaaaagataaaagcggtaagaaatagagacgcaagctatcgtgataaatttttcgttgccgtcagaacaacgaaaattgtttgtacaccggattgtccggcgaagcctctggaaaagaacatcgtgttttatgatacgcttgaggaagcattacaagccggatatagaccatgtaaaatatgtatgaaagaatttcccaacaataaaaggaacaatatggaaactataaagattacacggtatcaatcgcccgtgggtgatatgcttgtcggttcttacggcgacaagctgtgtatttgcgattgggcggtggagaaacgccgcagtacgatagaccgccgcatacagcgacatctgagtgcgaagtacgaagaaggaacttccgacgtcatcaaacggaccattggggaactcgaagaatattttgccggacaccgtaagatattcgacatccccgttgtctttaccggttcggaatttcaatgtactgtatgggaagaactgatgaaaataccctatggaaggaccatatcttatggcgaacttgcccgccgcatccataacccgaaggctgtacgtgcagttgcatcggccaatgccaccaatcctatctctatcttggtaccctgccaccgggtaatcggcagcaatcataaactcacgggatacggaggcggcctcgatgccaaaaaaggattattggagttggaatgttctaatacagaaggaatagagttatggtagctttaatttaatatgcaaaagtacgaaaagtgccattcataagggaaattatgaacagcactttttttattatcttccagcaagataaaacggttatagcttcattcccctgccttttctttgcggctgtatggggcggtgtatgttctgccttagcttgtcgaattgctccttgaaccattcggcaatgggctttcggtcgatggcaagaactaatttcgtcccgtccgtggggtctttcatcacttgaacccctgccttttcggtcttgaatttccgtccgtgttcctccgagtagagttcccctgcatactccaacggctttcccttgacgagtgtttccgtctgcccgtcgctgaacccgacaaggcggcagaggttttcgatacggagcatttcacggaaatagggaaaccatgccgccgcccttgcgattatcgttttcagaaacgatatttcctgcttgtgtttcgcttccttgtctgctatctccctgcggtgcttccgctctacttccgccatttgtcggctgtggtcggtctgcatggtctgtattctatcttgcagggcttcgatggcttccccgtgcgtggctacctccctacgcagggcggtgttctccctctccagcgtcttgaccttgttactgccgaaaagagaaccgacactctcggcgatgttggcggctgcggtggttgccgcccctttcagcttctcggtctgtatctcttttttcgcccgtttgagttcctcctgcgccgtttctttctgacgctgcaaatccactacctccgctttgaggctgtcggcgagtttcttcgtttcattgtaatactgctgcgtggacttgtgccgtgcctttgaaccgtctatgcccctttgcagcccgtatttcgccatcgccacggcataggtgtcttgataggatttcagccttagccgtgtcataatatcatcggcgcatagccttacggtgtcggtcggcttcttgcggtatcgcttcttcgtctgctcctcccgtttcctgcgcttgcgctctcccttgacgatgggaacgagcgtgacgtgtatgtggggcgtttcctcgtcccgatgcaggtgcgccg

SEQ ID NO: 14492 - DNA, 3561 bp, Unknown
  gut microbiota DNA sequence
atcacaccgagaaacaaattcttccaattgccggaactggcggaacggatgcgcgaaaagctgaaagcgatgcaaagccgggaaaacaaggaagtgccgttcgagggcgggacacttgtatggaactatggggaagaccgccttcagatcctgtttgacaggattcccgaagacagcagacgaaaggaactgaaatcctccggattccgctggtcacccaaaaacaaggcatggcaacggcagcttacctccaatgccctcggtgccgcaaaaagattgttggaccttcaaaacatctgagccatgaaaaacgacaatttgagattcatcattgattcacgttgctttgacggaagttgcgtgaccgtcatgtctgatgggatacatagtgattatggtcacgaaacactggaagaattgagggaaagggaaaataaccccagcctcattgccgtgcccgggaatgccatctgcaaaaaaatgcagatccacctgcagtctctctgcgccccgttctgtgaaattacggaagaggactattttgactatatggacacccagccacccatccggcacacccggaatttctttttcatgagcgagccgtatcatgccggcattcaccggttctgcttccggacagacggacggtattttacggggctgcgttccgtgaacacaccaagaaaggatttggaacagcaaatggacagacattaccggaaggtcacattcaaaggcggcatcctcaaagaaaaaccaatgggaatatttgaccatacacggcatagtttcacagttatagtcccatatctgtttcttgacaaaaatggagagaagaaattcatctgcaacctggtgaaaggtacggacgaatcctccggcaaggatgcaagacaggaaacagccagggttctccaaagcttgcgccgccatcatttcctctacttctccggctatgagggaaacgacgatatgggcagattcctggaaagagtggtgcaaaacagacataccctgtcagcaaacggggattttctgcaatatcccaccaaccgagagtctgtgtctttcgccggaacggtcaaagaaacaggggaaaagttcttttaccgcatctacgacctggaactgttccattacctgctgtacaagctgcggagtatcagaatggaaaagaaggaagtgcaggcttgaatcagtatgcaggatgggttcccggcagggtttccatcctgcacatgtatcagaaatccaacaaaaaaaacgcaatatgaaccatacagacttttacgcccggataagggctatcaaagaaatggaatacagggaattgtatgcagccatagaactgcatggagcttcctatgaatggaacagcaatgatggggaatgccccgtcattgctgtcaatacaggcagcgtacaactggctccggctgatgtgctgatttgcagggttaccattgagaacggcaacttgcgcctctatggtgtggagaatgaatacgggaatgaggtaaacttccggccggatgaagcctttgccggacatctgtcatatatcatagattgtttgccgcccgtcaacggagtggatgatgtgacaacattaaagacagaggaggaagcggtatgaagaaggaaaaacaatcctggacggactatgttcctcattcggtcagcctctattacgtggactaccgggagaatttggacagccatgatgatttgcaggagcagtgcatccgtcggaacagtctcagtccgttggaagaacaaatcctggagtggtatgccgatcaggaacatggcaacctgcaagggtatctctcggagatacggaatgagatggaagcggacgggaaatccgccgaatatatccgacatgaggagaagataaaagacctgctttacgaacggaacaataccgatccggcagaagaactgatagacaattccgctgtaaccaatatgttctactcccttggagtcgaaatcgagggctatgtgtatgggggctgtgggcgcggagaatccgaaacggtctctcttcataaaatcagacgggcgcttcaactgaaggaagggctgtttaccgatgaactccatgaacttctgttcaatgctccgtacggtggcgaactccgcatctatttcaatgccatattctccagactgattacgggagatacttcacatgatttcaagcgcatccgattctatggaggtgtcattgttgctattgtagacagccggaatggtgcggggtatcatgtaagtcttcagactgacatcacccttccgttttacagggacaatctttttgtggattctcaggtacattattcctatgcgaatgaaatttgcgggttgttgaacagctggtgtgattccacccgttgggaaaccggaatgatgtctctggaagtcactttgcagaagagtcacataaatgaatatcagaagcaggaagctctttatgaaaaaaggtttcgggaaggcggatgtacttttggagacatgaaccataaacgccacagagatacctattatataaacagcttcccatgcggtaccaaatgtccgcattgcggcacgttttggattgactgaaaacagacgagtcttttacacatcttgaaaatgaataaaactatggataatcaaagaacaaagatgctgggtgagaacctgacgcactacagaaatcttcaggagaacggctctgtaaacctgatcgaatttcacacaaccgacaaccggaaattcggcatcggaaatccggatgccatcaagctgttgctctcggcagccgttaccgaactggaacgccagctccatatagcgcagtccggaggtttaccggaacggttggaacaaagccgggagtataaggcggcaaaggcactggaacaggcactgaatgatacgggattcagtcccgaacgttttgcagagacactcccgtttttccataagaccttggaacagacatttttcaaaacaataaaggtatgtatcatcgccatggcaaaacgtgagtcgtgccggattgacagccgaaatcaagcgtcttacgaaatgtgccggatgctcgcgcccatgctggaagataccgacttaccctttatttgacgacatggaattcaagtatgaccgaaaagcggactccagtgctgaaaagccggagttcgctttttcattgtttaacagataaaacaccaaagttatgaaaatcctgaatgaagaacatttcgagaacgtaaagcgctatgccgaatccattggtgacacctcacttcaaaagtgcttggaacggttgaagagttgggaagggaatcctgactatcccagtgagatttcactctactatgaccatgccccatactcgttcggctttacccagcattatgctgatggaagaataggtatcataggaggtctgctctatcacggaataccggacaaatcatttgccgtaacattgcagccgttccacggatggcagatacatacctgaaaaacatgaaacttgacaatgaccgaaaagcagacttc

SEQ ID NO: 14493 - DNA, 31758 bp, Unknown
  gut microbiota DNA sequence
ctatggtcagtcctgttgtattttttgtggcgctttgtttttgtctggtgcttaatttgctttcggcatacattcctgcctggcgtgttgcccatactccgattgtcgattcgttaaatcaaaaactctaaggctatgctgattcatttattaattattataaagaataatcttcgtgccaatctgttgctgatggctggaatgttcgtcattgctacttcactgtggtatgctgtggattatgtgtatgctgtggtagtgaaccaacagaaatcattagggtttgattgggagcatgtatattatgtacaagcggccgtcttacccaatgaaagcgtggagtgtgacacagcaagtcggtctgatgatgaagtgacagctgaatatttggaattttataatcggctgcaacatcatccggcagtagaaagtgcatgttatactttgatgcatttccattatatatggaaaaacggtagtggaaccatgtcttatgatacattgaagaccagtgcgatgtatcgggaagtcactccttcttattttaccgtgtttcgtgtcagaggggctgatgaatgttcgcctgaagagttgtcccggcgggcatcacataccaatgattttgtggtgacggaaaatacagcttgtcggctgttgaatccggacataaataatatgactgtaaaaggagtggagctagccggtcggtttattcatagtggggtttccatgcgcaaggatgaaccagattcggtgcgtgtggccgccgtatgcgagaatcagaaatataatgaatattccaattggagtaaagccgtttatcgcattgtacagttgggacagggagattttaagataagctatggcagtattccttatcatgatatatttattcgtgtgaaggcagatgccgaccgtcctggctttgtggaatcattccggaaagagatgaagaaacagctgcgtgtgggtaatctgtatctggcggatatacgtcctatgagttattaccggaatgaacatctggctgattatcgtagcgatctttatacttatttggccattgctggattctttttagctaatgcatttttggccatattgggtactttctggttccgtacgcagcagcgtcgtgaagaactggccgtccgtctggttgctggggctacgccgcacagtcttcagactcttttaatgggagaaggctttctactgataaccatcgcttatattcctgctttggttgtagcttataatttaggtatttctgatttagtagagacatggcctgtagaatggagtttcacacgtttcctgataggagggctcgttacttttctgttactttgggctattgccgctatcagcatttggtttccggcacggcaggccatgagtatccagccagctgaggcattgcatggtgagtaaatcagatattcattttattaaaagatggaattaatgaaaaacggagatacatttgggatctatttggaaatatagaacattgtatctctgctttaatttatatatcaggaaatgaaatcgtgtgcgaaaatgaagttggtgttcattttcggacagtgtataataaagataatatgtttatattcagttttttgtgtctttggcatgactttggctagtatagatataaagtgtataagaaaataataaaatagaattcgaaaatgataaaacagtattacaagcaagctttggcacaactacgccaacatccgcttatcagtattatcggtattgtggggactgcgctgagtattttccttattatgttggtagtgatgatgcaacaagtaaaggtcgctcctttttctcccgagtccaatcgtaaccgttttttacatgtacattatatgagtatcagtcataaagattggggaaatgggacaagtaatggtccgatgagtgtacagactgcacgtgaagtatacaaatcgttgaagactcctgaggctgttactgtttattgttgcatgacggtgtccactcctgtttccctacctggtgcgcctgcgataggagctgatgtgcgtgagacagatgatacattttttcatgtgttcgattttcagtttacagatggaaagccgtatgatgaagctacttttacagctgggcgccctgtagctgttataacagagagcatatcacgtgccttgtttggttctattcagtctgtaggtaaagaatttctgctgagtcatgctccttatcgtgtagtaggagtagtgaaagatgtttcaactcttgccgatatggcttacgggcaagtatggattcctttcacttcgaccaacctgtctaatgacacatggagtgataaccacatgggaatgatgagtgtaactctgttggcgcatgaccgtgaggattttgatgagattcgtgctgaggctaagcgccgtatgaatgagtataattcaatacttgctgatcaagggtatacattgatagatcgcaaccgtccttatgaccaggaaacccaatcgatttcttttgctgccaatttggaaccggatttaaaagcggctcgtcgtgagcgtgtcattatctttattattctattattggttcctgccataaatttgagcagcatgacgcaaagccgtttgcgtcagcgtgtagccgagataggtgtgcgtcgtgcatttggaagtacccgcatagagatggtggggcagattgtgatggaaaatctcgtaatcactttgttggcaggggctatcggattgctcattagtatattattcgcttattggggcactgatatattgtttgcacaaccttatagtgttactctgaatgcgcctactgttgattccagaattttattgcaaccatctactttcctctatgcattgttgttctgttttgtattgaatttgcttagtagcggtattcccgcatggcgggcatcgcgtactaacatagtcaatgctttgggaggaaagatacattaatagatgaaaaattaagaatttaaaagaagagttagaatgaataagaaactattgacacaaataaagaatgagtggcgttccaatctttggcttgttaccgaattgttgttggtgagcgttgttatgtggtatattgtcgattatatgtatgttaaggcagctgtttactatgagccacgtggttttgatatctcccattgttatttgatacaaatgggacgccttactgataaaagtcctgattttattcctaatcagacaaaagagcagcagcgggaagatgtgaaaggacttgccgagcgtcttaaatatcgtccggatatagaggcggttggttttggtcagaattcttatccttataatgggagtaacagcggtacggaggttagatatgacacacttcagtcgccgggatggactattcgacgtttagtaagtcctgattttgtccgggttttccagtatcatggtactcgtggggaaactcctgaacaattggcggagttgcttagccatcccaagaattttttggcttccgataatttatacaagaaacgttacggaagagatttgactccattggtaggaaaacagttttatttgtttggagatacgacggaaacctatacgctgggagcatcgttggaggtagtccggtattcagattatgagcaggcatggaacagctacagtatggtgaaacttttgccggagaattggtatgatgtgggacttgaattgtgtgtacgggtaaaagaagatcaggataaagattttataacccgtttgaaagctgatagtgagaagctatatcgggtggggaatgtgtttatagccgaagtgcgttcgtttgatgatatccgtcgtaactatcaacagtcacaaaccaattccatgcgcagctatattttgggtatggtttttttattgttgaatatttttttaggattgctgggcacgttctggtttcgtactcagcaacgacgtggtgagattgctttgatgaaatctttgggaggaacagaccacagtgtctttgtacgccagttggtggaaggattactgctattggttatagccactattccggctgtttttatcaattggaatctggcaaatagtgaattgaatgcttggatgaatggtactactattgaaggtggacgcttcataataacagttcttatctcctttattttgattgcattgatgattgtagtaggcatttggattcctgcacgtaaggctatgaaagttcagccggcggaagcattgcataatgagtaatttctttttttgttaaaagattttagagcatagcacaaacatgataaaactatatttcaaacaggcttttttccaactccgtgagaataggctcatcagcttggtctctattataggaacggcattggctatttgtatgatcatggtcatcgttttggtgttggaagtgcgcattacggattgtgtgcctgaggtgaaccgttcacgttctctttatatgaaagcgatgtctattcatcagaaaggagatactagtgataattcatcaaacggctgtatgtcacttacggtggctaaagagtgttttaaggcgcttactgttcctgaaacggtaactatagtgtctacaggaggcaggatgcgtatttctgtacctgcgggaaaaacgatgacagtggataatcttgaaactgacgatactttttggaaagtgttctcttttgattttattgccggaaagccgtttacggctgccgatagtgaaagcggacttcctaaggttgtaattagcgcttctgtggcccggaatttatttggtacggtagaagcagtggggcgtacagtccaacttaacttggccgattatacggtagtgggtgttgtgaaagatgtatccaaactggctgtttcttcgtatgcgcagatttggatacctttcaattcaactgaaatagccaggaagtgttggtatgacaatgcgatgggaacttttcgtgtggtcattctggcacattcggagaaagattttcctgctatcagagaagaggtggaacgtctgcgtcagaaatttaatgacggattgcaggattctgaaatcttttatcgtggacaacccgatgatcgtttctcttttatctttcgtcactggggaagagagttacaggcgaaggaagcttatttgcactacctgttggtgattgttattttattgctggtaccggctataaatttgagtagcatgactttgtcccgtatgcggaagcgcatgtcggaaataggagtgaggaaggcatttggtgctactgccaatgtcttgttgaggcaagtgttttatgaaaacttattattgacgctcatagccggagcagtaggaatgcttttcagttatgcatgtacttttttattgaatgatttcttattttccaatagcgagaaccgtgcccaaataggagaaaccagtctttcggcagatatgttgttcagtccctggatattcttggccgcattcattttctgcctgctcttgaatttgctgtcagcgtgcattcctgcctggagggcatcgcgcatgaatattacggacgctttaaaccaacgttagatcatgaacaggaatttattgaaacagatatggaacgagcgccgcagcaatgcgtttctgtggatggaactttttgtggtgtttgtcatattatggtatattgtggatgtggtatatgtcacattgagcatctataatttgccgatgggctttgatatagaaaatacgtatgttcttcgttttgagcggatgacttcgaaggcggctgcttatcagcctggccgtactatgaaagaagatgttgccgatttgcatgaaattgtaaacaggcttgcgcatcgtccggatgtggaagcagtcagcctctcgcaaaactgtataccttataatgacggtgcaaacagtttttcattttatctggatacagtcccggtacgtagtttgaaacgatggataactccggagtattttaatgtattccgttatcgcaatatagacggttcggatagtgaaagccttgctgaggcactgacaccgtccggcatggtcttatctgtgaatattgccgatgtttatcaggatgcaccttggcatggtaaggaacttttagggcgtagggtgcctgtttggcggaatgagccggaggcggagcacctttctatagctgctcttaccgagccggtccgttatgatcattttacagctccggatgattacggctcccgttatgctgctgtgtacctgacagatgaggtaatggaatccttgggcgaaacggtttatatagaagtttgcctacgtgttcgtgagggacagaatgatggattcatagaccgtttgatagtggatgccgaccgtcaatatcaggtgggcaatctatatcttttggatataactcctttgagtgatgtacgcactgcttatgaaacggattcggtgaatgagttgaatacgcaattttgtatcatatttttcttattgctgaatatctttctaggcattatcggaactttctggttccggacacagcatcggcgtgtcgaaattgcgttgcgtatagctttaggttctacccgttggggaatctgcggtcgtctgatgggggaaggagtctttttattgttggtatctgctattcctgcattggtcgtagcgtggaatttgggatatgccgaactggtggaagttacacgtatgccttttacggaaggtcgttttgcgattacaattctgggcactttcattctgattgctggaatgattgtcattggaataggataccctgcccgtcgtgccatgagtatcgaaccggctgaggcattacatgaagaataaataaaatgaagagataaaacgaatgaaacagctattattacaagcatttaatctgatacggcagaatcctttttatgctacaatcagtattataggaacagctgtcactatcgcttttgttatggtggtagtgatgatttatgacttccgtacaatggatatggctccggaaagtgatcggagcgatatgatgtatacaggttcgggaatgacctatcgtaagcaggatcataccaaccagaacagcggtatgggacgcaaggcttttgaagcattgttttcagagctccctggtgtaaaagaggttacttggtatcgtggcgtttccaagaccccttgtaacttgtccgcttcgaatgagatattcaactattttgtgcggcctgtggctgataactggtttaagttctttgattatgaatttatagcgggacgtcctttcacacaagaggagtatgatgcccgtcggtgtgtcagtgtggtaaccgagcgtatggccttgcagcttttcggcacgacggatgtggtaggaaaagaatatcaaagtaatttttttccgactaaagtggtaggcgtggtgaaagatgtcaatgctattttccagacagcatacgctgatgcttttgttcctttctcattggaaaatgaagactattatgctacttggacagggggcttgggaggaatccgtctgggattgctcaaactgctgccggacactcgtcctgcagaggtacggactgaagtacagcatcggcaggatcgtttgaatagttcaacggcagaatatgctttcgagatgaacgaactctatactcatacggaatataccttttttcgtggaaaagatattagtgcaccgttggtttacagtatgttattgatggtcttgctgattgttcctgctattaatatctcaggtatgaccaatgcccgaatgcaggagcgtgtgacagagattgcagttcgcaaggcgtatggtgcatcacgtatttccattatggtgaggttgtttttagagaatctgtttacggtctttttgggtggaattttaggatatctgttttcgtgtgtgttggtttggctgggacgtgtatggttgtttggtagcggcgaggtagaattatcagatatcagtctggatggaggtttgttgttgcatcctgctttatttgtgttggttttcggcgtatgtgttgtttttaatttattgtcggtattgattccggtatggatggtcacacatcgtaatattgcgactaccatcaaaggagaataggaggaaagaaaaatgataaagagtttattcagacaaatgtggaaccagaggcacgccaatgtatgggtgtgggttgaattgattgttgttcttatcttgctatggtacagcatcgatctggtttataattatgaggctgctgcccgtcagactaaaggatatgacacggagaatgtttttgatattcaattgaatattaagccggctttgcaaaatgattctgtattaatgagtcattctgctgaatatttggaacaaatctatcatttaatccaacaatatcaaggggtggaggaagcttgtttttattatgggacaataccttatacgggaaataatatgtatgagggatatgctccgcattcggattcgacccatgtggtaggctgtttcatccgttatgtcagccctacttatttcaaggtatttcgtttgcagccattatcaggctcatttgaggcggagcgttgggacaagaatgaataccccatgccggtgttgatgagtgaaacgttaagtgattccttgtttagcggacgcaatggagtaggggagacttgtttcaatccttattttctgaatagtgtgcaaccggaaactaattataaggtaatggcggtacttcctgctcataagaccgatgagtacgagcgttacgaaccttttatttatcttcccagtccgccgctgactcattggcatcacattgcggtgcgtgtggcttccaattccatactgggatttaccgaacattttatgcaggatatgcaagggaaattatctatcggcccttattacttatacgatataaattcgtatggcgatatgaaggaagctttcgatatagagcaaggaacggtgaattatctgaatactacctatgccgttatccttttctttgttttcaatatatttttagggatgctgggtactttctggtttcggactcgtaaaaaccgaagtgagatagctttgcgtatggcactaggttgcagtaggatgaatgtatttggttattatgtacttgagggcatccttctcttggtttcggctgccattcccgctgtttttgtttgtgcgaatatgcagatggcggatcttactgtgcatacattaatggaacctgcttggggacgttttttgctttgttttgtgtcggccatgctgttgttggggataataattttgctcggcatttatttccccgcccggaaagcgatggggattgagccggcagacgcgttgcataatgaataatgttatttcattgtcacatgatcagcagtgttcgtatatgaatggagtgtccgatttcggacactccatttttgtcgtaaggtgttataaaacagtgaaatagttttttggcataccatttgccttacctttgataaaaagaataataacgcaatgaaaaaacaagtaatatctctatttttagcctttggcatatcgttggttgccggagcgcagccacaagaaaagcgacgtgccatcactttggaggaagccattactattgcccgtgtgcaaagtgtagatgcggccgtagctttaaacgagctgaaaaccgcttattgggaatatcgtactttccgtgcggatttgcttccggaaatgaattttgaagccactattcccagctataataagaagtataattcttatcagcaggataacggtgcttatacatttgtacgtaataattatatggaaatgaatggtgaagtttctatcgatcagaatatttggttgaccggtggtaaactctcattgaatacctctcttgatttcttgaaacaactggatggagataaatcaaaacgatatatgtctgttcctgtggcattgactttggaacaacctattttcggagtgaatacaattaaatggaaccgccgcatcgaaccggtgagatacgctgaagctaaagccgcatttcttactgcaaccgaagaggtaaccatgactactatcaactattttttcaatttgttgttggctaaggaaaatgtaggcatcgcccgacagaatctgaagaatgcagataaactgtatgaagtggctaaggcaaagcgtagtatggggcagatcagtgaaaatgatttgttgcaattggaactgaatgtattgaatgcccgttctacgttgactgaaaatgaaagcaacttgaaaagtaatatgttcaaactccgttcatttctagcattaggagaagatgaggaattggaaccggttgttcccgagacgattccgactgtattgctgaactatccggatgttttggacaaagcacttgccaataattcatttgcgcacaatattcgtcgccgccagttggaagcagattttgaagtggctaaggcgaaaggtaatttacgtgaaatcaagctctatgcacaggtaggttttacaggaacagacaatgaatttaatagtgcataccgccgtttgaaagataaccagattgtagaagttggttttaaaattcctattcttgactggggaaaacgtcgtggtcaggtaaagattgctcaaagtaaccgcgatgtgactgaaagcaagctacgtcaggagaccatgaatttcaatcagaatctgtttatccttgtagaacagttcaataaccagcaggcccagttgcagatagcagacgatgcggacaagattgcccagaaacgttacagcaccaatgtggaaaccttcatggtcggtaaaatctcgacattggatttgaatgattcccagtcaaagaaagatgaggctcgtcagaagcatatcaatgagttgttctattattggtactattattaccagttgcgcagcttgacattgtgggatttcaataccaatactaatattgatgccgatttcgagaagattatcaaacaataggattttcactattcaattctgtttgaatataaaatggggttgtctttgtacttattaaaataataatttctacatttgcagcattatgatattaattatagacgatgacagtgccattcgttcttctctgagctttatgctgaaaagggcgaaatatgatgtgcaggccgtaccgggtcccaaagaggctattgaaatagtccgttcggttgcgccccagttaatcttgatggatatgaacttcaccctgtccaccagtggtgaagaaggattgactcttttgaaacaggtcaaagtgttccggcccgatgttcccgttatattgatgacagcatggggaagtatccagcttgccgtgcaagggatgcaggcaggtgcatttgactttattaccaagccttggaacaacgtggcgttgatgcaacggatagaaacggctttggaactgacttcacaagataagaaagcagaggttccggtggaagataatgacggcttcgaccgtagccatatcattggaaagagtaaagcactgatggatgtgctggccacgatcaagcggatagcgcgtaccaacgcatcggtcttgattaccggtgaaagtggtacaggcaaggagttgatagccgaagcggtacatttgaacagtccccgtagcaagaaaccttttgtgaaagtgaacttgggaggaatttctcatactttgttcgagagtgaaatgttcggtcataagaaaggtgcgtttacggatgccacagccgacagggtaggacgttttgaactggctgataaaggtacgattttcttggatgagattggcgatttggatttaagctgtcaggtgaaactgcttcgcgtgttacaagaacagacttttgaagtcttgggcgacagccgtccccgtaaagtcgatatccgtgtggtcagtgcgacgaatgccgatttacgacagatggtgcaggaacacaccttccgcgaggatttgttctatcgtattaatttaattacggtgcatcttccggcattacgcgaacgccgtgaggatattccgttattggtccgtcattttgccgacaaacaatgtgaatcgaacggtctttccaaagtggaatttacttctgaagcgatggattatttaagccgtttgccttatccgggtaatatccgtgaattaaagaatttggtggaacgtaccttgctggtcagtggaaaggaaatattgactgcggatgattttaaatcacaataccagcatcctatagaacagaaggtgacaacgaatctgcaaggcatgaccttggaggagatagaaaagcagactattctacaaacgcttgagaagtataacaataatatgtcacaggttgccgtagccttaggaatcagtcgggctgctctttatcgccgtttggagaaatacaatatacaagtgaatgattagcaaaaacggaaccggataaaatatgaaactgaaattcttgttcttctttttagcattactgttgacagcagtatggactatcctgctcgttcttacattgaaggaacgcggtgcgttgttttatataggagagggagttattacattcagtcttgtgtttctggtttatttctatcgcaaagtcgtgaaaccgcttgatatcatcggcaacggtatggagcttcttcgtgagcaggatttcagcagtagactgactcctgtcggacaaaaggaagccgaccgcattgtgttggttttcaaccgcatgatggagcagttgaaagacgagcgccttcggttgcgtgagcagaatcattttcttgacctgctggtcagcgcttctcccatgggagttgtcatactgactttggacggacatatttccatgctaaatgctgcagctcttcgttttttggattattcttcggcagaggaagtcagaggccgattgctgtgcgagttggcttcccctttggccgaagaaatagaacgtattcccaaagatactactgaaacaattcgtctgagcgactccatgatttaccgctgttcccggctttcttttgttgacagaggattctctcatccgtttattctggtggaaagtctgacttccgaggtggtgaaagcagagaaaaaggcatacgaaaaagtgatccgtatgatagcacatgaggtgaataatacgactgcgggcattacctctactcttgatacggtggatggcgctttggaatgtatggaggatacggaagacttgcgcgaagtgatgaaagtctgcatagagcgttgctacagcatgagccgttttatcacaaattttgccaatgtggtgaagattcccgagcctcaattacaatcagtggacttgaatgaccgcgtagccgcttgcaagacatttatggaaacggtttgccgtaaccgtaagattacgctgcatcttgatttatgtaaagagaatcctgaagtgatgatggatacttctctgtttgagcaagtactagtcaacattatcaagaatgcggctgaaagtatcggggaaacaggagatatctttatccgtacttccgtatcacctacgatgttggaaattgctgataccggtgccggtatcagtaaagaggtggaaaccaaactgttcagtcctttcttctccaccaagcctaacggacagggtatcggtcttatttttattcgtgaagttttgataaaacatgggtgtactttctctcttcgtacctatccggataaactgacccgtttccgtatccgtttctgatgattttctaccactttaccacgctgatgcttccgcaaggaagtgaaaagggagggagggtttatagtaaatgtctttcgggtgtttctttgtgtgctgttggttctttcgaaatctcagttcaaaatgaaaactctttttattatgctaagtcgtccgcgatgaaaaatgtttaatcaggattgaatgaaatcggtttgtttagtttatcttcacaatattatgtgctaaataattaaattatgaaataccctatcggcatacagacttttagtcaaatccgtgaaaacggatatgtttatgtggataagaccgaccttatctaccagtcggtgagtagaggaagtatttattttttcagccgtccgcgccgtttcggcaaaagtattatgaagggcggaaagaggtgaggtaatatccggacaagcctgaaaatatcctgtagtttggaataagtaagtaacgttataaaatagcttgatacattattttattcatcgttatcagcccaaatccacaaaaaagttgggagcgtttatgccctcatgctctcactgtatatgtaacatgttgatcatgaataatttgtgtagttgtggtaaaaatagttgctcttccttatgccctcactaatctctcatgccctcactacgttttgaagcatatttctgtataacatgcttgttgtcagctatatattctttttttgtaggatattccggcttgatataaagtagggcgttttctggctttttatcgtaaaaagtgtgtgtaaagggtttgtacttctatggagtgtgatcgcaaagttcccggtatttccggcagcggtaaaaagatcaagacgtttttaaaaaagctcttgatctttttttgaaagttcttgatctttttttgaaagttcttgatctttttaaaaaacgtccttatcttttgagatgaaattccggatcttacgcgaaaacctccaccacagagttttgcaaaactgctgccactgctatcactctttccactgaaagcaccatgagcaggacgtttcatagggtggtggcagcactttttttatatggtaaaaagggctgctgccaccacttttacctcttttctaccccaaaaagtccgtaggagggggaagaaacaggaggcggaggatgatcaaacgctgggaaaaggcgggaatacaggcacacagcacccggaaaccggaccggcagaatatcgtccaccaacgaacaagatactgactacatcctgatgggaatctgattgcggatcgccagaactatggttgcgtcccgacaaagccatagttacaatctggtgaaaccttagttccagcctgatggaactgaagtttcaaccctacggaaccggttggaactgaaccttatggctgaatatgacgcccgtacaattaatataggtgctgaatacagcttttggaaagattatatcaatgcggtgatagagttcaaccgctgccgttacttttccggcggagtggtttttaaagtccacctgaaataataaaaggagtggctgtcagtctttgattttctttttatacacttcccctctgctcattacttccttaacgaaattgtaagtctctacccctcggaagtatccattcttacaaaccggatcattgaaatattcttcattacttttaagcaggatatagtcatctacgctattatcccatacatatttattcttgccatatttttcagccagtgccatggcatccagtacgtgtcctattccggcgttataagccgccaagacaaatttcatccgttcgttttcattttttattgcgttgaaagaacgggaagtggcagcgatatatttcacagcggcctttatactctcttccggattctgttctttaccgggaggaactcccatagcacgcgccgtccggggcatgagctgcattaatcctttcgcgcctgcccatgatacggctgtcgtatcaaaattagattctgtataggctagggaagctaaaatacgccagtcccaatctatttctttggcatatttcttgaatagagtgtcgaagtgtgaaatctttccgtctttgacggacaagatggaaccgtgaggtgtccgtttgcttatttcaaaataacgcttgctactggcctgataggcaggagaagttatattttcctgatgccatttagtagcagcttcacctagtagcggtgaggtcttacgtacggcccatgaggcacgttggtcaaaactgacagccaggtcaatattcagattggggtaataagtcttgtttaatttggcaaggtcgttatcacagatggcataatctatctcaccattggaaacctgcatgattaaatcctcggtggtgatgctgtcattattgacttcgtgtatcaatataccgccacccagttctttatccagattgatgagacgttccagatactttcctggttttacatagacctctttccctattaattctgtcacattattcagtgctttcttctttttttgagtattgcgttgtaccaatacctgatgggtgataatatcttccccgcaaaattctacactatctttaaactctttggtgacaggtagattataggctatcaggtctccttctccttgtaatagtttatggaccagatcacgggcattctgtgctacttttattttcagctttacgcccaatgagcgggtaaactgatcggccagctcatactggaatcccataggctcgccccgatagtcgaaataagaggtagaactgttcaaggtcagggctactaattctccgctgtcttttatttgcggcaaatcataatttgtcacttcggcagattgttgccggttgcggcacgctgtcatgcatatacaggcaaggactaatagccagacatttttcatcttcctaaaatcttttcaatatatagtttaaggatttcaatggccttttggttgttgcctccattggggataataatgtcggcatattgtttggtaggctctatgaattcgtcatgcatcggtttcagaatgttccggtatttgtctatcagcatttccaagggatggccgcgttccaccatgtcgcgggtaatcacacgcagcaaacgttcatcgggttcggcatccacgaaaatttttaaatccatcagatcgcgtaactctttatcatagaggctcatgataccttctacgatgatgacttccttaggctctacatggacggtttcgggcaggcgtgtacatattatataagaataggtaggttgttcaatgggatgtcctttacgtaattcggctatctgttgttcaaagagcggccagtcaaaagcgtcgggatggtcgaaattggtttgtttacgtatttccaagggaatggatgactgatcattataatatgaatcttgtggaatgactgcaacggaacctaggggcaggctctctatgatttttctaactacagtggtctttcctgaaccggttccgccggctatgccaataattatcataataatagaatgtattttaaaacaaaactgttacttttgcatcaggctaaatactttaagccctgtgtcaattacaaaagtaggataattaattaaaatatcaagtatggttaagcacattgttttatttaaattgaaagaaactctttcacaagaagaaaaattgaaagtgatgaatgattttaaagcggctattgaagctttgccggtcaagataggttttatccgtcatatatttgtggggctgaataccaattctgctgaaaaatgggatatttgtttggatagtgaattcgatacgctggcagatgtcaatgcctatgccgttcatccggatcatgtagctgctgctggcctcttaaaagaggttaaggctgatcgtgcttgtgtggattatgaattataaaagatagcttatgaaaaagataatcaatccctggaaggggatgaaaggatataattgctttggctgtgctcctaataatgacgccggagtgaagatggaattttatgaagacgggaatgaggtaatcagtatctggaaacctcagccacagtttcaggggtggattgatacgttgcatggaggtattcaggcggtgctgttggatgagatttgtgcatgggtagttttgcgtaaactacagactaccggtgttacgtccaaaatggaaactcgttatatgaagcctgttaatactaacgattcgtatattgtattgaaagcctccataaaggagaggaagcgcaatatcgtatttgtagaagcggctatttataataataaagaggaactttgcaccaaggctctatgcacttatttcacttttccgcaagagaaggcgaaggaagaaatgcattttttgagctgcgaggtggagcaagatgagataatacctttaatttgaaagaaaaaataaagtttttgcgataattatttgctgatatcaaatataaactttatttttgtcgcaaataaaaagaaaagactatggttagaacagctacacatcatcatcattttcctaacgaataactcggtgggctaagatgatattgtagtatgatgatatagggcttgccgaaaacggtaagccctttttattgccggttaataattaaaaaacagatagaatcatgcttagaattgcagtacagtcaaaaggccgtttgtttgaagagacaatggcattattacaagaggcggatattaaaatctccgcttctaaaagaattcttttagtacagtcatctaattttcctatcgaagttctttttcttcgcgatgatgatattcctcagtcggtggctggtggagtggctgatttagggattgtaggcgagaatgagtttgtagagagaaaagaagacgctaaggtgattaaacgtttgggattcagcaagtgccgtttgtcattggctatacctaaagatgtggactatccggggttgtcttggtttgaaggacgcaagattgcgacttcttatcccggcattttgaaagatttcatggaacggaatggtattcattctgatattcatgtcattaccggttcggtagagattgctccgggaatcagtttggcagatgctatttttgatattgtaagttcgggatcgactttggtaagcaatagcttgaaggaagtggaagtggttatgaaaagtgaggcattgctgataggcaataagaatatgtctgaggagaagaaagagattttgaatgaactcttgttccgtattgaagcggtgaaagctgccgaagacaagaaatatgtcttgatgaatgctccgacagagcgtttggaagaaattatcgaagtgctgccgggtatgaagagtcctactgtgatgccattggcacaagaaggatggagttcggtacatacagtgcttgacgagaaacgtttttgggagatcatcggaaaactgaaggcattgggcgcggaaggtattttggtattgcccattgagaaaatgatattatagccggtccatacgtcaggcgagatttgtaaacttataaaagaatacatgtatgaagaaaataatatatcctgaaaagaaagactgggtggaaattctccgtcgtccggcattaaatacagacacgctgcgcgatacggttaaagaagtactggataaagtgaagacggaaggagataaagcggtgagggaatatgaagaacgttttgataaggtgaaactggacttactgggggttactgaaacggaaattgctgaagcggaaaaggaggtacctattgaattgaaggcagctattatgctggcacagaaaaatattcatacttttcataattctcagcgatttgaagggaaaaaggtgcagactgtatctggtgtaacttgttggcagaaggctgttgctattgaaaaggtgggcttgtatattcccggaggcacggcgcctttattttctaccgtattgatgttggctactccggcacagattgcaggttgcaaggaaatcgtactttgtactcctcctgataaagaaggaaaggttcatcctgctatcttgtatgcggcaaaattggccggagtaaataaaatattcaaagcaggaggggtgcaggccatcgctgctatggcatacggaacggaaagtgtgcctaaggtttataaaattttcggtccgggtaaccaatatgtaacggctgccaagcagcaggtttctttgcgggatgttgcgatagatatgcctgccggcccttctgaagtcgaagtgctggccgacgagacggctaatcctgtatttgtggcagccgatttgctttcacaggcggaacatggagttgatagtcaggccatgctgataactacttctgagaaattaatgaaggaggtggagtatgaggtacaacgccagttggctttgcttaccagatggaaaatagccgaaaagtcgttggcaaacagcaaattgattttggtgagggatatggatgaggcaattgctctgacgaatgaatatgctcccgagcatttgattatcgagaccaaggattatatggaactggcagagcgtattgtcaatgccggatctgtatttctaggttcacttactccggagagtgccggtgattatgcatccggaaccaatcatactttacctaccaatggttacgccaaagcgtatagtggggtgagcctggatagttttatccgtaaaatcacttttcaggagattaatggtgagggtattcagaatatcggtcctgctattgaggtgatggcggctaatgaacaactgggtgcgcataagaatgcagtaaccgtaagattaaaaacagtataaagatgaaagatttgaaagaattgacgcgctcgaatatttgggctttgaaaccctattcatcggcacgtgacgaatataatggagcggaggcatctgtttttctggatgccaatgagaatccgtacaatacacctaataaccgttatcctgatcctatgcagcgggaactgaagaatatgatagctcctattaaaaaggtagaccccgatacgatctttctgggaaacggcagtgatgaggctattgacttggtatatcgcgcgttctgtattccgggggtggataatgtagcggctattgaccctacttatggtatgtatcaggtgtgtgccgatgtcaacgatgtagaatatcgcaaggtgttgttggatgaaaactatcagttcagtgccgacaaactattggcggcaacagacgatcacaccaaactggtttttctttgctcgcccaataatccaaccggtaataacctggatcgtagggaaatggaaaaattgctggatacttttcagggattggtgattatagacgaggcctattccgatttttctgatgcgccgtctttccttgccgatttagataaatatcctaatttgattgtcttccagactttttctaaggcatggggatgtgctgccattcgtttgggcatggcctttgcgtctaaagaaatcatctctattttcagtaagattaaatatccgtataatgtgaatctgctgacacagaaagaggctgttatgatgttgcatcggcattatgaggtagaacgttgggtaaagtcgttattggaagaacggacgcgtttggtcaatgaatttgtagaactgccttgttgtgagaaaatctatcctacggatgctaatttttttctagctaaagtgacagatgccaagaaaatatataattatttggtaggtaaaggtatcatagtgcgtaaccgtaccaatatttctttatgtcgtgattgtttgcgtgtgactattggtacacgtccggagaatgatatgttgttggaagcattgaagaattatgaatgttgaaatatgaagaaagcgttgtttatagatcgtgacggtacgttggttatcgagccaccggttgattaccaattggattctttccataaattggagttttatcctaaggtatttcgtaatttgggatttatccgcagtaagctcgactttgaatttgtgatggttaccaatcaagatggcctcggtacttcttcttttcctgaggataccttttggccggtgcacaacctagtgttgaagacattggagggggaaggtatcacttttgatgatatcttgatagaccgcagttttccggaagaccatgtgcctacccgcaagcctggaacaggaatgatgggaaaatatcttaccggtgattatgatttggctaacagttttgttattggtgaccgtgttacagatgtggaactggctaaaaatatgggatgtaaggctatcttgctgcaagataatatggatattctgaaagaaaaagaactggaatcctattgtgtactggttactacagattgggataaggtcgctgaatttctttttgccggagaacgtatagcggaggtccgtcgtactacgaaggaaacggatatttatatcagcttaaatttagatggcagcggaaagtgtgatatttctacaggtattggtttttttgatcacatgttggaacagattggaaaacatggtggtattgatcttaccattaaagtaaaaggtgatttggaagtggacgaacatcatactattgaagatactgccattgttttgggtgaatgtatttatcgggcattgggtagcaagcgtggcattgagcgttacggatattgcttgcccatggatgattgtctttgtcgggtagctttggattttggcggtagagcatggttagtatgggatgctgagtttcatcgagagaaaataggggagatgcctaccgagatgtttcctcatttttttaaatcattgagtgatgcagctcgtatgaatttaaatatcaaagccgaggggcagaatgagcatcataaaatagaaggtattttcaaagctttggctcgtgccataaagatggctgtgcgaagagatatttactattttgaagtaccctcaagcaagggatgtatttaagttagcttcaaagacaaagtaacttaacttatttgcccaactaagttaagttactttgtctttgaagctaacttacttttttatatggtttatagctcttcgcattctttcagccatgaagctgcacttgcatcgcttggcatacgccagtcacctcggggactgagtgatacggatcccactttgggaccatcgggcaggcaggaacgtttgaattgttgttgaaagaaacggcggcagaatatagtaagccattttttgattgttgcctcatcgtatgtatcacgaaaagcgatacttgccaggaagaatatcttggcgggacgaaaaccgaaacgtaggaattgataaaggaagaagtcatgcagttcgtatggccctaccaaatcttctgtcttttgtttgatattgccgttttcatcagcaggaatcagttcggggctgataggagtgtctacaatatcgagcagagtaatacgtgattcattatccatgtcattcaaagccacccaatttaccaggtatttgaccaatgttttgggaatacttccattgactccatacatagacatgtggtcgccattgtaggtggcccagcctagggcaagttctgaaaggtctcctgtaccaatgacaagaccgctcagttggttggcaacatccatcagaatttgagtccgttcgcgtgcctgactgttttcgtaagtcacatcgtgtatggtcatatcgtggtctatgtcattaaaatgctggatgcaggattccttaatgctgatttctttaatagtaacgcctaatgaagccatcagatggagagcattattataagtgcggtcggtagtgccaaaaccaggcatggtgatgccgatgatgccttttcgtggcaaattcaatttgtcgaaagttttggcacagaccaaaagtgccaaggtggaatccaaaccaccggaaataccgactactacagtcttgcagtgagtgtgtaccaaacgtttggcaagccctgctatttggatggcaaaaatttcttcacaacgctcatccaattctttgccctgaggaacaaaaggatgggcttctatactgcgtgtaagactaagatcgcgtgtgttaacaaattctgtactgatgtggatggcgggacgtcccgggcagttgccgatattggcggcaaaagtggtattggtcaaccgttcgccacgaagacgctctacgtctatttcactgatgactaactgttctttgaatgagaaacgttcagattcggtaagtaatgtgccgttttcatatatcagtccgttgcctgcaaaaacaacgtctgtagtcgattcgccgaaaccggatgaactgaatacatatcctgccaggcagcgtgctgattgttgactgactaatgaacggacataattatgcttgcctatcccttcattatcggcagacatattgaaaatgatttccgctcctttcaatgctaatgcggaactggggggaatgggggcccacatatcttcgcagatttcaatgccaaagcaagtttccggagtgtcgaaaagcaggttggcgctgaccggtacattttgtccgcagagacgtacattaccatctgggtggtttagagcagaggtaaaccagcgttgttcatagaactctttataattaggtaaatatgttttgggaacaatacccagtatttttcctttttggaaaacaacagcactattcagcagcgtggaattcataaccacaggcatccctacaatggagacgatatccatttgtcgggtattattcataatctgcattaaagccatttctgcttcttccaacagtaaagactgaccgaacaagtcggcgcaagtataccctgtaatacttagttcgggaaaaatgataatttgtactcctttcccgtctgctatggcaatttgagtttcaatctgttgtgcattaaatttgcagtcagccactttcactatcggaatggcagccgccactcttacaaaaccgtatttcatattatacctaattattatatatacttgcaaaattaatcattctttcccgatttatacccctaaataaaaaaaataaaaaaaagtacgtgatttatttgtttgttgcgaataactatctatctttgcacatgaaataaaattgtaatagttacaaaaagggaatatatgaagagttacgattatcttatcagttataacattaagccgtccgtacagcgcatagctattatggattatttgttggcccataaaactcatccttctatcgatgagatttatttggcgctatgcaaggacattccaaccttgtccaagactacagtgtataatacactgaaactctttgtcgagcatggagcagctttaatgcttacaattgatgaaaagaatgcgtgttttgacggtgatacttccctgcatgctcatttcctttgtaagaaatgtggtaaaatatttgatttgccctacagtaatgaagtgaagcaagtagagcaaattgatatgaatggattcaaggtggatgaaattcaccaatattataaaggtatatgccccgtttgttctaaagaagacaaagaaagaagttagaaagatagagagtagatgactaactaataaataaaatattgactaactaataaaaaaagaaattatgaaaaagtttatttgtacagtttgtggttatattcatgaaggtgatgcagctcctgaaaaatgtccgttgtgtaaagcgcctgcttctaagtttaacgaaatggtagaaacagaaggtggcttggaatttgcagaccaacacgttatcggcgtagcaaaaggttgtgatgaagaaatgattaaggatttgaacaaccacttcatgggtgaatgtacggaagttggtatgtatttggcaatgagccgtcaggcagaccgcgaaggttatcctgaagttgctgaagctttcaaacgttatgcttgggaagaagcagaacatgctgctaagtttgctgagttgctgggtgactgtgtatgggatacaaagactaacttggaaaagagaatgaatgctgagtcaggtgcttgtgctgacaagaaacgtattgctactcgtgcaaaagctttgaacttggatgctattcacgatacagttcacgaaatggctaaagacgaagctcgtcacggtaaaggttttgaaggtttgtacaacagatatttcaagaaataatatacgattttttatagtataaatggagagagggggagtaattattattgtcccctctctttttattggctatatttagattagagatgtataggccttgtttctcattctttcagtaatacttcttcaatagctttcctgaaagtagttttattggccgctcctataatgatttgcggctgtcccgttttggggataaagatgatggtgggcagtgactgtatccccatggcagcagataattctttttgtttgtctgtatctactttgtaaactacgatttgatctttgtattctttggccagactttttagcagaggggcaaccatacggcagggaccgcaccatgtggcgtagaaatcaataactgccggtttctctcctttgtatttccagtcagtggaaccggaggtgtagtcaaatatattatccaagaacatttgtttgtccatatgtatgacttttccttcatttttatctgacttatctcggaaaggagtctgggcactgaggtatcctgttaatccggtagttaataaaagacacgtgattgtttttttcatattttattcatattgggctagaattatgcttaaatcattggcacgcattacaccgctttgtcgccacaattgcttaccgtctttaaaaatcattagtgtgggaactgactgaatctgatagtatgtagcaatttctttatgtttgtctacatctactttgacaattcttactttttccccttttattccttttaattcttctaaaataggtttcatggctttgcaaggtccgcaccattcagcaaaaaaatcaactaatacagggatgtttgaggtgattaaatcttcaaatctttccataatgttctcctttcgttatttttattataataaaaacgtttatagtgtgttttttgtttaaaagtaagtgggtgtgtccaaattagtttttggaaatatgaacttataatctgaaatttgagcatcctaaaagactaaagaaagggtcgtatcattactccatacagagcttgatacgacccttttaagtgttataattactatctgtaacttttaggaacagtcatttttgttttgacaccgcttccttgtattataaggttgatgaactattatttttttacagaagagggagtataacgtgcattcagtccatcaatgatttcttgtgtgatgttgtatgccggattagcgtatagcaaattgtcaaatcctgtattgctgataattagatcatatcctttgttttgattataaattttcaagaatgaattgatagaatcacgtaactgcaagctgttcttttgattttcagaagctagttcgtcgcttagtttctgttgcagtgcctgcagttcttgttgttgcttcatcagtctcatctgttcttgttcagcacgttcacgtgtagcgaagccattattttccagtttgcgttggaattctttagcatcagcatccagcttctttgctttttcatttaaagtagtgcggatattttcttctttctgtatcatcacttcatttaagtcattccagaaattgtacttagtcaacagtgaatcgatttccacataagctattttcatgtttgaagaaccagcaacgccgacagccggagcagtggaagaagttgcagcgttgttgttgtcgctacattgtgcaaacactaacacgatggctagtgctagaaatccattcaggatgaaatttgttcttttcataatctttttcacgtattgtttattaattattatccgttttgttttgcttttcaatttcggctatggcatttttattaggcttgcgtgcttcacgatcttgtgattgtacacatcctactccttttttacggagtgccttattaccgcttacatgtgtgtttggaaactttccttttagaaagattccgatagacaataatgctatacagatagcaactattaacacagttataaggatagtatcaagcatttctattatttttgtggtgcaaagttagtgtaaggcaagggaaatgccaaatttattgaagcatttcgtatctgcggactaaatttgcggaacaaatatagaattttgcaatgatttagctttctcttttctcattaaaaaagaggaagtgtcctatttaagagaattatttaactattttttgcaaatttggaaactgaatttgcctaaacaacatgattatgaataaaaaggatttaaagccggcatctgtcttttattattttgaagagatatgtcaggtaccccgtccctcgaaaagagaggagaaaataattgcttatttgaaagccttcggtagaaaacatggtttagaaactaagacagacgaagttggcaatgtattaattaaaaaacctgccactccgggtaaggagaatttgaaaactgtgattttgcagtctcatatagatatggtttgtgaaaaaaacagtgatgtggagcatgattttctaattgatcccattgacacagtagtggacggtgaatggttgaaagccaaaggtactacattgggggcagataatggtatcggtgtggcgacagaattagctatattggctgctactgatatagagcatggtccgttagagtgtcttttcacagtggatgaagaaactggattgacgggtgcttttgcattgaaaccagggtttatgactggtgatattttgattaatttggactcggaagatgaaggagaattattcatcggctgtgccggtggtgcaaatactacagcggaatttacttatcagcctgtttctgctccacaggattatttctatttccgtgtaacggtcaagggattgacaggtggacactccggtgatgatattaataaaggtagagcgaatgctaataagctgctgaatcgttttctgactcagttggcttctaaatatattttatatttatgtgagattgatggtggaaacctgcataatgccatacctcgtgaggcacaggcattatgtgcggtacctatgaaggataaggaatcggttcgtgtagatttgaatatctatactgcagaactggagaatgaatatgctgcgacggaaccgaacttgagaaccgaactctcttctgaatccccttgtaaggaagcgatagatatgactactgccggacatcttctgagagctgtttacgctgtgcacaatggggtgtatgccatgagtcaggatattccaggattagtagaaacttcgtctaatcttgcttccatcaaacaggtagagggaaacaagattaaaatagtgactagccagcgcagctccattctttcatcacgcaagaatatgtccgagatgatccgttctgcttttcttttgggaggtgctgaagtaataactggtgacggatatccaggatggaaaccgaatacggattctcctgttttgaaaattgcgatagatagctataaaaaactttttggtgtggaacctaaagtaaaggcaattcatgccggattggagtgtgggttgttccttgagaaatatccgtcactggatatggtttcctttggacctactttgcgtggtgttcattcacctgatgaacgtatgctgatacctactgtagataaattctggcgtcatttgctggatgtattggttaatataccgacaaaataatttatatgaagaaaacaattctattcctttgtttgtgctacctggtaggggtgacgtatgcacaggaaccgttccgggtaatgttctataatgtagagaatttgttcgattgtcagcacgacacgttgaaaaatgattatgaatttttgccggatgctccgaaaggatggacgcaagcgcgctatcatgataaattggctaggatagctaaagttattattgccacgggtgaggaaaatgtccccgatttggtgggactttgtgaagtggaaaatgatcattgcttgaaagatctgacagaaaactcgccattacgcgaggcgggttatcgctatgtcatgactgattctcctgatgagcgtggtattgacgtggcgttgctttatcaacgtggtacctttaaattagtagggaaaaactgtatttctgttccttataaggaaatagagcgtcggcctacacgtgatatacttcatgtgacagggcaggtagcttccggagatacattggatgtgtttgtgtgtcacatgccttctcgtgcaggcggtgaggagaagagtgaaccctaccgcctttttacggcgcagatattgaagatagcggcagattctgttatgaatatccgtcagcatcctaatgtaatgattatgggtgattttaatgattatcccactaataattctattgcaaaagtattgggggctgtggctccgaaaagtggagtgcaggccaagaaattatataatctgatggacgggcgtaaggagggaacctatcgttatcgaggtgagtggggagtacttgatcagctgattgtttccggttttttgttacaagggcatgatagtatgcgcacttcatatgataaggcacagattttaaaatatccgttcctgctggaagaggatgaaaaatatggtggtaatattccatcacgtacctattggggaaagaaatatcatggtggttatagcgaccatttgccagtgtgtgtggactttgaaattggaaaatagggagagattggtggttagtgatgaatggactgcgctattatgccgcaggtgttaatcactaaccgctatatatttctattcatgatgataaggaccgttgttcaatatagtcatcgcccggtatagctgttctacgaaaataaggcgtatcatttgatgtgagaaggtcatcttggataatgagatcttttcttgggttacatcatatattttgggtgcaaatccgtatggccccccaatgatgaatactaaccgtttgtttacagtgtgcattttgcgttctatccagttggcaaattctacggaacggaattcttttccatgttcatccaataaaaccactacatcgcccggcaacaaagctttcagaattaattctccttccttctctttttgttgctccatactcaggtttttggtattcttgagctcggggatgacttccatatcgaaagaaatgaagtgcttggtacgttccacataatcattgatagcggtgatataatgtttttcgacagtgcgtcctactactaataatgtaaatttcatacgttcttttctggtttactttgcaaaaatacggaaaatctctacctttgcctatcaattcataaaaaaacgataacattatggacgaattagtagtaaaagacttaatagacagactgatagacctgtcttttgctgaagatataggtgatggggaccatactaccttgtcatgtattcccgcagatgcaatgggaaaatcaaagttgttgattaaggaagaaggtatcttagctggcattgaagtggctaaagaagtatttcgccgttttgatcccacaatgaaggtggaggtgttcattcaagatggaactcacgtgaaaccgggtgatgtggctatgatggtggaaggtaaagttcagtcacttcttcagacagaacgcttgatgctgaatatcatgcaacgcatgagtggcattgctactatgaccaataaatatgtgaagaaactggaaggtacgaaaactcgtgtact

SEQ ID NO: 14494 - DNA, 356 bp, Unknown
  gut microbiota DNA sequence
caggtaaccggagtttaatcataaaggaaagaaggtgtgtcaaaatgcgcaccttctttttttatgcacaaagccccgactttcacaagcaggggctttgttattacctaaagattttgtatctttaagcataacattttatactatgacaaagatacattttcgtccttacaatcccaaccaaacagtgctttttcctccaagaattgacgaggatattgcagagcatgatccagttcggatggttgacgctctggttgagagcctgaaccttgaaagtttcaggaagttgtataaggaatgcgggcgcagcccttaccatcccaggatgatgctcaaggtcattctgtatgcct

SEQ ID NO: 14495 - DNA, 307 bp, Unknown
  gut microbiota DNA sequence
tgagactcgaactcacacgacataattgtcaccaccccctcaaagtggcgcgtctaccaattccgccattcctccagaaacgaaaacctcgtgtgtagtgcccagaacaggactcgaacctgcatgcctctcgacacacgcacctgaaacgtgcgcgtctaccattccgccacctgggcattctgtgtaacactcttgtcacaacgcacaaaattttatttatgtgagcggaaaacgagactcgaactcgcgaccctaaccttggcaaggttatgctctaccaactgagctatttccgcaaatatcc

SEQ ID NO: 14496 - DNA, 47305 bp, Unknown
  gut microbiota DNA sequence
ttaatagacgcaactctctataatatacgtcgtgagcgccgatgtgaatttatggcggatgggcttcgttatatggacttatgccgttggcgtgctatggaccagttgattgaacaaccttatataccggaaggtttccatttatggaacactcctatgcagacttggtatgcagatttgctatatgatggatcagacgcttccaatgtttcttcacctaatgtcagcgaatacttgcgcccttaccagaagaattctaaacagacctgttataatggttttacttggcgtatggctcattatctgcatcccattatggtcaagcagtttttgattaccgcccccgataacaaaacagtagaaaattctcctatctatcaaaatccatattggcccatagtaccggatatgcctgctgaaagataagttttagggcattccaattataaaatattggagtgccctaatgacaactcgatatcatatgattgataagaaaagagtagccatcatatgtactacttgtacgatgatacaggaatcgtaactaaattctatgtgtgcaactctttataattccgatatttgtgaatacacacaagccgatacaaatcggtgttcattctttataataatgtatcaaataaaaaacatcgttatcatttttttcttgatgcttgttcctgtcggagtaacagcccaatatcagaaagcacaggaaaaagcccctttggtcaatgtacctttggaaaattttgcatcacagcagaaagtcctttttaactttggctggaaattccagttggttacaaacgagaataaaaataccgatttcgcctcacctgccttggatgactcttcctggcgtacattggaccttcctcatgatttccagttcgaacaaccctggactgaaaatggtggaggtgcacgcggattcaaacctatgtgtgaaggatggtatcgcaagtctttccctaccgatccgtcgtggaaagggaaacgggtagtcttggatttcggaggcatcatttattggggcgatgtctatctgaacggtaccaaaatagtctcgacagattatggatatgtgggacttgaagcggaccttaccccttttctacgtcacgatggagaaaatgtggtagctgtctatgcctctaccggtcccaagaaaggttcacgctggtacacgggaggcggtctgttccgtgatgtatatctgcaggtgcagaatcccacacacatcgcccgccatggggtgtatattactacccccgaggtttcctcttctcgggcaacggtagccgtacaggttgaggtggacggctggcagaaacatgacgtacggatacggaccaccctccgcaatccggaaggtgtcatagtaggctccgtgcaatccggtatgcccgaacatacgcaccaaacctgtacggaagtgaaattaccggcgcttactctggagaatccacaactttggtcatgtgactctccgcaactttatagtgctgatgtagttgtgatggcggacggtatggtagtggacagtcttactgaacagtttggtatccgtaaattggaattctcttccgaatttggtttcagactcaatggtgagaaaatattcctaaagggaaatgccaaccatcatgaccttggcgcattgggagctgccagttacgacagggccatcgaacgcatgatgctacaactcaaatccttcggttacaactgcatccgctgttcacataatccgtacagtgacagttttgcccgcattgcagatcgtgtggggatgttagtagtggacgaactgacggacaaatggagtgacaatgactattggggcggacgtcaaccgttcacccatatctggcacaaactgattacagaatggatcaaacgcgaccgtaatcgtccgtccatcattttgtggagtttgggaaacgagcttcagattcgtgaaggatgggcaggttttgaaggaaccaacgattggggaatcactacctataacatcttcaaccagctggtaaagaggtgggataatacacgcctcactactgttgccatgttccctgctcgtgcgggagctataacccgacatgacaaggagttcaacgactatttggtgccgcccgaactggcttgtgctacagaagtggcatcgttcaattaccagtcggataaatatgacgcttatttgaaatataaacctgaccttatcttgttccagagtgaggctgaaacaagtaatctgttacagccttattataatatggatagaaaacggacggtgggcatggcctattggggatccgccgagtattggggagaatccaacaagtggcccaagaaaggctggaattactctttctttgaccataccatgcgtccctatccccaagcctaccttattaaatcggctttcatgccagaaattcccgaagtacatatcggagtggtcgatgcggcgggggcggaaagtgtcaactggaatgacgtcatagtgggacgcatggcactgaacgagtgctggaatcatactccgggcagcagacggtcactcttcaccttcactaatgcacattctgtagagttgttggtaaacggtcagagcatgggaattcaagaaaacgatacgacacgggcaaacctgcgtaatatgatttattggaaggatgttccttatggcaacggtggctctgtggtggcaatagcccgtgacaagtcgggcaaagaagtggcgcgtcatcgtattgaaactgccggaaaagccgtggcactccggattgaggcggaaacaccgacggactggaaggcagacggtatggacttgcaatatataaacgtgacggtcatagacaaaaaaggtcgtccggtatgggactacaacgagccacttactttacaaatggaaggtgcggcacggttggtggcattggataacggggatcattatacggatgagctctttcatggcataacttccaaacgaatgtatcagggaaggatgcaaattattctccgaagcgatcaggaggctgggaatgttacggtcaaaatatcctcagctggattgaaaggcacacttcggttgaaaacgataaaagaatgaaaggaaatatatgaataaaagattaaaattacttggcatctttataacagcatctttatgttgttatgcccagacaaaagagttcgatccttctctggatcctaatgtaaccatcgtgagccggcaatctcaggaggaatggaacagtcgctatatgtggtatccgggacaactggctgctttctaccagcaacaatgtgcccgtatctcaaaagagcgttgtgtcaatgtaggatatccgggtaaattttttgcaaagaacaatcatgcctggttcagaaaagaggtaagattgaaaaaggaaagtagtctttgctgggagggcccgtcggatattgttctttatataaatggtgtaaaacagtctgtttccggtaaacaggttattttacccgtgggcagatcctctttattgtttgaggtgacaacggatgactcgttaccttgtatcattctgaaaggggcgggactggaaaatccggatgaatggcaggtcagcatggataaagagcattggacaatacccgagagtgccgtcatgtataataaaccgggcgtgttgccggatgctccgcaagatatgacagcccggattaaaccttcacaaatactccccatgcgcaatgctgagatgcaaggtaaagacggaattagtatcggaaagaatggttatgtcctcatcgactttttccatcttgagattggaacactgacctttcaagcgaaaggaaagggaactataaccgtacgcgttggcgaaactcccgaagaagcactggaacgggatgataagaaactggaacaatatccattggttcctattaccttgtcagaagaaggcggcaccatcactttgccggaacgcgctctccgatatgtttcactggaatgcgacaagggggctgagattacctcccttcgttttgatgcgtcattgtggccggtagagcaccagatgcagtttgaaacggatgatgattatgtgaacaacctgttcaaaatgagcagtgcgacattgcataccagtatgcaccgcttttatctggacggggtgaagcgtgattttcttccctggtccatggatgcgctggtcagcaccctagcgggggattatcttttcggtgaccagcaagtgtcaaaaaacggaatttccatagcactgatgccgcttgatccgcagaaatcagatatagggattcctgattatccgttgcatgctctgttcggcctgaaacagaactatctgcgtttcggtgacttgaccacttcccttcaatacaaagaccgcatcatcctgttgcttgatttttatgcctccatcgtggatgagaatggttttgtacacggcaattatggagacaggcagttcggttatacccccggatggtccacctataacggtcctgttcggaaaggggtggcggcctatgcccagatcatgctctattataattatgtgaccggagcttatttcgcggatctgtggaaggagagtgcattggcggacagataccgcaagttggcccggaatctgaaaaagaagatttttgaacatttttgggataatgaccggaaagtcttcatcaacggtacaatgaatgacaatgtgactgtggacaagcgtatttcgcatcatgcccaatattggggaatactggccgatatctttcccaaagaacattatgacaacctgtttgaaaatgttctgccgaatttgccgaactattatgaggtggtcagttatgagaaaggttatgagtttctggcttatgccaaagccgggcggataaaagagttatgggatcatatctatggtgtgttcggcgactggatggatcagggacatacccgtttcccggagaactttatgatgaacgcctccagggcccgtcaactggtattttataatcgtccgtacggcctgagtctttgtcatggggcgaatggagtcccggtagtggtaggcgcattgaacggtcttatcggtttcagccagtcttcgatgaagacgaatgaatataccattaaaccggagttactccatttgaagtggattcattccagaattccggtaaaggaaggatatattgtcttgaaactgaatgccgagggggagagcactattgacattccggcaggatgtacagtcagaattataaaaaagaccggaaagaagccactggtactgagaaaacagggcgggtacagtttccggttgaaggactgagcgttgaatagaaaaaagtgtctgttcaatagccatattctttattaagtcattcttaatgtacttgattaaaccgacaagttgcaagttcttgaatttcttcctagctttgtattcgtttgttttcaacaggagtacttgcgtgaagaatatgaaaagcataggaaggatagtattaccaatcattattttgttattgactgtgcggataaatgccgttccggtcaaagcatttgatatgatagtaagaaaccttcctaattcggaacagttgccgaccaaagaattgctttgtatcttccaggattcggaaggatatatgtggtatggcactgaagggggaggcttgtgtcgtgatgatggatatacggtgaaagtattccgttctgatttcaaaaatccgggaatcttggaaaacaacagtgtgacgtgtattgctgaagacggtgaagggaaaatatggtttggaacgaagcgtggcgcctatattttgtcaaaaacagattatgagataagggcgcttgctgatgaaacgataaagagctggactataactacaatgacagcgacgtctgatggtacgatctggatttcgactaacaggcatttgtttcgatacaatgagtcaggggaaagaactggaaaatatattcttaaatggaaaggacgggagaataccgtcaattctatttatgaggataagaaaaagactgtttgggtaactcaagcaaaaggcgggcttttttgctatgataaggtaaaggactcttttatttcatatccttggccctatgatgagtatcccacaagcatgacggaagatcataacactccgtattattgggttactacttggggaaaaggaattgtacgttttgaccccaaggcacaggatacggacaaaatgtttggattgcaaacagtggataatgcgtcttctaactccgatacccgaaagcttcatcatattatacaagattctgttaagggatatttgtgggtgactgcggcagataacttatatgcctataaaataacggccgatgtatccttggataaggtggatctctcccgtttattatcagctgacaggaaaatcctcacaaagattctttccgatcaatccggaaatttatgggtgacaggttattatccttcttctttcattatttcttttcttcctaatgaagtgctttctttgtctatggaaggggtaaagcaaaatttgggggtaatcgcgtctcctatgcagttttctcaagagaagaattattattggatcagacaaaagaaattgggactgtatgcttatgatccccagagagagcgtatgtctgttgttaagaatgacagggagctttcttttttctttgagaggccatcggatagagagggactctatatggtaagggatcattcggtaattttaattcggtataaggagaaccggctttttgaatccatcgtatgtaccatacccattaaacaaggtgagcgtatccgtgctttgcatgatgaccgtcgtgggaatctttggatagggactacttaccatttattccggtatagcttggaggaaggccgattgactacagtttgtgatgatgttggttttataaatgctatcgtttcgtctaatgaaggagttgtttattttgcaactgaaagtagagggttgtggagaatttccggagaaagtcggttgcaaataaaggatacaggagaaaattattcggtattgactgtcgcaccggacaacaatctttgggtgggtactaaacagggcaatgtgtatagttattctccggatacgaatgattttatttcccggacaaaagattgtggattgacaggggatgctgtgttggatataaagtcggatgacgatgggaatctttggattcttacatcacagcgggtgatggtctatcatcccggaacacatatctttactatgatgtcttgtactgattcttggataaatctggaagatttccagtcattgtataaagatcctcggggagaaatgagtgtgggtggacgaggtggaattgtgacttttcctcactataatgaaaaaaagaggaggatacctgaaccaacggtgcatttgacatccgtcgaaatgaataacacctctgaaatcggggtgggtaatcaagagaaaataagcctgtctccttatgagagaaatgtgaaattgtttttttctacttttgaccatttgaatacggataaggtaagatatgcttatcgttataaacaaagaaacgataattgggtggccttgccgacaggggaaaatagtatcggattgtcagatttgtcaaagggggaatttgaactggaagtccgtgctacagatgagaatgggctgtggagtaagagtacattaacggtcatgatccagtgtttgcctgcttggtatgaaactagttgggcgtatttgttttatgtgcttgttgttttatcggttgtttggggattggaccggatgtatatgaaattacgggagtccattgttgcacagactgttctgccattggaacaaaatccggagcaaaggcatgagatagatccattgtcggaagaaggaaaagtagaagcgaattctatttcagcatctgatgagcaattaataaggaaggcattggatatggttgagaagaaccttagtaatcctgaatattccatagaagatttaagtagggatatgtgcatgagtcgtgctactctttaccggaagattacatctatcaccggaagctcgccttctgatttcgtgaagaatgtacgtcttcgtaaagctgccgaattattgaaagaaggagggctttccattgctgagatagctgatcaggttggttttaatacgcctagttatttcacaaaatcattcaagaaactgtttggggtattgcctacacaatataaataagggtgtaaatgctaaaaaaatatagaatgagaactaggaattgtttgttaatcgctttttgttttatgatcctgtgtggaaagttgtatgcccagcccacaggtagtgaggatcgtatgtactgggtgcagactttaacgaaaattgctgatcctgtgttggtcaatctcagtcagggcacattgaaaaggaatatgccgtttgagtcactgtccaatgaacctttacgtagaagtgtttcctatctggaagcggtaggaagaaccgtttgcggcattgctccctggctggaactgggacctgatgacactcaggaaggaaagttaagagaaaggtatattcaactggtggttaaaggactgaaacaggctgtcgatccgcaatcagctgattatttgatgtttgataaccgtcatgcccagcctttggtcgatgcggcttttcttgtacaaggtttgttgagggctcccggacaactttggggaaatctggatgcggatactcaaaaaaaactggtgtatgagttgaaaagaacgcgtggcataaagcctaatgagagtaattggctgcttttcgcttcgatggtagaagcggccttgttggaatttacgggggaatatgatactcagagattatattatggtgtaaaccgtttcattgatgaatggtataaaggagatgcctggtatggagatggggcagaattgcatctggattactataacagtttggtcatccatccgatgttgacggatgtattgtctgtcatgaaaaagcatggattggaacgtgccgagttcttggaacgccaattggttcgtcaacaacgaatggctgcccagcttgaacggatgatctctccggaagccacttatcctgtagtaggccgttctatcgtgtatcgttttggcgcttttcatgcgctttctcaaattgctttgttggacaagcttcctcaacctctttccaagggacagatccgttctgccttgacagctgttatgcagaggcagatatccatgcccggtacttttgatgaaaacgggtggttgaaaattggctttgcaggaagtcagataaatatgtccgaaccttatataaatacagggagtctgtatttgtgtacagcggcttttttgccattgggacttccggcaaatcatcctttctggactgagccttatagtgaatggactaacctgaaggcatggaaaggtgttgatgtaggggcggataaggctttgagaaaaggatagttgtctatgaaaagaaaagtaacttaacttatttgcccaagtaagtcaacttaaatgccgaagtaacttaacttgcttggcctatgaagatagcttacttttcattggctggtttgcctgattttaaagagcatggagatttttccatattaaaggaaaaatctccatgctttatgtttgtatgtcaatagaatagctattgtgtaatatggaatccccctctacttttgcatggaataaattgcggaactttaattggcagatcataaacaaaacactaaaatattatactttatgaatttacgtactatttttatttcatcgtttctgtcattgagcagcttgggggtgctggctcaggaacagattaatttaagcggtacatggcagtttgcatttgccgccaatcaaaaggaggcggaccgtttggaaaggttttatacgcctgattttgctaaaagcaaatttaagtcaactcctgttccatccaattgggccttgttgggatatgaagaaccggtttatagaggattcaaggataatcaagccggtgagggattttatgtgcgggagtttacaattcctcaggattggaaagacaaacgtatcttgttacatttcggtggggtatggtcatcggccgaagtttggcttaacgggaacgaactggggcgtcatgattgcggatatacttcttttgcttttgatgtgacgaataaactgaaagtggatgagcctaacaaactggctgtcagggtaaggcagatcacccgtgagtataagtttgatgtttgtgatgactggacttggggaggtatttacagagatgtaactttggaggctatgccggccaaacgatggattgatgatgtggtggtacagacaacctttgaccatttgtttcaagatgcgaatctggacatacgggtgatgatcagtgataagcataagaatacattgcccggaaactatcctagtctcggcgagctttataagctatgtttcacactcaccgacaaagaaggcaaagaggtggcgcaaagacaaatgactgtacctgcccacgtttcgacggatcgggagatttgtctgagcctgccggttgaggctccgcaccagtggactgccgaaactccttatttgtatagtctgaaagtggaacttttagaaaaagaggtagtaacacatacacgtatggaacgtgtcggtttccgtcagatttccactgatggaggagttttcagaattaacggacaggcagttaaacttcgtggggtgaacaggcatgatgaacatccggatgtaggtcgtgccactacccgtaagcagtggttggaggatctcacgctgatgaaggctgccaatatcaattatcttcgtctctcgcattacacaccagccgaagggtttattgaactatgtgattcaatgggaatgtacgtgggcaatgaagtgacgctagggggagctggagacctgatgtacgatccttctttttcgggggcggttctgcaacgttcgtatgaaacgattgtccgggatataaacaagccgtctattatttattggtcaataggtaacgaagatcctttgacctctctgcacatggtttctgtaaaattggtcaaggcacttgatcccactcgtccggtactgttgccttggcgtcctgaagaatggctccctaaagaagtggatattcttgctcctcattactggaacccgcaggaatatgaccggcttgccggacattccggacgtcctgttatctcgactgaatacacacatgcttatggcaatgatgcgtttggagggttggaagcacgttggaaggcattgactaaacatcctgccggagccggggcagctgtatggatgtgggcggatcaaggggttaagactcctgtccggaagaaagagaaagatttgagtgaagatgaatacttaagaattaatacagccggttgggatggtattgtggattcttatcgtaatttcactcgtgactattgggagacgaaggccgtctatgctccggtttaccctgctgtggacaggatttcatttgtacccggtcaggattcggtacgtattcctatccagaatgattttgattttacgaatcttagttctgtaaagatggcttggtctgtatgggaagatgagaatgtattatattcgggcactgattccatgtatggctatccccatacagtgtcggactttaaattgccggtagaaaaactagtgactgttcatccgggaaaaacgtattatgtgtggtttatatttacggatgaaaaaggaacagagatcactcgcagggctgttgaactttgtcctcagacagaacaaccggtgtctgttcctgtttgtcgtgaacttttggttactgaaacggataaggttaccattgaggctggtgatatccgctatgtgtttagtccgaagaatggacaattggtgtctgcggagctaaagggaaagcagttgataaaagacttgtatccggctatctggcgtaaattaaatcaaggtgagacttccggatttggtaaggaaaatcttcgtaaggctgtcgatcttactcattatacgtcatcggtaacagcatggaaggtggagaagacaccgaccaatgcggttatccgtactactgtggattatagggtggatcaggagaatcattttacagtgacttatcgttattcaataggagtggatggacgcttgaacgtttattatcagattcttactaaagtggctgtaccttggttgcctattgtcggtatgtccatgcagtctgtatccggacttgatcaggtacattggctgggattgggcccgtatgatgcttatcctaataagcaagctgctcccatattgggcgtatggggaggaacagcgggaagttcggatgtgacgggaataaaagcgatgcgttggatggaacgtgccggagctgaaggaaccatacatgtttcaaactccggttatatggagaatgacgcaatgtgcccggaaagaacttatattttatcaggagtattcggccgtccggagaaaggacgtcgtgctgaggaatctgttccccaacttcgtacagatacaggaaagccgtttgttggcgagttcagtattatgttgaaggcagttcgctagattgttttttgaaccggtggaggattttccatgttatagttttcaataggtatctctgatataaagttaaacaaaagtgagaaagtatgtgataacggttgtctgtgatagatagccgttatttttttatgtgaatattatgatcaggatatacctcacgatgaaaaagcacattttcaacatgcgttaaaaatgtgtttagcgtctgtaggaaatgcgttcgtctcacgttggagaaccgtccggcacccgttggacggtggatttataaggtaaccttcggcatttgttcagcttgcattccgcattacatctgtatatgtaaggtaattaatgcttaaaataccaacgggacatatattggttttatcgggaaaagtacattgtttttaaatgtatcggctgttgatggtattttatccatataaacatgaaaaattccatgtttttatgctgttttatgtgattttctccattgcgtcattctcctttaggctatacttttacatgccgtttttaaagactgatgctctttaccttggagtatgaggataataaggcaactatcataaaaaaggagttaatttaaagacaaattatatttaaactttaattttttgtacaatgaagaacaatgagaatcagaagaatgtctgttgtatgctgtctaaatgggcatttttatttcttttgtgcgtaatgttcacattaggaacttttgcacaagacagaacagtaaaaggaaccgtattggatcctatgggagaagccattattggtgctaatgtaatggtcaagggtactgctaatggtactataaccgatatagatggaaatttttccttgtcggtttctgatgatgctaaatttttggagatatcttttattggttatgaaacgacttccgttgttatacctcagagtaatataataaagattactttgaaagaatcatcggtagttcttgatgaggttgtggctattggttatggggtgcagaaaaaagggagtgtgacgggagctattgctaaagtgaatgcagagaaactgggtgaccggcccatctctgatgtttcttcggctttgcaaggtcagatggcaggtgtggaaattcgtactacatctggcgaaccgggaaaggatattcaaatccgtgtacgtggtgcagcttctattaatgcagattcagacccgctttatgtagttgatggtattcctgttgataatcttaatagtttgaatcctagcgatattgaatctatagaagtcttgaaggatgcgtcatcatctgctatttatggttctcgtggagctaatggagttgttttggttacaacaaagaaagggaaagaaggaaaaatcaaggttgagttctcagctaatgtaggtctccagcaattagagcgtaaaatggaccttctgtctgcagaagaatggattgaagccaagacttattataataatacgtcatacgttcaaaaatatgcggctcaaggggctactataaatgatgattgggatacgcgtaaggccattatcggtggtgttaattacagttatatgcttgatcctagatggactgaagccaattatggtggattgaaactgattgactggcaagatgaattttaccgtactgctttgatgcaggattatcaagtatcagtatctggtggtacccagaaaactaattatcgtttttctgtaggttatttggaccaggaaggaatcgctacgggtacggattatagtcgtttgaacttacgtaccaatattgaatctcaagtatcagatcgtataaaaataggtttgaatattgcaccgtctgtatcttggtctaatggggggcgtgtggatggaaaggattcgcagtcacatattgttttgtcggcaacacctgttgctgagcctgaagcgggtttatatactggtgctgaaccttatgaaagatatatgtgggcaggtggggcggtcagtcctatagcttatatggaagagtcaacgaatgctacagatattgtccgtattaatgcttccgcttatcttcaggcagatttgggacaagggtttaaagctgaaataactggtgcgtggaattatttcaataaagaaaaccgttcttttgttccaagttctgtgacaaagacttggaaccaaggagaggggttgtctaccacagcttccagaagcaacgataggagtaatgatatcatgcttcaggctctgttacattataatcgcgaatttggaaagcacacaataggagctatgttaggatattctatggaagagtccaaaggttcctcttcttcgttgaaagcaaagcaatttcctaataattcattggaggtgtttgatatgtcatttgctacgataagcggtgccaaggcggatttgactactcctgttcgtttgttgtcttattttggacgtgttcaatatgattatgctgatcgttatttgttaacagcaagtttgcgccgtgatggatcttctaagtttggaaagaatagtcgttggggttggttccctgctatttctgctgcatggcgtatctctaatgaggcgttttggtcggacaatttcatagttaattctttaaaacttcgtggaagctggggtatgaatggtaataactccataccgtcaaatgccgctcttagtgcattgtcaaatgctaattatgcatttaatggttctctgcattctggtttctctccttcatcagtatcaaatccggatttaggctgggagaaaacacatagttggaatgtagcttttgatatgggaatgtttgataatcgtatttatctatctgcggattattatgtaaaacgtacaaaagatttattgtataaagtggctgtgccttctttgttaggttattcgacggcatgggggaacattggcagtttggagaataagggatttgaagttgaactttctactcaaaatattgtaggacgttttaattggtctacctctttgaatttcggtttgaataaaaatgaaattataagtttaggtgctgataatgctactgtatataccggatattccaatactcaagttctgcaagtgggaaaatcattaaaagagttttatatgtataaagctattggcgtttatcagaagcaatcggaaatagatgatcctgatatagcgaagatgaaagggcaaaaggtgggagatgtccgttatgaggatgtcgataaaaatggaattattgatgaacgagatagaacgtatgtaggtcatccttctcccgatttcactttcggtatgacaaatacgtttaggtacaaaaactttgatttgtctgtgttggtgacagggcagatgggaggtaaggtatatggtctgataggtcgtgccattgatcgtccgggaatgggagttggttctaatgctttgggacattggagaaatatgtggcgttcggaagaagaaccgggagatggttctacaccaagcattttcagttcgactactagtagcctttatgatacacgttggctatatgattcagatttcattaaaattaagaacattacaatcggttatcagattcctgttcgtaaatatattagttatgctcgtgtctatgcttctattgagaatgtgtatatgtgggataaatatgatggcggttattctccggagtctaataatggaggttcgggtggtgattatgattatggtgcttatccacaggccagaactttctctttaggtgtaaacttaactttttaatatgaaaaacagaaactattatgaaaataagtaaatatatattagggctttcattggtagcaactttgttgtttgcttcctgtagtgattttttggatgtcgattctagaaatacacaaactacggatactttttataagacagaaggtcaggctgatcaggctttgacaggtttgtatcatgaccttcttcctatgtctttgtattctttgatgttgtctgaagttcgttctgataatacgtataaagagaatgatggggcacaacgtgatttttcttctattggtaaatttgaaaagaatattgcgaatttatccatattgagtaatgcttggaatgattattataaactggtttctcatgctaatacttttttggaaaaggtagaaaatatagaatttgccaacggggatattaaaaaacaatatataggcgaggctcatttcctccgggccttggcttattttgatttggtccgttattttggacgtattcctattgttactaaaactatatctcaggcagaggcgctcagtttgcttcaatccgaagcggtggatgtttatgaacaagtcattatccctgatttggagtttgcttgtgttaatttgaataatactccgaaaaattatcttggaaagaacgtggaaggacatgctacccagattgctgctaaagccttattaggacgggtttatttgacgatggccggcttcccgttaaatgatgtttcgaagaaagatttagcaaagtctttattaaaagaggtgatagattatgctgaagctaataataagtattgggcgaagacgagtgaagaatggaaacgtatatggattagtgataatgataataaatatcatatatttgaaatacaatatcaaaatggaggcttgggtttaggcaatcggatggtctttgaatcttgtcccggactctattcagcctatactattgtgagaatctttggtaatcacctttattgtgaacgtcaattgagcaaggagtttcaaaaaacatataatggcgaaatggatgcacgttgtctggctaccattgataccacaaagtttgtaaatacagatggagcgacacctataaaatatacaggtgatgacttttatgtcaagttcttggagcataaaatgaaaaggaatcaattagggtatagtgatattgataattctatagtggattataatgactggcctataaatcatcctataattcgtttggaagatgtgatgttgatgtacgctgaaattgtgggtcctactacagaaggactggatatggtaaatagaattcgtacaagagccggtatggatccgattccttcttgttccgatgatgagttccaaaaatatgtagatagggagcgtaggcttgaacttgcttttgaaggtatacgttggcatgatttagtccgtcataataatttgcaggctatacgtgatatgtatattcgttatgcaacagatgaagaaacaggcttagtaaaccctgatattttggctttagtgcagaatgtgcaggataatatgtatatatatcctatacctgaggcgcaaatgaaagtgaaagatggattatatattcagaatgaagcatataaatagattttttgtcttttgtttccctatttgggggaggtaagaaattgttgtgaattaatttgtgaaaataaataaaaatagaaacaatgaataaaagacaatctataaaagtattaaggaggattgtaatgggtagtatccttacactaggatattctgcatgttctccatctcatccggatgtagcagactcggcaaccatcaaagaagcgtggaatgaattttccaatccgtcggattctgcacgtactaaggtttggtggtttcatggtgagacagagactactcgtgaaggaattactgcagatttggaggcatataagcgtgctggtgtaggaggagtggtttattacgatcaggtgcatggaaaaggcgagcatgcattacctgctttttctgctgaatggtgggaaatgttgaagtttgcagcatctgagacaaagcgtgtcggactttcttttgaaataaacctttcgaatggatatgtggcgggaggaccttggattacaaaagctttaagtatgcaacgtctgacagcgagtgatactattattagaggaaaacaacagtttgcagcggtattaccagcaccgggggatgatgagttttgggatattgcagtattggcgtttcctgtctctcaaaatcaatggatgacaaataatagtcagcgtccaaaggttacatgtaatttgccgggagtttctgctgaagatttctttcgtaaaaaaagcagattgacgactatacctccccagcagtctggtaagtctgtttatataaatctggattttgaaacttctttcacagctcgttctattacttatcgggtaagtaagcggagcaaggcatctaccggtgccatgaatgttccgggagctcctgctgatgaattttatggatcgagttatgtaaaacagccacctttagggcagttagaggtttcagatgatggcataaattacagtaaggtgtgcgatttaaaacccatttatcaagctgctgcttctcgatgggatcagaaaacagtttcttttccggcagtgaccggacggtactttcgtttgaatttacatgattggtgtcttgccggagatcaacgtcctgaaatggctttgggcaatgtcacattatcgtctcgtgcccgtatagaccagtgggaagagcgtgcgggcttttattccgaatatattttgaaaaacctgactccggcttatacggatgaggaggttattgattcgaaaactattgttgacttaacttcaaagatgggaacggatggaagattggaatgggatgttcctgaaggtgattgggtgattatgcgctttgcacatgagtcaacaggcggaccgtctaagcatggtcgtgcgaacttgaaaggcttggagtgtgataaaatgtctgtggaagcagtgactacacaatggaataattatgctgcgaggatgattgatacgctttccactatcaatttgaagcctgatggagtaattatggatagccatgaagcgggggctcagaattggactccgggatttgaacaagaattcctgcgtcgtaaggggtatgatcttttttcatatttacctgctatgatgggatatattgtgggctcggttgctgaaactgatgctttcctttatgatttacgtcgtactgttgctgatgtcatttctgataattattttggaactctccagaccttatgtaataaggctggtgtggattttacagcacaggcaactggtaacgggctaagtcttgtagctgataatctgcaagcgaaaggacgtgttcagaaaccgcaaggagaattttgggcaaagcatatacatggcagttatgatataaaggaggcttcttcggcagcgcatatttatggaaaacgtattgcttcggctgaggcatatactgatgctaagttcagccagtctttggcagaattaaagaatcttgctgattttgcttatgcggctcaggttaatgaatttgtagtgtgtgcttctgcttatcagccttggttggataaatatcctggcagtacaggaggaggacgccattattgtctgaatcggaataatacttattgggagtatagccgtcccttttgggattatcaggcgcgttgtgccggattgatgcggaaaggaatgcctgtggtggatctttgtatttatgtaggacaaaatccaccggtgaaattgctgacttatcgccttcccgaaataccggaaggttatgattgggatgtgtgcacagcagaagctttgacaactcgtatgtctgctcatggaagcgagattgcattacctgatggcatgtgctataaaatgttggttgtgcagcgtaataatgatatgcctttacacgtgttgcgtcatattgctcagttaattgaacaaggaggagtggtttatgctccccgtcccgatagctctgcttctcttaaagataaggtagactctgttgagtataaaaagattgtggatcaattgtgggggaaggaagacgttgtttcgggtaaacggtctgtaggaaaaggaacgctgtattgggggatgccattggcggaggctttgcatcaagcaggtattcgtccggatatgggtattgtaagcgggaagactccgacagataaagtttattttgctcataggcgcttggcggatgctgatgtttattttattaataatcatagtccgcgaccatttaaagacgaggtggttctgcgtacctctttatcgaatgcttcttattgggatcctgtaactggtaaacgatatgggttgccggctcgtttggtagcggaaggattacatgttaacattgcattgcttcctggtaaatcgggtttcattgtggtttctgatgacagtcaagaagaactaatgttgaaaccaacccgtgagaaagagcggttggaagctataaagggagattggcaggtttattttgatcctcgatggggaggacctggagaagtggtcttcccggtgttgacggattggacgaaacatgccgattcaggtattcgctattattcgggtacagccgtttatcgtaaaaaaattaatttaggaaaggctgcggcaaatgaagaaataattcttcgttttgacagcttgaattctataggacgggtttggttgaatggacaagaggtttcaactgtttggtgtactccgtgggaggcaaatctgactcctttcgtgaaaaatggcgagaataggttggaaatagaagtcgtaaactcgttgatgaacagaatgattggtgacgcttcgttgcctgaatccaaacgactgacttatgcctatcccgaaatagccaaatcgacagacggattggtcccttccggaattacaggtgaagtgtggttggtacgtcgctttttacaatgtattaattaaataattaagtttatgtcattaacaagtattatttgtggcatagcgttgctgaccataggtgaagttgggcctcagaacatgcccgataccatagaacctgttgaatcaccgtttgttatgcctttgtttgaacggcctgtttttcccgaatctaccatattggtaagaatggaacaggaaggtatatccactaaaccgattcaggaagctattgatagtatgagttgccggggtggtggaacggtagtagttcctcccggtgtatggcggacaggacgtcttatcttgaagagtcatgtaaatctgcatctttcggaaggagcggaattacatttcagtggtaatataatagattatcttccggctgtttttacacgggatgagggggtggagctttactctcttggagcttgtctgtatgctgatgggcaggagaatattgcattgaccggaaagggaaaagtggttggaccgcctaccagttgtgagatatataaacgtaatgagagtatgtctagtgacaaggggataaggaaaccgcttgccgaccgtatttatgatggaaagaatggtgaaggagtctttttacctaagacatttgcccctattaattgtaagaatgtctttgtagaaggtgttacatttgaacggggactgtattggaatattgtaccacaatattgtgaacacattgtgatccgggggattacagtgaacagtttcgggcatggacgtacggatggtattgatattgattcaagtaatgatgtactgatagaatactgttcgctcgattgccaggacgattgctataccatgaagtccgggcggggtgaggacggattgaaagtgaatcgtcccactagtaatgtcgttatacgtaaaagtatagcactgaggggagcaggcggtattgtgtgtggtactgagattgccggtggagtgagaaatgtatatatgcacgattgtgtttttgagggaacagaccaggcttttcgttttaagacccgtcgtccacgaggaggttttgtggagaatatatatgtggaacgggtgcgggcgaatgtgaaaagacaggctttgtattgcgatatgcttggttctgcccgttgggtaggtgagttggcacagcgttatccagcccgtgagataactccgcttacgccgtggtttgctaatatttccattcacgatgtggagattaccggatgtagcacattggtggatgtggctgcattaccggagaaaccggtgaagaacttttttttcggtaatgtcaaagcacattgtgatcggattggtaaaatatgcgatgccacaaaattctcaatgaaggatgtaaggatagagagttgtgatacagtaatgcgtattgataattgtgactatgcctctttctttgggttcagcaatgtaactacaggcagtccggtgaggatagaaaaaacgggaggagaatgtcgttatttaaatgtgcagacatatcctcttgccccagtcaattatcagtccattcgtcctggtgaagtgtggcttgataccgaaggaaagcctattcaggcccatgggtttcaagtgacttttcgtgaaggcaaatactattggtatggtgaggataaaactcatactctgtttggtaccaatcggatgtttggcggagtacgttgttactcatctaccgatttttacaattggaaagatgaaggaaggatcattgaacctgctgctgatccacattcacctttgcatcatagtcagaaattggaacgcccgcatattctttattgtgccaaaacaggcaggtatgtatgttggctgaaatcacaaagtaatgatgggcattttgttattctagaagctgaacattttatgggaccttatcattttgtccgcaatctgaaacctaatggctttgctgtgggggattttgacatgtatgctgattcagatacaggaaaaggttatgtttggtttgagcgccctcattgggagcagatatgtgctgaactttctgatgattatacaaatgtaaatggtcggtattcagaacattttgttggaaaggttccaccgtttacacgtgaggcggcagcacattttgtaatggatggtaaacattatatttatacatcagggacaactagttatactcccaatccttcggaagtggcgatattcgatgattatcatggtgaatatagggtgttagggaatccacacataggtgatgagtatgcacattctttttgctcgcagattacaagtgtaataaagattccgggaaaggatctttatgtagctatggccgatcgttggctaccgcatactaataaaacggatataccaaagaaagactggcagtcttttttgactcggtacaaggatcaccgtccttatcctaaagattttgcaactcccaaagtggctgacagattttatacgcttgttaatcctaatcaagatgtatataaagctacttatgtatttctgccaattgtggtgaaggatggcataccgatgatagagtggaaagatgaatggaaactggaagactatgaatagatgatttttcttttgttgatagggcacatccgtttattttttgtatctttgctaatatggcgtatgtcgggaaaatgatgtacgtcatatattttaatgcctggtatgaatctgattgaaattgtatgaaaacatatatttgtctgttatgggttgtttttttgtgtataggttgggaaatgcatgcatcggtagatgtacatcctgcttttatcacaactagtgacggattggcgaataattcggtacgttatctgtttcaagacagtaaagggtttatttggatgggtacattagatgggctgagccgctatgatggccattcatttgtgacattccgtccggaatcaggcgataaaatttctttggcaaatcatcatgtaaagaagatacaagaagatcgaaatggtttcttatggtttatcactgctccggaattaatgagttgttacgatttgaaacatgattgttttgttgattttacgggatgtggggaatatagacagccttacaataaaatattggaaacagctggcggggatatttggctgtggcatcatcagagcggatgtcgtaaaataatctgtaaagatgggattcattcttctgtatcttatacaaaagagaatgggaaattatcaactaatgcagtgaattccgtttatgaggatgaacagggagtgatttggatttgtactcagctagggttgtttcaggtgacagaagaggggcagacccgggctattcaagatagtttgtcttttgtgggggcgatgtcttttcgtcacaagattttttttgtaacctctgatggaggtatttatgaaaagtcttcaggtaagaatttgtttttgacagcccggttgccgtggaaactttctgattttaatacctatgaattctgtcgtttacagaacgattgggtgttttttactcctgagggtggagaggtgtttagtatgtctgagaaaagactgattcatgattcatcgcttgatatccgtttaggaaaatgtgagaaggataatttgaataatctgtggatttccaatgggaccggtcttgtgcattatattgatgtccggacacgtgccgtccggacttttagattaatgtctgatgaaaaagttaagttgataggggatgaacgttatcatatcatacaggatgttccacgtggactgatatggatatccacttatggtaatggtttgtttgtttatgattctcaaaaggaggagatgactcattactcttatcatgtggatgagttcaatcgggtgaattctgattttcttttatatgctatgggtgacagaaccggtaatatctggttgggatcagaatattctggcatcgctttattgtcagtgctaaatgatggggcaacttatatttatcctgaaaatgagaaattggtggatcgttccaataccatccgtatggttacgtgtatggagaatggagacgtgcgggtaggaaatcgtcgggggggattgtttgcttatgactgtcacttggatttattgcaaagaaattattatcatcttagtgtttttgctcttgaagaggatgacaaagggcaagtatggatgggaacccgtggggatggattgtgtataggcgatagatggtatgtgcatcgggctgatgatgtgaattcacttgcacataatcatatttatgatatctatagggactaccgggatagaatgtggattggaacgttcgggggaggactcgatttggctgtttatcagaaaaacgatttcgtgtttcatcattttttgaaggggagttttggagagcaagaggttcgtactattactgctgatcggaatcattggatgtgggtaggaaccaataatggtatttatgtattccatccggattctttgttgaatgattcgcggcaatattacgtttataacttggataatgggaaaatacgtagcaatgaaattcgtaacattttttgtgacagcaaaggacgtatgtggattggaactaccggtaggggcttttctgtctgccagtcaggacaaacttatgatcagttggaattccggcattatgatgaggatgacgggttggtaaataatgtagtccagtctatagtggaggatagagatggaaaaatctggctgggtaccgaatatggaatgtcccggtttgatccggatacggaggtttttgatagtttctttttttcagcgataatgcccggcaatgtctatttggagagtagtgcctgtgttatgaaaaacggacatttgctgtttggaacgaatcatggtttggttgtggtcgatcctgaaaaagtcatgccacagcatgtcgtttctccggtggttctcactgatttaaaaataaatggaatttctgttcgtcccggggatattgattctcctttgacagaggcattaagttatacaaatagaatagaattgaaatattatcagaattcattcagtatagatttctctacttttgactattctatggcaaatgatgccaagtatatttataagttaattccatacgataaagattggggagtcccttcctccttgaattttgcagcttataaaaatttgttgccgggtacttatcagttacatgtaaaagcatccagtgcttccggtgtatggggggaagatgaaaccgtattacagattgttattactccgcctttttggaaaacaggttgggcctttgccatttatataatgctgatttgtatggcaatgtatatgacattcagactaatccataagtttgctatcttgcggaatcgtattcaattagaaaaacagttgacagaatataagttggtcttttttaccaatatctctcatgagtttcgtaccccgttgacgttgatccaaggagccttggaaaaaatagaggctatgggtaggggttctaaagaattggcttatcctataaaagtgatggatagaagcacgcagcggatgctcagattaatcaatcaattgctggaattcagaaaaatgcagaataataaactggttctttcattagaagaaacagatgttatcgtttttctttacgatatatttctgagttttagggaaacggcggaatctaaagaaatggaatttaaatttattccttctgtcagttcttatcctatgtttgttgataaaggtaaactggataagatagtctataatcttctgtccaatgcatttaagtacacaccggagggcgggaaaatagtttgttcggtagatgtggaagaagaaacaaaaaaattgatcatttccgtgtcagacaccggtattggtattcctttggagaaacgcgggcaacttttttctcgatttatgcaaagtagtttctctggtgatagtatgggaatcgggttgcatttgactcacgaacttgtaaatgtgcataaaggaagcattgaatatgcggagaatgaaggacagggttctgtttttacagtcactttgccattggatagttctgtatatgagtcaaaagattttttgatctctacagccttaatggaagaaacggatcatacagacgaaggcattccgtgccgtctcgtaaaagaagaacagatggcggctcctttaaacaagaaaaagatattgatcattgaagatgatactgatattcgtgaatttttgaagaaagaaatatctgtttattttgaggtggtagccgaggctgatggtgtggcgggttttgaacgtgcacggacttatgatgctgatctgataatatgtgatgtcctaatgccgggaatgaatgggtatgaagtaacccgtaagttaaaaaatgaatttagtaccagtcatattccgatcattctgctgacagcaatgggaactaccgaaaataaattggaaggagtagaaagtggggcggatgcgtatgtaaccaaaccgttcagcttaaaattgcttttggcacggatggttcaattgattgaccagcgtgaaaagttacgtgagaaatatgtgaatgatcccagtatagagcgaccggctatttatacttctgataaagataaacagttccttgataaattgcaggctattatagagcaggagttgggaaattcggaatttacgatggaagactttgctgcccggatgaaattggggcgtactgtattctctaagaaagttcgtggtttgacagggcatactcctaatgaatatttccgtattattcgtctgaagaaagcggcggaattattgttggaaggtaattataatgtgagcgaagtttcttataaagtaggtatcagtgatccgctttattttagccgttgtttcaagacacactatggcgtgtctccttctgtttatctgcgtggaaaagagaaagaaatatagagtgggcaacctttattgtataatcgggcggtaaatatcagttcgtttcttaaaaagcttaaagtgtataaatttccatgttaatgaacaaaaatacattttgtggctttataaataacgatatatttgtaaaatactgcttgaatatttcagattgaaagaaataagatactcattttaaatttaagaccatgaaagaactaaagatgtacatcgatggacgattcatcgaaaaccaatccgataagtggattgatgtattgaacccttctacggaagaagtgatatctaaaatgcctgatggcacaccggaagatgcacgcgcagctataaatgccgccgtgaaggcacagctttcttgggaaagtcttacttctattgaacgcgccggctatttaactcggattgcacaaggtatccgcaagcgggaacaggaattgactgatattatcatccgggagggtggaaaaacaagaggattagctaatgtagaggtgttatttacggctgattatcttgattatatagccggatgggcccgtcgttatgaaggggaaatcattcctagtgaccgtcctcacgaaaatatatttgtctttaagaaacctattggggtgacaacaggcatcctgccttggaattttccttttttcttgattgcccgtaaggccgctcctgctctgttgacggggaatacaattgtggtaaagccgagtcagctgacaccggaaaatgcatatgttttcgcacagattgtagatgaagttgggttgcctaaaggtgtattcaatctagtaaacggtcgtggttcggtgataggacatgaactggctgctaaccctaaagtaggtatggttagtctgaccggaagtgtggaggctggaatacaaaccatggcagccgcttctgccaatgtgacgaaggtttctttggaattggggggaaaggctcccggtattgtaatgccggatgcagatttggatttagctgtaaaatccattattgcttcgcgtgttattaatacaggacaggtatgtaattgttgtgagcgcgtgtatgtacattctagtataaaagaggctttccttgagaaactgttggcaggattcaagcaggtgaaagtgggggatccgaatcagtatacagacctcgatatgggtccgttgattgatgccaaagcactgaaatcagtagaagagaaagtgaaaaaagctattgagcagggagctgagttgctatgcggtggtcatcgtatcggtactaaaggatatttctttgaaccgacgattttgattaattgtacccaaaagatggatattattcaggaagaaacttttggaccggtacttccggttgttgagtttacagaggtggaagacgccattgcttgggctaatgattgtgaatatgggctgacttcttctatttatactcagaatctggatatggcatttaaattgattcgtgcgttgaaatttggtgaaacttatgtgaatcgtgagaattttgaagctatgcagggattccatgccggatggcgtaaatctggtatcggtggcgcggatggtaaacatggtctggaagagtatttgcagacgcagctggtttatttggagactaaagggtaattcttataattattctatgtaggattatctcgggatataattcgtattttatgtctcgagatacatcttgttatatgatggatatttattattgatttggattgatactttaagaagtatagagtacaaaatacttgttgtttcgtcctgttggaaaaggtttattcatcataaaacagcatgctatgaaattatttttttctttcgtatttgccttattggcttttactacttgtacaaaacctgacaaggaagtctatatcttcacttctcatcgtgagccggcattggacgggttacattatctttacagctatgacggttatcattgggatagtattgcaggttcatggctgaaaccggaaataggaaacaagaccccttattataattatttcactaaacagaccgaagaacagaaatatgctcccaattcgatgatgcgtgatccgtccattacccaaggtccggatggaacctttcatttggtgtggaccatcagttggaatggggaacaaggatttggttatgccagttctaaagacttgattcattggagcgaacaacgtgaaatcaaagtgatgaaagactctttgactaacaatgtgtgggcaccggaagttttctatgatgatgaaaagggacagttcatcgttgcctggtcctctgccattccagtagagagatatacggcagccgatagtttgggagctaataaaagtcaccgtgcctattataccacgaccaaggatttccaaacgtttgctccggcaaaggcattttatgatcccggatttaattctattgacggatttatagtaaagcgtgataaaaatgactatgtattaattataaaagacaatcgtaagcctggttacagtgatctgttctgtgtgtccggaccatcggcggaagggccttatactagtccgtcaacgaaatttgcaccgacttattccgagggaccgtgtgccgtgaaagtaggtgatgaatggttgatttattttgatgtttatcgggaaggtcggtttggagccgtagcgacaaaggattttaagacctttactcctatagacaatcagatttctattccgcaaggacataagcatggtactattataaaagttcctgaatcagttttgctgaacctgaaagcggaggaagctaaaagattccctcaaaaagactagttattaccctgaattgtttacttgaataagttactttgggctttgaaatttatatgataaatgcgcaaatgaaaaacaagaatctggtattatttgttcttctctttttgttggggggagaattgacttcggcgtcagcccaaggaaagtccgggatctataaaccttggagccatggacgactgaaagtaagtaaagaaaatcgttatctgatgaatgcggacggaactccttttttctggttgggggatacaggatggctgttgcccgagaaactgaacagggatgaagctgcttattatctggaacattgtcgtcaggcaggatttaatgtggtacaagtacagactataaatggagtccctgctatgaatttctatggtcagtattccatgatagatggctttaactttaagaatatagacagaaaaggagtttatggatattgggaccacatggactatattattcagaaagctgagcagaacggtatttatatagcgatggtatgtatctggggaggtttggtacgctccggaaagatgaatgtcgaagaggccaaggcgtatggtaaatttttaggtgaacgatataaagatgctcctaatatcatttgggtaatcggtggagatacatacgccgaccggaataccgagatttgggaagccttggcaaacagcattcttgctgtggacaagaatcatataatgacttttcatccgtttggccgtacatctagtgctgcacatctgaataataaggagtggatggatatgaatatgttccaaagtgggcacagacgctatggtcagaaaaaaggagatggtgatacttctgtaaccggattggaggaggacaattggcgttatgtagaagatgctttgtctatgactccattgaagcctgttttggatgcagaacccagttatgaaggtattcctcagggattgcatgatcctgcccagccactctggcgtgactgtgatgtaagacgctatgggtattggtctgtttttgcgggttcttgcggacatacgtacggacataacaatatcatgcagttcttgaaaccgggtacaccgggtggatatggggctgatggaatagagaaaccttggtataaggcgatgcaggatcccggcttcaatcagatgaaatatctgaagaatctgatgttaactttcccttattttgaacgtgtaccagatcaaagtgtgattgccggtacgaatgggaatcgttatgatagagccattgctactcgcggaaaggattatttgttagtatacaattattccggaaacccgatgtctgttgacttgactaaaatcagtggcgcaaaaaagaaagtatggtggtatagccctaaggatggaaaactttcttttataggggaatttgatagtaaaattactccttttctctatgatggcagttataaccgagataatgatcaggtattgattgctgtagattcaaataagaattatatttctaccaaatggttcgaacttcccatggtaaatcaatagtgttttgaggaatacagccaaaaagtcttattaagtcttaatgaaacgggaaaagtcaatgcggaaattgtaattttgaaaaaacacatttacaaatgaaacgcattggctttttcttattcttttgcattctttccttgtatggtctggcacaagctgaaaatgacaaggatacgctcatcatccgacaagataaaatcaatgaatttatcaatgagatgaatgaggttgataaaagtatggattttataaacgaacctcctacattgacacctcccgttttatctgatacgctgcggatgccaaaatttgatttaactcctcgtgaagaaatgcctaaaatatctccctatactttttccgggaatcctttcggccatgattatatagatggacgtgcttatcagattaataatacagggattctgagtggttatcattcatttcaaggattgccttctataggcgaggcacgcaatgtcggggtgatgtatacccagcggctcaatgattttataaccgtgacaggaggagcatatgctgctaaatacaatgtatatggagtccgctttaatgatttcggtggtaagggaaaattgtcttttcgcattaatgacaggatgaaaattaatatgttcggcacatattctgtgtataatggatacggcatgactccggcctctcagctttttatgaatcaaaattcatacggaggtactttggaattcaaaatatcggatagtttcggtattgaagcgggggcagagagggaatttaatccgatgacccgcaaatgggaaacccatcctattattatgccggtattctataaatgataaattgtgtatctttacggcatgaatgaagaaatagcagagtattacgaagaattatacaggctttatatagacgagaaccagccattagaacgccgttacagacaattgcgtgaatcattggagcgtgtggtgcgtgaacggatacaagggaatagtttgcagaccactgatttggccgcccgtattaattatgtagccactcaatatgaactggatataaaagagcagaaccagttacatacatttcgtttgacttccaatgatattttgaatcatcgtaagtttcctgccaaagaagagtttctacgtgatttacgtgcagtggcttttgcgtataggaagatgtttgcacaagatattcctttgaaattattctcggttcttcctaaacaagaaataacatctttagggaaaaaagaaaagaaggaatacatccgtcgtatacgggtatgctttgattatgccgatgatacctatctgtatgtacatcctgtagatataatagctgatgaacctattcgggttgtttataataaacccggtataaaccatgaatttgaagaaactataaaggaactttggcgatatgcccagcttaatcttttggatgtttttgtagatagggaaggaatttataccccttcttttatcgtattggagccggattatctaatagatatcagttcactggcagaatgctacaaggattatggcagccatccggcaaattactttttaagccggttggttccgattgataacgcccggcctttgctgctgggaaatatagccaatctttttctggatgaatggatacatgcaggtgaggaggaaccggactatatagactgtatgaagaaggcgttccggcagtatcccatcgaactggctgcttgtgccgaacttcgtgacccgtccaaagagaaagagtttgccaaggattgccggatgcactttgagcatatacgggatatcgtgcagcatacttttctggaacctggttataacttggataaaaaggatgctgttctggaaccgtcttatatttgtgaggcattgggtattcagggacgtttggactatatgcagcgggatatgagcagttttatcgaaatgaaatcgggaaaagcagatgaattctccatacagggaaaagtggaacccaaggaaaacaacaaggttcagatgttgctatatatggcggtactggaatacagcatgggacaggaccggcggcgtatgcatccctatttgctttatacccgttatcctttattataccctgccagagcatcgtgggctcaggtaaggcgggttatcaatctgcgcaaccgtattgttgctgccgagtatggggtacaattccataatcattctgattttacacgaaatttgttagcgcaaattaatccggaggtaatgaatgaaagaaagttgcgtggaagattctgggaacagtatctgaagccttctatctcacgtttccgagaaaaactgtcggcattggaacctttggagcaggcctatttctatacgctttataatttcattacaaaagaactttatacctccaaatcgggggatgtggattatgaaggacgtgcaggggcttcagctctttggctgagtacactggatgagaaacgtgaggcaggggaaatattatatgatttgcagatcattgagaataaggcgtcacaggttcataaggcttatatactcttgtccattccgcaatatgacgaaatgtttcttcctaatttccgtacaggagatgtggttatattgtatgagcgtaatcatgattcggataatgtgaccaataaaatggtttttaagggtaacatcgagcagattacagatacagagttgcgtattcggctacgtgccacacagcgtaatgtttcggtctttcctccggacagccgttatgctgtagaacatgatacgatggatactacatttcgcagtatgtatttgggactttctgcttttctggatgcgaatacggaaagacgggagttgttgctgggacaacgttccccccgctttgattcgtcttttgatgaagctatagcgcaggtcggtgatgattttgagagagtggtgttgaaagcgcaagcggcccgtgattactttcttctggtgggacctcccggaacaggaaagacttcaagagcgttgcgtagaatggtggaacatttttatgcaacatcatctatgcagatattgttactagcttataccaaccgggctgtggatgaaatatgtcagtcactttcttctataacctccggtatagattatatacgggtgggaagtgaactttcctgtgatgtacgttttagaggacatctgttggagaatatattggcggaatgtaacagcaggcgggaggtgaatacccgtatgacagattgcagagtgtatgttggaaccgtggcctctattgcggctaaggctgaactttttaaattaaaacgttttgatgtagccatagtggatgaggctacccaaatattggaaccccaattgttgggtattctgtgtgccaagtttgccgatgaaagaaatgcagtcggtaaatttattctgataggtgatcataaacagttacctgccgttattttgcagaatagcggacattctgaagtgcatgatgaggggctgaggaaagtcggactttttaatttaaaagattctctgtttgagcggctttatcgttttcatttaaaagaagaatctcctaaagcgatagatatgctttgccgtcaggggcgtatgcatccgggagtggctttttttcccaataaagcattttatgctggaagattggaagctttgggactacctcatcagttggaacacatagaggctccagtacgttttattccttcggaacaggatttggagagcatttccggaaagacaaaccaatatgaggcacggattgttgccggtttggccagagaggtgtatctggcttatgaagaggaatttgatccgaatcgaacgttagggatcattactccttatcgaagtcagattgctttgatacgtaaagagcttcagacattggctattcctgctctgagtaggatttccattgacacggtagaacggtatcagggcagcgaacgtgatgttattatttattctttttgtgtgaatcacctctatcaattaaggtttctgcctaacctgacagaagaagacggcgtacagattgaccgtaagctgaatgtcgctttaacgcgtgcacgcaagcaactttttatcacaggagtccctgaaatattaaatcataattctatctatcaacatcttctgaaaactatttattagggaaaacacaccacagactacttagatgtgtagtctgtggtgaattctttaattaggcatcaaccggtttgtatttgggaaccaatgctttcatgataatccaaccaactaaataagctacggcacatacacagaatatgatgaagtagccggcaggtttcccttcgaatcccataaaagtcatattcgtttctgctgcatagtcaaacagtctgcctgatcccatattaatgcagaatgaacctataccacctgccataccaccaatacctacgatagtagcgatggtgcttttggggaacatatcgcctactacagagtaaatattagcagaccatgattggtgtgccgcacctgcaataccgatgataatgataggataccaatatgaataattgcctaaaggttgggcaaacagtgccagcaatgggaacaaggcaaagataagcatagcctgcatacgggctgcatacggattcttaccagttttgttaatgataatagtaggtaacttaccaccataaatagataacatggtgatagcgtataatacgaaaatcaacatttgtgcagtacctgtgtctgaggcgaaaccatatacatccgaaatatatgccggagtccagaaaaggaagaaccaccatacgccgtcagtcatgaatttaccgacaaatacagcccatgtttggggaaatttgaaacattgcaagaatgaaatcttcttgttgtcaaagtcgttggcggcagcttgttgtgctttagattcttcaggattgttgttgtcttgttcaatatattccaattcggcagcattcacgcgagggttgacattgggtttcttgtagaggaacatccaaagtcccatccagatgaaacctaagccaccgataacgatgaaagccatttcccatccattacccacaccaatgctttgaaaataacgcgccaagggaggaatagtgatcggagcagctaacgcgcctactgtagagccggcattgaagatggaagtggagtatgcacggtcctttttcgggaaatattcggctgtcaccttaatagctgccgggaagtttcctgcttcacctacacccaatacaattcgggcagcaataaagtaataaacgctggtaatggcgatagttgaagcgacagctcctgttgcagaaagcatttcttctgcattatgaatacctaatgtctcttcggtagcccagccgcacaatgcatggagacaagctcctaaagaccagacgaagatagcccaaagataaccttttttagtccccatccaatcgatgaaacgaccggcgaacaggttggcgatagcatatactatagaaaaaatagctgtgatatctccgtaattcgaatccgtccagtgaaattccggagcaatgaagtctttccaagttagtgaaagcacctgacggtcgaggtaattgactgtagtggcaaagaatagcagaccacagattatccatctgaagtttgtcatcttctcacctactttttgaaatgtactcatgataatagatttaattatgtttttcttattagacgcaaaaataaccattctgtacctattctctatgcaaaaattggtggaaagcctgtataaatcggtacaatggtaagatttctaaaaaaacattccgaatgtcgcaaaaaacctaaaaacgggttgatttcttgcaacattcagaatgacaagagttaatgagtaatggtgtgtaccattctacttatctcatatctgtgtattttatttcatccttgtcactgtatttcaggttttcacctcccataccccaaataaaggtatagttgctggtacctgcagcggcgtggatagaccattccggagaagtaatggcttgttcattatgtaaccataccagacgttcttcttgcggttcgcccatcaggtggcaaatggcatttccttcaggcaggttgaaatagaagtaggcttccatacgacgggtatgtgtatgggccggcatggtgttccatacagaacccggagccagttcggtaagtcccatctgcaattgatttgtaccaccgttttttactctttccagcacatcctttacaattaattggtttacaatacggtcgttgctgtcttccatttttccataatgatctgaaatggccaaagcatattgtttaggatttgctttttgaagtttagcgtcagtagtgatcaattgagtaacgtatggtttgtaagccggtgccgaattgatatagaatttggccggtttggtagcgtcattacttttgaaagtaacctctttatttccgcaacctacatagagtgcttccttgtatttcataggatattctttaccgtctacagtaaccacaccatcaccccctacattgatgacccctagttcacgtcgttcaaggaagtaagtgatttccggacccagttcgcggaaagtttctaactttagtattttgtttactggcatagctcctccgtagataagacggtcataaagggtgtatgtaacattgatttcatccggtgccatcaccttttccatcataaatgagctacgaagacgttctgtatcatagtgtttcacatcttgcggatggcaagcggtctgtactttgtaatttacttgagctgaagctgccaaagcagaaacactcagcatcattgcaattgctaattttttcataatcgttatctttaaattttaatttttcattgttttctggtatttaatgatggaacgacggttcagcaccattaagaatagtgttatcagtactaaaattccggaaccaatccatttgaatgaataagtcaaatggaaaatagcccatgagaaaggacttgaagcaaagtccaacgctcccccctcaaaacccgacggaatatttacggcggcatcttgtgtcttggcatatacgtcatgtgccgctttggtaaagtaaggtgccagatcagttacaaaatacagaccgatggccagcacaacaaaaccaatgatgaaggtttttaccacatttccttttgtgataggtaataccaacgggaatacgtagaacataccggctaacgaggccaatggcaggaattcattacccggaagtacaactgccaataaaatagtaacagggattaatagcaatgatacaactaatgtggccggatgtccgataaccaaggcagggctcataccgatattcaagcctacagcacctttaaacttcttggcgatcagttcgcgggtagcgtccgaaatgggtttcaatccttcgatgaataggctggtaatacggggaatcaactccattactgctcccatcttgatacctaaacctagaatataaggaatcttgtctactatttcttgtccgtttttacaagataatgcaccgatgccacatcctaccaggatacccaggaagagaggttcgcctagcaaaccaaatttctttttcataccttccgcatcaatattcagtttttcaaatccgggtattttgtccaataccttatttataataagagcgaatggcacaaaacctgcacagaaaggttgtggaatagaaattccttccatcttatcatagaaaccttggaacttgtctgctgtgtaatctgctaagattaatgtgatgatataacagataacagccgcgaagaagccccacaaaatactatctgtcgcaaaataaactacggctccgatgaaagcaaaatgccaatagttccataaatcgatattgactgtacgggtggtcttggtcaatagcatcagaatattgacagccagacaaaccggaataatgaatgcccctacggaagtgttataagccacggctgcggcagcaggccatcccatatcgaatactttcagttgtaggccatatatttcgaccaccttgcttaaggccggtcccaggctgctggtcagaagtgcggtaaccactgataaaccaacgaaaccaacacctaccaacagaccgctttttaatgctttgctgaatttgattccgatacaaacgcctaagattgtaaaaattataggcatcatcaccgctgctcctaaaccgatgatataactaaaaacttgttccattctcttgtgaattaatagtaaatgactgtgttttctacaatagtataaattaaaaactgccccaaaaataaaaccttttctcaacttatcaaacctgaaaggcataataattagtaaaaagacaatttttgaacgatttttatcgttatcgtgcacaaaaataaccgttttcgcacacgaataccaaataatacacttagtaggttgaaaagtgcacactgcttttcgagaaaaatactacttttgtttcataaaataaataggtctaatactaaaaataaacgtcttcatgaaaaagaattctatttgtaaaattattgtgtccggtttgcttacggctgttcctttgatgggcatggctcagcaggtttgtggtaataagccttggtctgtacgtatggcggaatcagagatggtgcgttgtcccgaatcctggcaattggattttcagacccgtttgaagtgggattactgtcatggcctggaacttcaagctatgctggatgtatatgatgcatacggtgataagaagttttttgattatgctgtggcttatgctgatacaatgattcatcaggatggctctatcgaaacttataaactggaggaatataatattgaccgtctgaattccggaaagatgcttttccgtatttacgagcagactaaggacgagaaatacaagaaagcattggatttgttgcgcagtcagttggatacgcatcctcgtaatgccgatggcggtttttggcacaagaagatttatgagaatcagatgtggctggatgggctttatatggggcagccgttctatgcggagtatgcttaccgtaacaaccgtgtgaatgattatgctgatattatcaatcagtttgttacagtggctcgtcataattatgatccgaagactgatttataccgccatgcatgtgatgtgagcaagcgtgaaaagtgggcggataaaactaccggattgtcacaacattgttggggacgcgccatgggatggtatgcaatggcttgtgtggatgtacttgattttataccggaacacgaagccggacgtgaatctgttatcgaaatattgaataaactggttgcccagattaaacgtactcaagatcctgcaacaggggtatggtatcaggtgattgacagaagtggggatgaggggaattatctggaatcctcttgttctaccatgtttgtatatactctgttgaaagcgttacgtaagggatatatttgtccttcgtacatggaagtggctaaaaaggggtatgaagggcttttgacccagtttatagaagtggacaataaaggggtagtttctatcactaagggttgtgctgtcgcgggtttgggaggtaagccagtgtatcgtaccggagattataattattatataactgaaaaaatacgttctaatgatgcgaaggcagtaggtccgttcattatggccagtctggaatgggaacgtttgtttcagaaaaacaattgtggaactgcatgtaaataatagggggtgatacgatgaggaaagttttaggattattgttgctgttggttgctgttagtggaacatgggctcaggaacgtcaggatacaattgtagtttcacgcgatggaacggggaattttcgtactttgcaggaggctatagagagtgcgcgggctttcatggattatactgttacgatctatgtgaggaacggagtatataaggagaaagtgattgttccttcatgggtggaaaatatagatattataggtgaagatcgtgataagacgattattacttatgatgatcatgcgaatataaataaaatgggtactttccgcacttatacggtgaaggtagagggtagtgatatcacttttaaaaatttgactattgagaataatgcggctcagttgggacaggcggtagctttacatacggaaggtgaccgtttgaaatttatcaattgtcgtatcttgggtaatcaggacactatttataccggtgctaaatttacccgtctttattttaaagattgttatattgatggtactactgactttattttcggtccttccaccgctttatttgaagattgtattattcacagtaaacgcaattcgtatgtaacggctgcttctactccgaaagaggctaaatatggatatgtctttaagcactgtaagctgacggcagaaccgggagttgataaagtgtatttaggtcgtccttggcgtccatatgcttataccttatttatagaatgtgagttggggaaacatattgtttctgccggatggcacaattggggcaagcagtctaatgaagaaacagcccgttatatggaatataaaaataccggtgagggtgcaaatgcttcggaaagggtggcatggagcaaacagttaacaaagaaagaagctgaggcggtgacggtcgatgctatttttcgtactcaaagtaattggaacccaatagactagattgattttgtaattgcttgaaaaggagacttctacgttggtggaggtctcctttttttgttgtgttgaataattggaacccgtgaaaaatacctaataaatccacataaaaagataaaaactacacatcaaggtaacgttatatacgtaattttgcaacagtgaaactaaggtcaaaaccttaaaaaaacattttaataactataaaaacacatcttatgaatctaaaagaattagctagaaaagctatctcaactctctttttgagtatgctttgtttggttgcttttgctcaaaccgcaacaggtttggtgaaagacaagacaggcgaacccatgattggtgtgaatgtattggtaaagggaacaaccaatggtacaatcacggatttcgatggtaagttttcaattccggatgttccgagtaatgctactttagtggtttcctatattgggtatcttaccaaagaggtaaaatctggaaaagatttggtcattgtattggaagaagataacaagactttggatgaagtcgttgttattggttatggtacggtgaaaagacgtgatttgactggttctgtcgcttctgttaccggggaaaaattagcggctaatccggttgccaatgtcgcacaggctttacaaggacaattgcctggtgtgagtgtgacttctcaagacggtcgtccgggtgcaggtatgtctattcgcattcgtggaggtggttctattactcagtctaatgatcccttgtttattgtagatggtgttcaagttagtggaattgatgatattcctgctgacaatatcgaaagtattgatgtgttaaaagatgctgcttctacggctatttatggtgctcgtggtgctaacggtgtaatattggttactactaagggaggcaaggatggccgggtttctgtcaaatataatatgtattatcagatgaaggagaatccaaaattattggaaactatggatccttatgattatgtatataatacatgggcatatatgaagagtttgggagattcttatggtgatggagttgccagatattttggattaggatccaagtatggaaatcatttgaatgaatataaaaatatgaccactcataattatataaatgatttgatgcagactgcgtcttcttggaatcatgatgtatctttatctggtggtacagacaaaactaagttttattcatcagttaactatatggatgatgaaggtatccgtgtgaagtctggtttccaacgttggaatgcgaatttcaaattgacgcaaaaaattaataaaaagttaactgcggactttgatttgcgttatagtgaaatagaagttaatggatcaggttttggtaatgcaacctctgcttacacttatcgtcctgtggataatcctttgggtgatgcttcttttaccgctggatttggtcaaggtgatacaaatatggaagaaactagtaatcctttgtattacttggatactgtagattatataaaaaacatgtaccgtatccgtgcaaaaggtgctttaacttggaatattattaaaggcttgacggcaaagacggaattatcgttaaatcgtaattggaaccaggaaaagacatgggatgcaggacagacagaaaaagataatagttctgctaaattgaagaagagtgatggttacggtgtgcgttgggcaactactttgaattatgaagtacaggggcttggagatgatcataatttgtctttcttggttggtaatgaagtcttggcttcaaagtcagattacactgaaatatatggtgtagggtatcctgaaggatttacaatggatgatgcgtttggtatgattaatatgactactccttcattgggacaagattattttaaaggtgagataggtactcctaatcatactttatcttggtttggtcgtgctaattattcttataaaggtaagtatcttttaacagctacattccgtgctgatggttcttctaaatttgcacctagtcatcagtgggggtatttcccggctgctgcggctgcatggagaatttcagatgaagcttttatggaaaatacaagagattggttggataatctaaaacttcgtgtatcgtatggtacttctggttctgataatattgatgcttctttatggagagaaacatggaaaacagaacaaattacagtggatggtgaaaaggtaaccacttatgtacctggtgatatgaaaggaaatcctgatttgaaatgggaaactactattagtcgtaatttaggtgttgattttggtttctttaataattgggttcgtggtagtttggactattattggaatacgacaaagaatattttaatgaaagtgccgattgatgcagcgtctggttatagctatcagttccaaaatgtaggtaaaacctcaaataagggaattgaattggctttaggctttgacattgttcgtggtaaagattttaatttaggtgtaaacttgacttataattataacaagaataatattgacgaactgatggacggagtcttggcagatacgagagctatgaatgattggggctcatctatggctaagcctgcttatgattatattatccgtgaggggcatcctgtaggtactatccaaggttttaaatctgaaggatattatacgattgatgattttacttatgcggatggtaaatacacgttgaaaccaggggttccggatattcaaggtattgtgaattatccggatggagttaaagtgctggctgcggatggacaaaccgctgtaccgggtatgcctaaatttgcagatacaacaggtgatggtgttgtggacgaggatgacaaaacgattatcggcgaagctatgccacaacatacaggtggttttacaattaacggtaattggaaggcaatcgatttctctgtaggctttacttatcagattggtggtgatgtgtataatgccaatgcaatgcactccttgatgggaaataaagacaattccgctggtcagaatcgtttgaagttcgtttctgaaactttcaaatattatgatgttgatacaaacggtgacttgatgctggtgaaagatcctacagctttggcggctcttaacgcgaatacaaattacagttctttcttctctgaatatggaatcgtaagttctaagtttattgaagatgcgtcttatttgcgtttgaatacattgacagtaggttatactttcccaaaaaattggatgaataagattggattacagaatgcacgtgtgtattttacaggaagtaacttgttctgtattgatgggtattctggtatagatccggatgtaaacacgaagactgatggtaaggatggttttcctacaccttattttgattaccagtcttatcctaaggctagaacttatacctttggtgttaatttaactttctaattaatggagatgaatcgtatgaaaaaaatagtatattcaacacttttctttgctggaatgtttttgactacagcatgtagtgattatttggaggttggctctccttctattgtagattcggattttgtcttttctaatccgacaacagcacgtgccgcattagacggtgcttatgaacagtggagagattgtgcgcagaataaggtttttggcgatggattgttttatgctgctgatattgccgggtctgatatagaacggcacccggagtctttctctaatcagttggggcgccatta

SEQ ID NO: 14497 - DNA, 446 bp, Unknown
  gut microbiota DNA sequence
tccatagacctttccgaacgtttcctcgaaaagtgcaggagtcagcccttcatccccgtggtggttgtattgccacagggagacaagcagcagctggttataatccagtgtttccatatctgttcttttttaagtaaaacatcggcctacatgggtaggcatttttatttcttgatgtctttcctgtctgttttccggggattgcggcaaggcttggcgaaagaaaataccgcagcgaagcgaggatgattttctttcagccaacccagcccctgaaaggggccgccttgcacaatcagcccggaaaacggctatctttacagcaagaaatgaaaaagcagacctcggattctctgttctgaagtctgcttttcggtcattgtcaagtttcatgtttttcaggtatgtatctgccatccgtggaacggctgcaatgttacggcaaa

SEQ ID NO: 14498 - DNA, 1623 bp, Unknown
  gut microbiota DNA sequence
gttgcgttgagtggtcagctttcgaatggttcgctcagccaggttgttgtctatcggtaattcaccatcatccaagtaagcaaagagctctttccagaaccggttcagataattgagagcttctttataataccggcttctaaattctgaatcctttgtcagttcactgtccaacaagctgcgtaactctatcagaagttccttcgttgccaggctttgcctttctcggaacctttccttgggagttaatccggcatcatcgtatttacgctccctcataaagaactcctttaaaatttcggaaaagcgttctgcagtcggttcaccaccctgattggaagccttgacaaacttgttcttggcatgtgacatacaaacctggtgtacagtatctttaaaccgggctgatttcagctcattgccgataaatacataagcattgtatccgtcggacataatactcttcaactctgcatcgcccaaaaagtctgtaagtacatcacgaccgcgcgagccattctcatagaagaaaatggctgttttctgagccttgttgaccagaacccaaatgtagcacttcttatagtgatcgtatttgcgcactttacaccaggtctcatcgcagttcacaatcgaatctttttccaaagctatagacttcaatacacaaaccagttcgtccaggtatgtcttacctttcttaagccagttgcgcaacgtgtttttagaaatggtcatgcccatatctgtcagccattggtgaagaagaccaaaagtcacattctttacataaacttcataggcaatagcctgcagaaattcaggagtggccctagtgccttcaaaactggttactacctccggatggccttcagaagggaaatagccccacttcggctgtttaccaggctctgcataatgaaccatctcaaaacattcttccgtcaggaaagtacgaaaactgaatacccgtaccattcttctttcaatgaggcgaccgggaacctttgtcaaatcggaaggatgctctgtagcctctccaactactcccatccttttataaccgtcagggcgattggataaatcacgctctttcctggaagactcttttacctcttgagatggagcatgatcaaccgaatccgtacgaagcgtatcatcggttccatcataatcatctttctccttccggcggtctgaatcacttgttttagctttagattgtatcttttgacgtctatcaccaaaacgttcctgatgggcataatcaagtttttcttgaagtgattttatcttacgctcagccgatttgcgaagtttatgctcttccgataaccgattttcaaggtcagcatgtttcgattccatagaggacacctgagccttcagatccttcatctgagccataaaatcctccaaaacaagcttcatggcatcacttgtcaaccgaagatcctgattctgttcggcaaggtattgtatgtatcgctctttctgatcctctgccatacctgcactataatttatagggttgcgtgagtaggtttccctactcaacaactctcgttttgttgtaattatatcttgcagatcgatcatacttaaacctttgatttacagcat

SEQ ID NO: 14499 - DNA, 11812 bp, Unknown
  gut microbiota DNA sequence
ataaaattgatactataaataattaaactagataatgaattatggaactttttagaaatctctttgaagggtaccctaatttatggggcggcggagtagcacattccgtacttattctttcactggtcattgctttcggtatcatgttaggaaaaataaaagtggcaggtatctcattgggagtaacctggatactttttgtaggaattgtattcggtcatttcaatctgaacctggacgaacatctgttgcatttcttaaaagagttcggtctgatattatttgtctactcagtcggactacaagtgggtcccggtttcttctcagcattcaaaaaaggaggattcacactaaacctgcttgccatgatggttgtatttttaggtgtgaccatcaccattatactccatttcataacaggtgtccccattaccacaatggtaggaattctttcgggtgctgtaacaaataccccgggactaggtgccgcacagcaagcaaacagtgatctgaatggtatagacgctcccgaaatagcactgggatatgccgtagcctatccactgggtgtagtaggatgtattctctccctgctggcattgaaatataccctgcgcatcaacacaaaaaccgaagaagccgatgcggaacggggattgggacatctacaagaactgaccgtacgccctatctcactagaaatacgcaatgaagccgtagaaggtaaaacaataaaagaaatcaagccattggtgaatcgtgattttgtgatttcacgcatacggcattgtgacggagacaaacaaacagaactagtgaactccactacagtatttcacatgcacgatgaaatccttgttatcgccaatccgatagatgtagaagctatcactgtattttttggaaaacaagtgaatgtggaatgggatttccagaacaaacaacttatttccagaaaaattctgatcaccaagcctgaattgaatggcaagacattggctcaactaaaaatcaggaataacttcggagcaagcattacccgtgtaaaccgttcgggtgtagaccttgtggccactcccaacctgcaattgcaaatgggtgaccgggtaaagattgtgggtagcgaactggctgtagcccatgccgaaaagattctaggtaattccatgaaacgtttgaatcatcccaacctgattcctattttcttaggcatcgcattagggtgtattttaggaagcactccttttttattccccggtatccctcaaccggtaaaactgggactggcaggaggcccccttattgtgtccatcctgataagccgtttcggaccacattataaattgataacctataccaccataagtgccaatttgatggtacgtgaaatcggtatctcacttttccttgcttgcgtaggattaggagccggtaaaggattcatcgaaacaattattaacgaaggcggatatgtatggatagcatacggcgccattattacgctgctgcctttactgattgtaggaataataggacgatatgtttataaactgaactattacaccttgatcggagtattgtccggagccaccaccaatccgcccgcattagcctactccaatgatttgacctcttgtgacgctccggcagtaggttatgccaccgtttatccgctcaccatgtttttacgtgtgcttacagcacaaatattaatattggcgcttgcctgaaatcactatccgaattattgcaaattcatattgccgtaggagtgaatcaaattcacttctacggttcaaaatcccctcctcttttcaatattctctccgttttaagcagtcattttttcactaatcttaaaacatatataaaataattgtctacctttgcgcccggtttggtgatacagatattttttctctatctgtataaaagggaattcggttgtggaatccgaagcagtgcccgctactgtgaaacccatttgatgaaaagcaactctcgctatgccactgtttcgaaaatgaagaaatgggaaggcgcttttcagggtgaagccaggaaacctgccaaatcaaaacatagataatcacgctctcccggggtcaggaaagccaattattaattcttaaattctttcgatgaaagtaaaattattattgacagcaattactttaagctgtctggctattgacgtactggcacaagtcagtatcagtggaaagattgtgagtgccgataccaacgaacctgtagtgggggctaatattcgtattgaccaaagcctttcaggatgcaccacaaatggtaaaggcgagtttaatatcaacaatcttcctgatggaaaacatgtattaagaatcacgcatgtcagttacacacccaaatctgtcaccacaaaagggggtgaaaaaaatcttcttatcaagctacaagacagttttaccaatataggccaggtagtagtaaccggaacaggaacacaccaccgcatgacggatagtcccgtgcctgtttccgttatcaccgcaaaggatttaagtaatgccagtgtaacatcgctggacgaggccttacaaaagctgaccccatctttctcaagtatgaccaacggtatgggtacaacattgagtctgaatggattgcctgatgattatttcatttttctggaaaatggcaaacgcctgtatggagatgatacttacgcccgaatcaatgttgccaaaatcaaacgtattgaaatattgaacggtgcctcttccgctctttacggaacaaatgctatcggaggagtaatcaacattattactgatgatgcaaaaaatgctatcaatgtttccagcgatacccgttatgccagtaaaggacgttttacccagtccgtaaacgcagatgtcaataccggcaagttcggctcctacacctcttaccgccgtcagcaggccgagggatggcaactgaatccatacgaagagaactccaaaactcatgaactggaagaaaccgggaaagtagcttctacaggattctatgcaaatactgtcaatcaaaaattcacttttgatgctaccgacaaactctccttttatgcccgcggcggatattatgacaacaagacacgccgcccttatgaagcatacgactacaacatattgcatgaaacctttaattatggtattggtacccaatacatgataagtaaagggaattatattaccgcagactattacgccgatcatttttcttcctcttattgtttttttaaagacaataaaacttataatggaaaagcaggtgaagagcaagtgcgcaaacggacccgcaatcacaatcttagcataaaaggtatctttaaattaggtggccggcacaaactttcagtcggcacagaatatatcgttgatgtcttgaaaagtcaaacagacaatatagctaaagaagatgcttatacactggccttgtttgcacaagatgaaataaagttactgagaaatctacaggctttgatcggtgtacgttacatttatcatgaaaatttcaaaaatcatgccactcccaatgtagcactgatgtataaacccggcaaattcaatttccgtgcctcctatgcagcaggtttccgaactcctaccctgtctgaactctatgccactgacatagctaaaaaaaatgacaggttgacaataggcaatttggatttaaagccggaaaagaatgattatttctcattgagtgcagagtatgtacatgagcgtttttctgtatcagtcaatgctttttataataatattcgtgacatgatagattataatacgattgccacgggagataaagctatggagcaatatggtcataaggaagttcgtcaacgtgataatatagcggaggctaaagtatacggaatcaatgtatccgccaatgcatacctaggtgccgggttcaatttaagcggaggatatactcatcttaatacccaagacgtggaattggaacaacccatcgacaaaagtattaaaaacgcatacaatatcaatgcccaatgggcgcattcatggaagatatatcggttgaacataaatttgaacggtcgtatcaacagcaaacgtttctctaaaagttatggctatgctcccgactatcaattgtgggatttaaacacacgccattctttcaacttaaaatctgtaatcatagaacccggatgtggcatagaaaacctgttcgattatacggatgatcgtccttataacagcaattatgcaactcttacccccggacgttcattctatatcagtttgtctttaaaatttaaaagctaaaaaaatcaaagacttatcgaagataatataaaataaacctatatctttgcaacagaattagtaatcgggctatcacatagcccgatgcaagggaatccggtgtaaatccggggctgtacctgcagctgtaaatcctcattatgttgattggatagtccaaaaccactgtttcatttgaagaaatgggaaggtttccaatcagaggaaagccagaatacctgctaagtctgttgaacaataaacaccaagcttccaggattagaagtatgtgtccattcgaacaagcgttttccaacgtctattcctttgtggcattcctctttatcagagggaaacttgatgttttattttgcaaattaaataaaacacaatatgaggtatttacttcctgctattctactattaggtacacaaattgcaagtgcccaaagtattctcaaagataaagacgataaagaattgtccgtattactgaatgaagtggtcatcacgggtacaggtactgaacattatctgaaagatgctcccgtacagactgaagtaataaccagcaaagctttggaacaatatcaggcacgcagtatagacgatttgctcagtggtcttagtccttcattgacctttcatgatggtgatatggggagccatatccaactaaacggattgaacaatgactatatcctgatcatgataaatggaaaaagaatgaatggcgatgtaggagggcaaaacgacttgaatcaattaaatccagctaatatagaacgcatagagattgtaaaaggggccgcttcttcactttatggcagtgacgcaatagccggagttatcaatatcataaccaaacgtaaccgtgaaaaaatggagctcaccaatacatcccgcataggtgaatatggtgatatacgtcaaagtaccagtttcggctttaattatggaaagataaaatctgtaaccggaatcaacttccggcataccgatggctggcggaatacagacctgcagtgggatcagaatcaattgaaatccggctctactatgttgaccgtaaaccgttcttcaaactataccctgtccgagaacattgaatggcaagtcaatcgcaaactagacctcactgcagaaggcacttattatgagcgttgggtaatgcgtacacacggtccttggaaatatcaagccaacgatttttattatcgcaactatacatttgcagtaggaagtaaatataaattaggaaaacggaattatctgactgcagacctctcgtatggcagatacggttacttctatgactataagctaaacgagcatactgattattttctagacaatgaccgccatgaacgtatcacctactttgccggtcaacgtatcaaacaaagtattcagaaacaaatattaggccaggtaaaaagtgtattttatcttggagaggaccatattttaaatgcaggaatcgaatatcagtacaatcatttggaatcacctcatcacattgacggtgaccgcgcttccgtttatacgttggcagcttatatacaagaggaatggacagccagagaaaatctggttctgactgccggggtacgaggaacacaacacaaggaaacaggattgaatttcagtccgaaaatatcaggactttataaacccggagaacatattaatttgcgtgcttcttatgctttaggctacaaagcacccactattaaagaactttattataattataccggcgttatcggaggcggtgccttgactgcatatcatggcaacacagatctaaaagcacaaacctcacaatatgcttcaatcggtatcgagtacgtagggcaaaaattccaagccagtttaaccggatacatgaattatcttcacaacatgattgagctggttgaaatttccgtaactcccgatgaaaagtttcttgaagtagaaaagagcaaacaatataagaatctgacaaaggcacgtatttatggtatggatttcaccttcaactatcgtcctgcaaaatctctcagccttgccggcggatatagttatgctgatccaaaagcgcaatatcctaacaaaggtatagattatatgaaatatcttcctattgatgctacttccagccataatgcaaatttaaatatcttatggcaacattcatggaaactgtatcgtttgggtatcggcatctatggcagatatcagtctacacgccgttatataaatgataataatgccgacggattccaaacttggcgtatcaacacagcccactcattattaaaaatgaaacggtggtcattaacgatgaatgccggggtagataatgtatttgactatgtagaccgtactcctttcggacggaatcgtgccacatcaactcccggaagaactttttatgtctccgccctcattaaattcaaaaacaattaataaccaacaatttataaattaatttttattagtatgaaacaattcaagtattatctgatggcggcttttgttgctgccgcaacttgcacaggattcagttcctgtagtgacaatgatgatgaagaaagtactgttaatcctgctgtggatgtagtaaccagaaccaagcaacacgacacagccattttgctctgtacttttggcagtacctataatgagtccctttctgtttatgatgatgtgattgaggattttaaagctaaattccccaatacggatatttatatgtcatttacttcacgtacatgtatcggacgtgtagaagcatctaccggcatagcacgttatgaattggaccaatggttgaaagcaataggcgatgcaggatacaaacgtgtggctgtacaatcattgcacgtaattccaggcgaagaatatctttcattaatgaatactgatgtaaaaaaatactttatgattcaatggtatccgcatattgatgtattgaaaggtgccaaccttctttccagtgcagaagatactaaagatgtagcagagatactttacaaacactatgagtctaaattagcaggcaagaacaacatcgtgcttctaatgggacacggtaatccggatgagaattacaatgctaacaaaaagtactctgacatggaaaaagcattgcaggaacttgctgccaacaacaatatctttgtaggtactgtggattatggtgacatgcttttcttcccgaaagaaatagaggaagaaccggctaatagaattcctgtagaaggatttgacaaaacccaatatcccgactgtatgtactctaaggtgatgagctattgcgaaaagaacggcctgaacccatcagaagtaaatgtttatcttgcacctttcatgtcaattgccggtgaccatgcccacaacgacctttggggactggaagctatggccgaagatgacgatgtaagtaatgtggaaatcaatacaaatgaatatagctggcgtgaacgtttggagaaattaggattcaaagtggacagaacattcgaaagccacccgatagatcaagccggagctgatcatggtattaaagacggatgtaatatgaaagcccttggcagttatcctgagattcgccaaatttgggtaaaccatttatatgaaaactggaatgacgacagtgcatgggagaatggtgaagactatcaaccggaagcataaccaacttaatatatttatctgaaaaaggcggaatttatttccgcctttttcagatacgccaaaaccgataggtaatatctttcatctcatccccgtatatccgatagaaatgctgattggtatcaggagatttcaagccacccaatttttcaatatacggtcccaactttatatattcaaagttctgaacggaaagaccttccggcaattcattcttccccgaataccaacccacctttaccaaagcgatagactgtcggtgaagaaatcctgccaacctttccacttcaaaaggttcggcatcgcctcccataaaacagacgcaagtcaccgcctttccatacttctgtaaaagatgcccaagactttcttccgttaaagattctcctacattttccaacaaatgagggctatgacagcccttgcacctattgggacagttagagagattgatcgccagagtgacttcatccggaatttcttgaaatacgatgtcataatcaacgtaacggagcataatatctttgtgcagcctccttctgccttgcctgagaaaaattactgatccgcttcatatacccgataacacgtgtcagataatccacattctgactatgacattcaggacattcatgcaagtatctcttatcaatatgcttacattcattgcaaatggtattcggtatattaaatgtaaagtaattacagccttctatagcagctacccgaagtagttgtctgtactgctccttactaagatgttcttccaaattcatgtgcaaggccgagcctcccgttaaatgctttatatagcggcgtccatgcagacgaaatttattgacaacattcaacgatttgtcttctacaatatagaaataactgttataacattctcggaatgtttggaagcctgcttctttatcccatttagcgtgcttcactcctacattctcagcaggaatcatttcgcaattaaacaaaacatcttttgtacggtacttcctattatatcgttcaatcattcctaaaatctcctgaacaaatgcttcatacttagggttatcattgatttcaatacccataaattgcgctgcttccaccaaaccattaacaccgatagttagatactgacggttcatattgatgtaaccagcatcaaacaaaggcagcatacctttcgactgcaacaatttcagattctcattataagccaactggactttgtgtaccaaatcaaccacttcttccaaaaaaaacggataaagtataccggatttcaccgcatgctggatgcaacggttcaaattaatagtcagcacactttttgagcctgtagaaaccccacctgctcccaaagtatagctgaaaccattgtcctgtatctcattgcgaagacggcagcaactacttaaagaatctgcattatcactcatataagtaaagaaagaatgaccttcggaatacatttcagccgtaaagtcaccatattccttatctaatacatcaccatctttagtcaaaagcgccattgtttctacaggaaatgttaaaacagtacgtgtacgctctttattaaaccatttcatgaaacgtttctgcaaccaacttagtgaattccagtcaggttggcttccatcgggaaaaaagaagttaccaaaaagactttcaaaataatatttgtcatagtaagctacattccaaaagacggcttgaaaattacgcgcccctgtaggctggttaatagaatatactatttgctcgaaacagtctgtaatgattttgtctattgttctttgtttggtagataaatcaacaatcttatcgggatacttataatattcctgcccatattccaaaccaatgaaataattcatatacatcaaaaactctggagtagcacaggcaccacttaacatactggatacaataaaaaccatattgacaaatccaccacaaaaagatttcaagttagtaggagccgtagagttccctcccactgctatcgtaccattattcaaccaaggatacatagtaatgctggcacaataattagccagattagtttcatcatttttataaataaaatgatgattcagaagttccaaataacgatcggacaattcctttccatacatgtctttcaaacggtcagtcaacagacgacggttgagacgaataaaatttgatttgggtaactctcctatcagcgtagcaatattcttattctccacattggcattcgcatcatatttactgccggttgccggattggaagcgtcacaataatcaagcaaaaacttcagtttatctctcacctcacgatcctccaaatgtttctgacgatacagcatatacgccttggcaacactgtaataatgttcagccatcagggccacctccacctgattctggatttcttccacattcattccatcactgacactaacgcgactcaatacagtagtaatcacatcctgggtagcaaaacttcctactgacaaaaatgctttggctattgcatttttaattttatcaagagagaaagtttcttttttaccatctctcttaataataaatacctctgaattaatcatacttataaattaaggttatacaaaacacacattattcaatataagtctttcacacacgacaattcatggaaaccagtaataaaaaggatcagtatgattcgttctatcgcctttcacccgaaagccatgaatgatataaacaataacggcaggtcttctgacttgtttccgttgtaacgccttcccggttttcacaataaccagtggctaagaatgtcacaacacttccccacactatgggaggataaaacttacagctacggggatagttcctgatttgcacaggattcccttttaattccgtttcgcgccaacggctaatccggaaaccgatattactgacaaagttaggaattaaatcaataaaacaactggaaaaagaaaaaaaacttcaagcaacacttttttcatcttttccgcttcgtttaattataaaatccattatctttgccccgaattggtttcggatagtctatctgctattcggattaaaagggaatcgggtgcaaatcccggacagtcccgctgctgtgaagctctgctggaatcttgaaaaatacctttgccactgatgtgacaatcctcacatcgggaaggcttcaagataaggagtcagtcagaagacctgccattcattaaaggctgtttttactcgtgggattaggaaagcagtacgaaagaaaataagaaaataaaaaatttacgggaggaatgcctatgaaaaaggtatgtccacgttgtggtgcaacatttgattgtatgcacaatgatattttatcgtgtcattgcgcaactgtccgactggatgctctgcaacgcacctatttaatggagaattattccgattgcctgtgccatgactgcctgaaagccgtcaaggacagtttctatgcctgcgaaattaacccccgttataataagaagaaaaatgataaagaaagtattgattgcaaacagaggtgaaatagccttacgtgtaatgcgttcctgccgagaaatgggcatacggaccgttgctgtcttttcagaagccgaccgcacttctcatcatgtgatgtatgctgacgaggcctatcttataggtcctgctatagccagggaaagctatttaaatatagaaaaagtaatagagactgccaaacgatgcaaagccgatgccattcatcccggttatggttttttgtccgagaatgctgattttgcccgccgatgcaaagaggaggggatcatctttat

SEQ ID NO: 14500 - DNA, 244 bp, Unknown
  gut microbiota DNA sequence
tatatcacccgtggcggtgactattatccgcaggcacacattgaaaggggcgatgaccgggaagttcatatctgccttctcccacaaacacctttttgccatgaaaatgaaaagtgtaccggttacaatacggaaggaggcccttgggttacaaccgatccggaattgctgattcccgatggcatacgcagcaaacagttccggatgtgggggcataccggaaggcacaggaacggtgccgtcc

SEQ ID NO: 14501 - DNA, 283 bp, Unknown
  gut microbiota DNA sequence
ttgtctccctgtggcaatacaaccaccacggggatgaagggctgactcctgcacttttcgaggaaacgttcggaaaggtctatggaagtcactattacgaaaaatggaccggctacttcaatcggaatctctgggacatgattgcctatttcagaagcgagaagaagaacggacagaagttctgcgacatggttactcgtcaggtcaaattgtatcaacaaaaacgatctcaatatgaagtacggtaatttttatgacctggaaagtctgactctgctcaaca

SEQ ID NO: 14502 - DNA, 4903 bp, Unknown
  gut microbiota DNA sequence
cacttgtacgataagagagattcccgaatccattaaaaagaagttatgtctttacaccgctgcctattttgaagatgtcatttcaggtttaggtctatggcaagcattcatcaaaaagcatctggaactatatgatacgtcacttcctttctataccatccgaccggattatataaaagatgagatcaatgaggaagatatccgtttcatcatttggaacactttagagaaggctccatataaacatctgtatatcaatccgatggacaggaatatcgaagaaactgcacatttatttttccggatattggatgaagaatatgaaacggctcccgccaatgccacgttacaggagttctttatggatttcaaaggaaaagaggacgcaaaccataaactacgctggctgttcggacatacttatctcacagaaccatctgtacaagaatatattgcacaggttacagaaaccgacaaattcatcattccatgtggcccccttgccctgtttcttcatgaatggattgacctgctgaccaacggagaaaccgaatgttgggaagagatagaaggactataccctgccattcccgaaatatcggacgagatgaaggaaaggaaccaccatacctatcaattgttcacgcaaggcacaaatggtgcccgtatcgtatatctgaaaagctataaagaactacacagtttccttacccaagtattacaatggccggacgattccaatcacactttgccccaaatgaaggaacataaggatttcatcatgatggtaaattccgaaaaaggtattctattggcgaaggatatatgcaaatacatcagtgatcctcttaacccgatgtatgatgccgcaacagctgcccaagaggcattcagcctgcttactatcccgaccaaatgtccgccggacctgatggaatatttaataaacaaccactatatccccgatgcacaattccccgaatttggtgaaaaggaactggttcaaaagaatgcggactttatagcccgccattccttattgtattactacaggggagattagaccctccccaccgctacttcgttcaccaaaggtctaccttcaacaaagtctttcacgttttgtagagtagtatgagcaatattcgtcattgcctctttggtaaaaaaagcctgatgtgaagttacaatcacattattgaaagacagaagacgagctaaagtgtcatcatcaataatcttatcagacttatcttcataaaaataaggctcttcttcctcgtatacatccagaccggcatatcccacttttttggtcttcagcccctctatcaaggcattggtgtgaatcaactgcccacgccccgtattgataatcatcaccccatctttcattttactgatggaataatcattaatcagatactttgtctgttctgtcaaaggacaatgcagggagatgatatccgaactatgataaagttcatccaaagtacaataaaccacctgatgttcacgggcaaaattgtaatcgggataaagatcatatgcaagaacattcataccaaatccacgtaatatctgaattaaaatcttggcaatcttacccgtaccgataattccggcagtcttgccatgcatatcaaatcccataagtccatgcaaagaaaagtttccgtcacgtgtgcgcattgtggcacgaggaatcttacgattgagtgacaacatcaatgccactgtaaattcggcaacagcatatggcgaatatgccggtacccgtaccactttcatcttacctgccgttgccgctaaatccacattattataaccagcacatcttaaagccagcagtttaacaccattatccgccattgcccggataacttcggcatcagccgtatcgtttacgaagatgcaaaccacatccactcctttggtcaacaccacgttattcatattcaaatggcctttgtaatacctgatatcaaagccaaacttctcattagcctccgtaaacgagtgttcgtcgtagggtttcgtgtcgtaaaaagctattttataagccataattattttttatttatagttcatataaataacaaaaacacgtcccttactgttcacatacagacttatagttttttcagttctgtgtacaggcactgcacagggagtcccatcacattgaagtaactacccgaaattccacagacaccaatgaagcctatccactcttgtataccataagaaccagccttatccatcggcttgtaaacccgaatataataattgatctcctcatcggacaattctgcaaacgttacttctgtcacagcagaaaaacttctctgagtcctggcagtagtcagacaaaccccagttatcacctgatgggtcttgccagaaagcttccacaacatctgccgtgcatcatcctcgttatgaggcttgcccatgactacaccgtccaaccatacaatggtatcagcagtaataatcaattcgtccggatgcatggtattccggtaagcagccgccttctcgcaagctatatacaaaggaatttcctctgctttcaatgtatccggataggtttcctctatgccgggtagtgtttttacctcatattttatacctaagccggataacaattctttacggcgcggagaattggaagcaaggattattttatatttttctaaattttccaacatagcttttctttatttcattaccacccgaaggctctttcatgagccatccattttccttgagccttcaaaacctgttccaccacgtcacgggcacatccataccccccattacgatgagaaatataaacagctgtttcttttatctcaggtgccgcatcagcaggacaacaaggtagcccacacaaacgcatcacttcataatcaggaatatcatcgcccatatagagtatctcctcatcctgcaatccatatttttccttcaaatgggcatactcccgggtctttaccgcagcagccagataaacatccttgatacccagcccctcataacgcttacgcaccgcctcggtatttccaccagtaatgatggcaacatgcagcccgcatttcacagccaactgtaatgcatacccatccttgatattaaccgtacgcataggttcaccattggggtgcaaataaatagtttccgcactcaataccccatcgacatcaaataccaatgcctttattttctttaaatcatagtttatcataccacttatgagttctttccctctttatttgtctgaataacagacaaagggagattatgaatacttttacttatcttttcgtacaattcctgcaaagactcctcatccgccaacatctccaaatgtttgcttattacgttttcatcgtagcgtacagccggacctgtctgcgcctgtgtgggagaaagttcatgtactttgccggcagtttcgtctatcagcggaagcatcacttcaaaagaaatcccctgcttttccagtatatgtgaacttaatgcatacatatggttagcaaaattacaagcaaagactgccgccagatgcaaatgcctacgttgaccggaagtcacttcatacactttaggactgagacgaactgccaccatacgcagcactcccacttctgccggagcagatgcttctataaaaaaaggtacggtattgaaatcaacttcacgctgcttgctaaaagtctgcataggataaagtaccccatagcgttttaccaaccccttccataaatccataggcatactacccgccgtatgtacaaacaaagcctgctcccttcctttcaccaatacaggagccaattgtcgcaaaactgcatctttcagcgctacaatatacaaatcggcatcccgacgtatctcatccggcacaattgtgtagtctactaaaagtctgtcagccaatgcagaagcagactcctctgtacggctgtatacctgcaaaataagacaccctgccttttgtaaagcgattcccaaatgggtagccacattgccggctcctatcagaactattttcatcatcgggtcgaaactaaatataaaataactcctaacaacaacaaagccgccggcaacaaataagcagacatctgccccaacaaagctatcaccaaactgatattcaatatcagccatatacccgccaatacaattcctactgacttatcggccttgaaccaaaggaaaataacagctgcatacagtaacagattgtctttctgcataacccatggcaacccgtgtgaggcaaatcctataaacttatcgatcagataaagcatacccatcacaatgagaaacaccgcagaagctttatacgtatccttatgattgacagcagccacgtttacttgcctccaaatttattgatgtgaattttctcccattgtaaatggtcctcattaaaaggcttgcgttccatgcccttatgtcctaccgctataatggaaaccacctgcaactgcaacggaatatcaagcagcgtatgcacgtattcacccgagggcatcccggtagcggtaaaacgttcacgcacctgtatccaacaacttcccaaccccaaatcttctgcctgcaactggatcattatggaagcaattgccgcatcttcaatccaaacatcactagccaacggatcagccatcacaactacagccatagcagcatccgctagaaaagctgcccccatctccttacaatgggaaagtttttccagcatatccttatcatctaccacaagaaactgccagcaattgctacgtttagaagacggagccatcaaagcagccttcaacaaagcaaccacctcttcctgtgtcaactcttgatccgtgaacttacgcatactgcgtctgttctt

SEQ ID NO: 14503 - DNA, 7782 bp, Unknown
  gut microbiota DNA sequence
gttccataatatactcagttaatttatttttctgcacaaatatacaactagaatgtggattgataaacaaaaaacaataaatttgcaattagagatgcctgtcagattaagtacatatcgcaaaggaaatgccattccccctctgcctggaacaaacattttccattctaccgagttgtttcatgtctttgaaatgactcggggatacgaacctctgcttatcgtagcctatataggaaaccgtcctgtaggcaaactgctggctgtcatccggaagagtatgcgcttgttcccccccgcaatcatcaaacgatgcgagatttatggcacaggcgagtattttgatgaagaacagaataaggaagacctgttcggggaaatgttggaacatctcaccaacgaagtattatgcaaatcgttcctcatcgagttccgcaacttggaaaatccgctattcggatacaaagctttcagaaagaacaactatttcgccattaattggctaagagtacgtaactcactgcacagtaaagtcccttacgaacggctgagcatgtctcgcaaaagacaaataaacaaagcgttgagaaacggtgccatcatggaagtagccgacaatgagaaagatattcaagatttctcacgaatgttgaaaaaagcctattcctcacaggtaagaaaacatttcccggacatcggctttttccggctattagcatggcaaaacccagaaaaagaattagccaaagtgtttcttgtgaaatataaaggcaaaatcataggtggttctatctgtcttttctcaaaagaaagtgcttatctgtggttctcaggaggtatgcggaaaacctatgcttttctttaccccggtattctagccgtatgggcacctattacctatgctcacgaaaaaggatatgcacatttggaattcatggatgcaggattaccgttcaaaaagcacggttacagggactttatactccgctttggcggcaagcagagcagtacacgccgctggttccgcttcagttggaagtggctgaacaaactcttgtgcaaattctatatttaattcatttttgtctttttgtctaaagtgttgtgaagcatctcgcaaataagaaataaaattgaagaaatatttctttatttaactcgaaattactttctttgtgcagttttatctgaaaacttgagtataaaaccaaactattaaaattataagatcatgaaaatctcacacattgaacacctgggcattgccgtaaagagcattgaagaggccctgccgtattatgaaaacgtattaggtctgaaatgctacaatatcgaaacagtagaggatcagaaagttaaaaccgcttttctgaaagtaggtgatgttaaaatagaactgctggaacctacaagccccgaaagcactatcgcaaagttcattgaaaaaaataatggcaacggtggtatgcatcatttggcttttgcagtggaagatggtgtggcaaatgcgttagccgaagcggaaaccactggcatccgtctcattgacaaagctccgcgtaaaggtgctgaaggtttgcaaattgcttttttacatcccaaatcaactttgggcgtcctgactgagctttgcgaaaaaccataaaacacgagatctgactattcacgattgaaatcagtgtatttagtctggttcaagcgtaaatagaaatattttttaatcgtaaattgtaaaatcataagtaaaatgagcaatcaacttgaaaaaataaaagagcttatcgaacgccgggctacagcacgcatgggtggaggtgataaagcaattgcaaaacagcatgaaaaaggaaaatatacagcccgcgaacgcatagccatgttgctggatgaaggcagtttcgaagaaatggatatgtttgtggaacacagatgcaccaattttggcatggagaaaaaacattatccgggcgacggtgtagtaacaggttgtggtaccatagaaggacgtttagtttacatctttgcacaggatttcactgtttctgccggttctctgtcagaaacaatgtctctgaaaatctgcaaagtaatggatcaagccatgaaaatgggtgctccctgtatcggtatcaatgactcgggtggcgcacgtattcaagaaggtatcaatgcgctggccggttatgctgaaattttccaacgcaatattcttgcttcaggtgttattccacagatttcaggtattttcggtccttgtgcaggcggagctgtttactctcctgcgctgacagacttcacattgatgatggaaggcacatcatacatgttccttaccggaccgaaagtggtaaagactgttacaggtgaagatgtaagccaagaaaacttaggtggtgcaagcgttcattctaccaaatccggtgttactcattttactgccaagacggaagaagaagggttagccatgatccgcaaattgttaagctatattcctcaaaataatctggaagaagctccctatgtagactgtaccgatcctatcgaccgtctggaagactctttgaacgaaattatccccgacagccccaacaaaccatacgatatgtatgaggtgatcagcgccatcgtagataatggtgagtttttggaagtccaacctcactacgctaaaaatatcatcattggtttcgcacgtttcaacggacaatctgtaggtattgttgcaaaccagccaaaatatctggcgggtgtacttgacagcaatgcgtcacgtaaaggtgcgcgttttgtacgtttctgcgacgctttcaatatacctcttgtttcattggtagatgttccgggattccttccaggcacaggacaagaatacaacggcgtaatcctccacggcgccaagttgctgtatgcttacggcgaagcgactgtacccaaagtaacaattaccctgcgtaaatcatacggcggatctcacattgtaatgagctgtaaacaacttcgcggtgatatgaattatgcatggcctactgccgaaatcgccgttatgggtggtgcaggtgcagtagaagtattatacgcccgcgaagccaaagaacaggaaaatcctgccgcattcctagccgaaaaagaagctgaatacaccaagctgttcgccaatccttacaatgctgccaaatatggctatattgatgatgtgattgaaccgcgtaatacccgtttccgcatcatccgtgcattgcaacagttgcaaactaagaaattaaccaatccggctaagaagcatggtaatattcctctttaattaaaaattaaaaattgagaattgaacatgaagaaattaaatataggaatattcctttctttgctgctgatggtgggtttatgttcttgtggagaacagaaatcaaacaccaagctggtactgaatgaagtgctgattgaaaatgaaagcaatttccaagatgactacggagtacacagcgcatggattgaaatattcaatagatcatttggtagcgcagaccttgccggttgtttactgaaggtgagcagccagcctggagatactgctacttattttatccctaaaggtgatgtattgactttgatcaaacctcgccagcacgctttgttctgggcagatggtgaacctaatcgtggtactttccacaccaacttcaccctgaatgccgcaacgaacaattggatcggcttgtatgattcaggcaagaaattattggatcagattatagttcctgcaggtacattacaggcaaaccaatcatacgcacgtgtcagcgacgctgcaaatgaatgggaagtaaaaggttctagtgcagacaagtatgtaactcctagcactaacaacaagactatcaacagcaacgctaagatggaaaagtttgaagaacatgacagtgtgggtattggtatgtccatatcagctatgagtgtcgtattcgtaggcttgctccttctgtttattgctttcaaagttataggccgtatttctgtcaacctgagcaagcgcaatgccatgaaggtaaaaggtattaccgacaaacaagaagccaaagaaaagaaactgggtgaagctccaggcgaagtattcgccgcaattgccatggctatgcacgaaatgcaaagcgatgtacacgatgtagaagaaactgttcttaccattactcgtgtaaaacgtagctattcaccgtggagttctaagatttataccttgcgtgaaactccccacaaaaagtaagtcaccaataaaaagataaaacgatgaaagaatataaatataagattaacggtaacatatataaggttgccattggagatatagaagataatatcgctcatgttgaagtaaacggcactccttacaaagtagaaatggaaaaagccccgaaagctgtaatgaaaccggtagttcgtcctgcatcaaccagccctgctccggctccaactacagtagtaaagcctgctgcaacttctacaggaaaatcgggcgttaaatctccgttgccaggtgtaatccttgatattaaggtaaatgttggtgataccgtaaaaaaggggcaaaccatcattatccttgaagctatgaagatggagaataacatcaacgcagacaaagacggcaagatcaccgcaatcaatgtaagtaaaggagaatccgttctcgaaggtactgaccttgtaattattgaataatatgggagaatttatcaactttttagggaataacctagctgacttttggacatatacgggttttgccaatgctactgttggtcatatcgtaatgatcctgataggtttattcttcatataccttgccgtggccaaggaatttgagccgatgttgctcattcctatcggttttggtatcttgatcggtaatattcctttcaacatggaagccggactgaaagtcggcatctatgaggaaggttctgttcttaatattttatatcaaggagttacctccggatggtatccaccacttatctttttaggtatcggtgcaatgacggatttctcggcattgatttcaaatcctaaactgatgttgattggtgctgccgcacagtttggtattttcggtgcatacatgattgcattggcaatgggctttgatccgatgcaggctggtgctatcggcatcatcggtggtgcggacggtccgacagcaatcttcctttcatccaaactggcgcctaacctgatgggagctattgcggtatcagcctattcatacatggcattggtaccggttatccagccgcctatcatgcgtctgctcactaccaagcacgaacgtttgatccgtatgaaaccaccacgcgtcgtttctcatacagaaaaagtaatgttccctatcattggtttgttacttacttgttttctggttccgtcgggtctgcctctattgggtatgcttttctttggtaacttattgaaagaaagcggtgtaacccgtcgcttagcagaaactgcccgcggtccgctgattgataccattaccatcttattaggattgacagtaggtgcttccacgcaagcttcagagttccttaccattgattcgatcttgattttcgcgctgggtgcattgtcattcatcattgctactgcttctggagttatcttcgtgaagatattcaacttggtattaggtaaggataacaaaatcaacccgcttatcggtaatgccggtgtatctgctgttcccgactcggcacgtatctctcaggttattggtctggaatatgatcctaccaactacttgttgatgcatgctatgggtcccaacgtagctggtgtaatcggttctgccgtagcagccggtattttacttggattcttgatgtaattcattgaacaacaacaaataaaatcctcttcaactaatatgtggaagaggattttttattgatatagattaagaaatgaatgatttattatgaattttgaatgattagttatataagatatgctgaaaaacatataaatttgtcgccgtaaaaccaaactaaattaaacgaagatggaaaagaaaacagttaagtaccatattccccaacacggaatatatatgtacgcacgtactaattctgggaaaactgaactcattgtcctaaacagcaccaatgccgaacaagtggtggctaataaccactaccgcataatgacaaatgactcaaaaagcggtaaagaacttatcagtggcaaaaaaattgaccttaccaaaaatatgacagtcggtgcacgtcaatcattgattattgaattataattgttttttaaggtaagaaggtaaaatgagaaggtaagaataaaggtggctttataaagggtcgcctttatttatatctcttctacctcttttatttgcgtgaaacaattgtccctgtagcttgataagtaggcataaccaacatttctgcaatctgcatatattctggtacagaagcagcaaaataaacagtttccgcaatatcatctcccgtcaatggacgaatacctttatatacattatccgccttttccttatctcctcggaaacgaataactgaaaaatttgtttctaccaaccccggtttaatattagtcactctcaatggagtatcaactaaatctatacgcagtccatccgataaagctttcacagcggcctttgtagcacaatacacactacctcccggataagcagcatctccggcaatagaaccaatattaataatatgtcctcgtttacgttccaccattcccggtacaatcaggcgtgtcattgccagcaaagccttaacattagtatctatgacaatatcccactcatccagactaccttcctgttctttatccgtaccgataaccaacccagcattattcaccagtatatcaatggattgccattccttgggtaatgattccaaagcagacgttgccgccttacggtcgcgcacgtcaaaaggaagcaaatatatttccgtaccatattgcttttctaattcttctttcaatgcactcagtttatttacgttacgagcatttaaaatcaaacttgctccctgtgaagcaaacttgcgagcgcatccggcaccgataccgctggaagctcctgtaataaaaacaattttatccattttattatttcgatttattaaagaacttactgaaaaatagtatttgatagtctatggcattattccaatacctgcctgtatgcccgcccggacggatgataaagtcatgatttattttcttcttcaacagtttttcgtgtacagccttattcacttccagaaagaaatcatcacaaccgcaatctattataacagccagatcaccattttttatcttatccaactgattaattaccgtatgttcgtcccatctctgcttgttgctcgcttcttcgcctaattgcttcttcatctcccaattattgggaaacggacggatatctaaacctccgctcatactacctcctcctccaaagacatctttatgacggatggacaaccataaacttccatgaccacccatacttaacccggtgatagcacgtccccctctctccactttcgtagtaaaattcttatcaatatagttcaccaattcttttgatacgaatgtttcataacggtactccttattcaaagggctgtcccaataccaactgttcttcccgtccggacaaacaaaaatgattccttccttgtcagctatttgaggtaattccggttttataccgagccacgttcccgcattgcctcc

SEQ ID NO: 14504 - DNA, 925 bp, Unknown
  gut microbiota DNA sequence
cttggaagcggcttatgagaacggtttcgttgattatcgtgcactgctctgccaacaaggcgggcagtgccttgcgagcggaggacattgaccgctaccatcgttcattgggctggaagtgctgtggttaccactatgtgattcctacagacggaacgatagaagccggacgcccggaagagttggttggagcacattgcaagaaccacaacagtcacagtataggtatatgctacataggcggactggatgatggcggaacaacgccgaaagacacccggacggaagcacaaaaggctacgctgagaaaactgattgaacaactgcatcaacgttatcccaaggcactgattgtaggccatcatgacttgaatccgcaaaaagcctgtccatgtttccatgtcacagctgaatatatagacttgcaaccttagttgcgtctgtagtcttatctgccatccatcgtcctgcaaggaatatatggatggctttaattaaactaatcaattttttcaaacggaaacgcatgaagatagctcactgccaccgtcatattgccaaaagcgaataccagccttgtattgcggtgcaaacgcatgatacatccctctttcccccgaaagacaccaccggtaatacggattcgttgctttttctgaagatagtcctccaaaggccggttcatcagctcgatattgtaaggcatggattcatacagatagataaattcctccatctgacgttgaggaattaccgccgcacggtgtgtgttatagtccgtcaccagatactggcggggaagcatggcagacagaatacattccaactgccccaagggggcacatacaaacagccaaccgttgccttcaatccctttctcgttcgtcaacgcattcagtttctgagtggagccggtagcaaaagc

SEQ ID NO: 14505 - DNA, 139902 bp, Unknown
  gut microbiota DNA sequence
agcacatacaaacagccaaccgttgccttcaatccctttctcgttcgtcaacgtattcagtttctgagtggagccggtagcaaaagcctctttcaccacccgggcagagtcacggcgagcggtatattcctctttggtataagcacattgctcgaaacgtttcctatgatcggtggcagtgtaagaaaacaccttgaagcaaaaaaatctctcttctacggtacctgatggtgtacgaagccgaacagctttcctgccactgaaaacactgatatagcgtttcagttctttgttggaaagatacagataataccagctgagttcagggtgttcttttcctattcccgccattggcgtgattccttcatttgaccccaggtctgagccggaagcgattgaactgcagagcagtaacttaggcgcttcgcccgttatgtcttgatttgaaaggaacgcttgattttcaagctccatactattttctgttaccatcaaaacattactttttatgtatgtctttttggggttctcttagtaagagaaccccaaaaagacatatactactgacaataagatatttacacataatcagagatggataatttgcaaacaaatattataagaatccttatcagagactgattcctgaataaaagatttccgtatttggattattatagctacatttgcagcggaatggggttctcttactaagagaactccattttttttattctaacagattcattttcaagatagatccaagaaagaccaaaaaggaacacataaattccttttccgcactcattaaaagaacaaatgataaaacgcaaaagcggccacttacgataaaaatcgaaagtgaccgctaaaaagagatttatttctctgatataaggatctatcagtccagggttacttcaccacaaaccctctcttatccagataagctttgaatttatgcaaatattcttcatccggaccatcaaagaaggatacaccggatgccccgttattgtatgcttcatccagcgcctcttcaaaattgtccttaatatcaccaaacatcagtccggcatatatcttggcacgaccattcaccgtttcaacgctttcctttaccgaacgcccgatccattcaggaccttcataatagaatttattataaatcatcggataataagcatccagcgtccattctccccaatcttggcgtaccatgtgacgagccatggacggtcccgggaacacggcggcagaaatagctttatgatccgctttcactgctttagtgatggcatccaccacacgagtgatggcatccagacggaaattaatccaactctggttttccatcggatactttaattccaacggatcctgtcctgttttagctttaaacaattcacggcatacatcacaataacaatagtcatattccggcaactcttctttctgctctataccatagtttttccataagctgacaggcaagattacatccggcatacggacataatccagatgaacaccatccacataaggcttatgggcttcctttacatagtcttctgccagatattcggccacaccttggtgattagggcacaagaaacgataataatccacgtaggcaggtttgtcgtgacaagactcgcctttacggttcacagcataccagtcgggatgcttgtccagcagttccctgcggttcatcgtccatttccaataatgcgcctccaatccggcttctttgcagaggcggtaaatattctcattgtatccctcgaacatgacacccgaaataccacattctttcaacaacgcaaaccacttttgccattcggcatccgaacggttattcagacgcatccacaaccagtttttaacttcacgggcaggtatcttttctgtccggaaacgtccttcattattgatcacataacggactccttcagcaggattggttatagctatctgatacgtgttctgagtcgcttccaccacaatccgggcatcagccggaagatctttcaactctttatcagtcaaaaagaattgttctgtggcacgcagataattatgttgtttactataattatcctgttgtgcgtagaacatagcccatagcagtttatagatagcctgattgtacggataaaccaactcatcctgcgaggttcccactttcttgtctacgaaataaagatatccccaacggtcgggcatgtgcatatcgattcttccggtaggagtccatacccaattttcctcgggtcctttctccttcagccactgtacacgcgaaaagttgatgcgccaggtattgccagccttcaacggattgttaaagttcatggtcagcgcctgatgaggaatggccatttccacactccaatacttatctttatcttttgatttattcagtgtaccttcacaatggatggcggtcttcaatccggggcagtcccattgcaccatgaaatttccacccgaacgataaggtttgtccagcatcagatcgaaaatcacgccacgcgcattggtttctatttcaaaataattgtgtccgtcgctatccggatcaataaacacttcaaagtcattgtcataatagatgatggtatcacgctgggtaagacgcgccttgatatcctcttcttgaagaacagctcctacatataaaaattcatcatcccacagcatcttggcggtagtttcatatttgggagtcgggaatccttctccgcttatatctacaaacggggcagtagacgccgccttattccaggaactttcattcagtttaccatctattttcaactttccatccggacgataacatacataagtacgcggttcggtcagaaaacgctcatattgttcaaaaaggctttgtgccattgccggaaaagtaaccagcagaagtaacagggtataaataagtttcttcatgtatttttcagattcaagttagttattatcttgcacttgtcccactccgcgatatagtttgatcggtccatccagcaacacggccagcacggtaatctgctcatcctgcacctgttggggtacatcaatgtagagattacccggcactgaattccaataatttttattgtagaccttgtaattcaacatagctccgttaccaaccacccatatacggttcactttgttcatcagcccttttacttccaccggaccgttaggtttgtaaggaaggtataaatacaaaatatcccccgccttattcagtgtggtatatccctggaaatgctcggtaggaatacctgcgcgagtttcataaatagcttctttatgcttcttggtccatcggccgaactccttcaacacagcgatctgttcttcaggaatggaaccgtcctctttgggaccgatatccaataaaagattaccacccatgctcaggcagtctacaaatgtacgaagcaggatatagggtgatttatagttgctgtctgtatgctgatatccccatgaatcattcatggtcatacaaagttcccaatatttatcttcgggacgcaccaccggcactccttgttcgggagtggcatagtcaccatacccctgtatacgcgagttgataatcacatttttattatccgaacgaagcaaatctacaattcctttggaattccatgcttccgaactttgctcccaatctccgtcaaaccaatacagatccggtttccaggtcttgttcagctccgccaattgtccgaaattgaacttgttgaatcgggcccaacgttcaggatcatttttataacgtacttccgtacgggttttgttaggataatcaggatgcgaccagtccaataaagaataatagaaaccaagcttcaatccttgttttctcacttcctttacaaagggagcgataaggtcacgttttgccggagtgcttttcacgacgctgatatctcctactttggtatcccataacgcaactccgtcatggtgcttggtggttatcactgtgtatttggccccactctctttgatcagatccacccagtttttcggatcatacttggaggctgtgaaacctttttcctgctccatgtattcatcgtagggcaggtagttgttaaagaaggaccagctttcggacactcctctgacagaataaatcccccaatggataaaaatacccaacttggcttgtgaaaaccattccattcttttgtccttttgctcggctgtttcagtctgcggcgtatcctgtgcccgtaaaggggaagctgcaatcagcaaacccaggaacgttaacgataatcggttctttttcatatataataggtttgattagttaggatagcatgtcggtattatttaaatttacagctatatcataggcaaagataatgtatttttatattttattctatctttgcatccctaaaacagaacaaatatgagcgcaaagaaaaagaaacaagcgaacagtcccctaagaatcgtcattattttaatattactgggacttttggcctataaatatcagttgtttgacgggaagctgcttgaaaatatccccgctatcgaaaacaatgaagaaaagcccgaaatacgtattccgactcaacatggcggtgcattggaaatcccgacgatgcaatcgggcacaggcggacagatattgaaacgtaaaggatataccctatcttataatgccgattacaaaactccacaatgggtagcatgggagcttactaaaaaagaaacaaaaggaaaagaagggcgaacagacaaattcttgcccgacccggacgtacgtggagccaaagcatatacgggagattatacaaaatcaggatacgaccggggacacatggcccctgccgccgatatgaaatggagcaaacaagccatggaggaatctttttatatgagtaacatttgtccgcaaaatcctaatctgaaccgcggtgactggaatgacctggaggaaaagtcacgccaatgggcaaaaaaatatggagctgtatacattgcctgcggccccatatatgatactaaacgcccgaaaagaattggcaacaacaaagtggccgtcccccatgctttctataaagtcatattgataaatgataagaaaaatccgcaagccataggatttatcttccccaacagcgccggacataagccactgaagaaatatatagtaacagtggacagcgtagagaaaagaacgaatatagatttcttccctgccctgccggatgaggtagaaaacagaattgaagcagagagggtacaagagttaccgtaacccatcacatacgtacgtgtggcgcaatatatacgtatgcatagccctacactgacgtatgtgaagggctacacgtacgtacgtgatttatttcacttccaacaccacgatagacttggcaggaagagtcactttcaagcttcccttattaaccttggctccggtaaattctttcggggcaaccacactcggtttctcgaaactattgtaatcacctatattgttagcggtcaaaatacggccggtaacactcttagctttcacctcacccagattcaactctatttcctgcgattcctgcaaatctacattagacaaggaaatatgaataaaaccgtttgcatcccgtgaagcggtagcacttaccatcggaacaatgcggtcgtcacgtaccaccttgcgttcacagttcagttccaaaggaagataagtagcatcttgatgcactttatacatttcaaagacatgataggtcggtgtcaaaaccatcttgtcttccttggtcagaatcatagattgaagcacattggcaatctgggcaatgttcgtcatcttgatacgatccgtatatttatggaaaacatccaaagttaaagaagccacgaaagcatcacgcaacgtattttgctgatacaaatgtccgcggaccgttcccggttcttcatcccaccaggttccccactcgtccaccatcaggccgatttgttttttcggatcgtatttatccataatagcgatatgcttcttcaataccggttctatttccaggcatttgcccatagtccaataataatcatcattagtgaactcggtagccgaacctttgcttccactccatccggtcactgtataataatgaagagaaagacctgccatgcgatggcccacatttttcatcagcacttcggtccaattatagtcataatcactggcaccactggctattttgaataaatgattgccatcataattacgacaataggtagaataacggcgatacaagtctgcataatattcaggacgcatactgcctccgcatccccagctttcattacctaccccaaagaatttcactttccatggtttttcacgaccgttctccttacgcagtttcgccatcgggctaccttgttcagaagtcatgtattccacccatttcgccatttcttccacacttccgcttcctacattaccactgatataaggctcacaacctatcagctcacacaagttcagaaattcatgtgttccgaaactattatcttctactgtacctccccagttattattgaccatccggggacgattctctttcgggccgataccatccatccaatgatattcatcggcaaaacacccccccggccaacgaagcaccggtactttcaagtccttcaaagcctgaagcacatcattacgatagccttgggtattgggaattttagaatcttcacctacccacaaacctccatagatacaagtccccagatgctctgcaaattgtccataaatatgtttactgatgatttctttcccttgctcgggatgtacattgatagtcgctttttgttgagcaaataccggcattgcagcgaacaatgccaagcccataagtgcatttttcatgattaaaaataaaataattaatatactattttgcgttctcgttttttgtttggtcaaatttacacattttacatcaaccggatagtggacaaaattgtatttttaggggtacaaaatcgtcaaaagtggaaaagaaacggatatttgcctatatttgcatataaaaaagcccgatagactaaaatgaataaaaagaaacgtactattgtatggatagttattcttataattatcctagcgggagcaggtggcgcaggaagtatatattactatttctttgccaaacagctccaacttacaaagactacctatatttatatagacagagatgataacctggattctgtgtaccataaaataatccggaacggacatcctaaaagtatgttcggttttcaatatctggcagaaaaagagaagtatggcgacaatatacggacagggcgttacgcactcaatccttcagacaatatgcgctatctcttccggcgtctttctatgggatatcagactcccattaatctgactgtacccagtgtacgcaccgtggacagattagtgcgggccgtttcacgccagctcatgattgattctctggatattgccaaattaatttccgacagtgcttactgtgcacaaatgggatatacccaagagacactcccttccctttttattcctaacacttacgaggtgtattggaatatgagtgctgacgcttttatgaaacggatgcaaaaagaacatgccgccttttggaatgatgaaaggttgaaaaaggctcaacgtatcggacttactcctgaagaagtatctactctggcctctatcgtggaggaagaaacggccaatggtcctgaaaaacccatggtcgcaggactttacatcaacagattgaataaagggatgttgttgcaagcagacccgacggtaaaatttggtttgcaggaattcggattgaaacgcattcttttcaaacatctggaagtggactctccttataatacctacaagtatgcaggtttgcctccgggacctatccgaatcccatccatccaaggattggaaagcgtactgaactatacacagcataattatatttatatgtgtgccaaagaagatttctcaggcactcataatttcgctgtcacagcagcccagcatcaagcaaatgcaagacgttatcaacaagcgttaaaccggcggaagataaaataaaagggaatacttcccttttattgaaatcaccctcgttacaactgtatgaactgcactcctaaagttttgtgtccaacttttagggtgcagttcaacttctgtaacgagggtgatttttagttcatgagggtttcgacacaccttccaaatggatagataacttaatgtctacgtatagaatcttcttctttggaatataaaaccaatacagaccatttctcgcacctataagtctctcaacaaccgtcctttgtattgtcctttcttcgcagtaacttttccatattccacagcatgaaccggacaaatatgataacaagcaaggcattgggtacagttatctccccaaacaggacgatccgtcacttttatattattcacaggacaagctttctcacattttttacaagcaatacaagcctctgtagcatgaaaaggtttaggagacatcaggaaagtattgaaaaacggacgcaaaaaataggatttagtaaatggaagcgcaccttcatggcaattataatgtttcgtttgaacccttgatgctatctcctcgttaataaagcgtacacgggcaacagcattatgcactttccgggtttccacatcttcatcgtctacatcaaaacctggcaaagaaacataagtattcggcatggtgaccgagtaaccggcagcacaccgccatcccttccgggcaacagcagaagaaaagagttgtgcagtccgacccgtatcatctccacaagtacagacaaagaaaagatattccggcttaatcatcttcaaccgacggataaaacgaagtacaatctccggaggtccccatgcatacacagggaaaacaaaacctactttttctccttctcttagtttatactccttattcttatctatttccacagctatggagagcaattcctcattctgtccttccgccagctgccttgccacccaagctgaattacctgtacctgaaaaataaaatatcatatccgtattatttttataaaaaagaagcgatgctaatctcttgaattaacatcgccttataatgaagccgcaccagtgatgcgatgaaactccgaatgacaggttttgagtgctctcctcctttgtaatccaccggcataaatgctacccgaaggcgtggcccgccattggaagatgaagctatgtctcggttttcagattagtttgatgagtttcccaatccaactaatgcggctcgcttttcatctctttccgtatgacaaatatacgccctttttatgatataaacaagagtatagcaggatttgtttgttaaaaataataagcaagaaaataactctctgtaattctgcttattgttatttcaaattcttaatgaaacatcacaaagcatccgcaataaaaaagagcaacctcatagagattgctcttttaataaatctttatatcaccgtttacagaagaattaagctacttttgctttagcaacaattgctttgaatgcttccggatggttcatagctaaatcagctaacaccttacggttgatttcgataccagctttgtgtaatgcacccatcaatttagaataagacattccttccagacgagccgcagcgttgatacgctgaatccacaaagcgcggaagttacgtttcttgttcttacggtcacggtatgcgtaggtcaaacctttttcccaagtgttttttgctactgtccatacattctttcttgcaccaaaataacctttggtaagacctaaaattttctttcttcttgctctagaagcaacatgatttactgatcttggcatagttttaattctttttgaatgttagcgccactgtttcacacggtgaacttcaagctaaagacattcggttaatactttaaataatacgtttacgctttcgttgtttttagattacttcatgcaaagcaattccttaacctgatccaagttagcattagctactagacctgagtgtacaaggtttcttttctgctttttagtcttcttagtcaaaatatgactgtgaaaagcgtgctttcttttgattttacctgttccggtaagaacgaatctttttttagaaccggagttagtcttgatctttggcatcttgtttttaattttaaattattattcaaatggtggtaacgcactataccggcgcgttacgcactctttttttattcttttgcttctactgcctttttcggattttcctttttagcagtatccatttctgccttcttcggagagcccgctttcttcggagccaaagaaatagtcattctcttaccttccaacaagggcatctgctctacttttgcatattcttccaagtcattcgcaaaacgaagcaataatacttcgccttgttctttgaaaagaatggaacgacctttaaagaacacatatgctttcaccttgtctccgtcctgcaagaatccgatggcatgtttcaacttgaagttgtagtcatgatcatctgtttgaggtccgaaacggatttcttttacgtttacttttacctgtttagccttttgttccttttgacgtttctttaattgataaagaaatttagaataatcaataattctacaaactggaggaacagcattgggtgaaatttcaactaggtcagcctcatgatcctcagccatttttaaagcttgagctatcggataaactgccggttctacatcgtcgcccactatgcggacttctttggcacgaatctgttcattgattctgtgttgcccttttaaactgtcattcttcattaaaaaacttttagttcctgtttgtttcttcttattttaattagtatttctttatcttaacgcaaaagaatacataaaggtttaacaatgtgctcttttgcaaacggctgcaaagttaccatttatttatcatattagaaacttcttcggcaagattttttccgaattcttctattttcatggttcctttgtcgccttcgccctgcttgcggactgcaacttcaccgttttcagcttctttctcgcctacaatcaacatgtaaggaatacgcttcatttcattatcacgaatcttacggccgattttttcattacggtcatccacaatagcacgaacatcgaattttctcagttccgctttcacttgttccgcatactcattgaatttctcagaaataggcagaatagctacctggtcaggagtcagccacagcgggaatttaccggcagtatgctcaatcaatacggcaacaaaacgttccattgatccgaaaggcgcacggtgaatcattaccggacgatgcttttggttatctgagcccatatattccaactggaagcgttcgggcaagttgtagtctacctgaattgttcccaattgccagcgacggccgatagcgtctttcaccataaagtccaatttaggtccatagaatgcagcttcaccatattccactttcgcagtcaggcctttttcttcgcaagcttcaataatggcttgttcggctttttcccaattctcatcactaccaatgtacttttcacggttcaccttgtcacgaagagaaatctgagcttccacattctcaaaattcatagacttgaacacaatgttaatgatatccatcacgcgaaggaattcttccttcacttggtcgggacgacagaacaagtgggcatcatcttgcgtaaaactgcgcacacgggtcagtccgtgcaattcaccactctgttcgtagcggcatacggttccgaattccgcgatacgcaacggcaggtctttataagaacgtggagaattcttataaatcatacagtgatgaggacagttcatcggtttcaggaaatattcttccccttcttcgggtgtatgaataggctggaacgagtccttaccatacttggcgtagtgtccggaagtgatatacaggttcttgttgccaataggcggacacattacttcctgataatcataacgggcctggatacggcgcaagaaatcttgcaaacggatacgcaaggcagtacctttcggtaaccacatgggaagtcccttgcccaccatatcggtaaacatgaacaaatccatttccttacctatcttacgatggtcgcgtttcttggcttcttccagcattaccagatattcgtccagcattttcttcttcgggaaagttataccataaatacgtgtcatctgcttacggtcttcctgccctctccaataagcaccggccacagaaagcagcttgatagctttgataggagcagtagaggtcaagtggggaccacggcaaaggtcggtaaacgcaccttgtgtataagtggtgatgtgtccatcctccagttcggagatcaattcacatttataagtctcacctctttcaccgaatttcttcaacgcatcctctttagcaatgctctgacgcaccaatatttctttctttgcagccaactcggccatcttggcctcaatagctggcaaatctgcctccttaatgattgcttcacccgggtctacatcatagtaaaaaccgttttcaatggccggaccgataccaaactgaatgcctggataaagttcttgcaatgcttcggccagcaagtgggcactagtgtgccagaaagcatgtttgccctgttcgtcttcccatttataaagaacgaagtttgcatcttcattgatagggcgagataaatcaatcgtttcaccgttcacgccacaagctaaaacatcttgcgccagccgtgaactgatactttctgcaatctgcagaccagtaactccttcgttatattcgcgaacagagccgtcggggaatgttatctttatcataatcttctatttattttctttcttgaggatgcaaaaataacgaaatctttttgacttatcctctttttagcaaaaaaatgttattcttttcgttccgtaaagcgtttgattatattgtaagcagagaaaagtcccaactcaccagctttactcaggtcctgtataccttgcctgttgttacccaagaaaatatgtgtcaagccgcgattgaaataagcatccgcaaatttaggatccaactggatggctctgtcataatcaacaattgccgcacgatagtctttcaagatagaaagcacattacctctattataataagcatagacaaaatccggagccagctcaatcaccttgtccaaatcgcgctttaccatttcatagtccgcagctttcacagcactcttctctcccggattggctttcaaatcatactctttttccatcttctggtattccagctgcttataacggattaaagcacgattgaaataaaccggaaagaaattaccctcaataataatagcctgattcaaatcttcaatggcacttgcaaaatcctgcaccagataaaagtccaatgaacgtgcaaaacgtttgttcacatcattcggatcagccacaatagcagcagtctgttcgtcaatggacgcaaaatgttttgtagcttgttcttccgtcagaggagcttcctcattagttataatcagacgaccgggaagtactttctgattattcaatgtttcaatgaacttataatagttgacctgtcgtttcacatcatcgtgcttttcataataggtaagcacgaacataggctggggaacaatattcacattcttatcctgcacgcgtccacgatagtcactcttatatttttcttctccctcttcgttgtcggcaaccacaatcttacgatagttgttcatgtttttgtcggacttcttacgggttttattattctctgtattatcggcagtctgcttattaggatctactccgttctgtttatccagttgtgctttcaacactttgaattcatctgcatcagcaccttttacatcccctattttcctacgtgcctgcgctctgtactgatagcctagcaaaaaattgggatattcatttatcaccgtagaataatctttaattgcccctttataatctcctgtctgatccaataacagaccacggttgaaaatagccatcatattgtcgggctccatttcgataacaaaattaaagtcttgaatagcccggttgtcatcgcctacttgtgcacgtaataagccccggttataatggccgatgaaattattgggatcaatatccaatgcaatatcatagtcactcatcgctcctctcaggttattctgatggtaacgggccaaagcacgattgatatagacacctgaattccgggtggacagacggatggcatgatcaaaatcagcttccgcatctttatatctctgttgctgcagacgaaggatagcacggctggcccatgtatctgcatcataacggtctatttcaatcgccttaccaaagtctttttcggcagccaaagtatccttctgcttcaaatccacctcaccacgcatcaaataggcctttgtatatcggggggaaatagcgatcagcttatccagatcattcttcgcccccttataatcttcctgcctgatacggcaaagggccatattatgccatacccctatattctcaggatcaaactccaatgccttggtataatcttctatagctcccgcaaaattattctgttggatccgtgccaatccacgtacctgataagcacttaccacaaacggattccgctcaatagcttctgaacagtcactctccgccccctgaaaatcatccaaatttatcttcgccagacctctatagaaataaggatcagacaaataaggctttgcattaatcacctgattaaaatattgaatcgaaaggacataatcctcaaaataaagcgcattacgccctatcgccatcaccctgtccgtatttatctgtgccgaagctagtacagggaacattattaataatgtatagagtatccgttttatcattttgtatttataaaaatacggttttccccacaaatgcgccacctgtggcgcataaatcaaaatcgcggagttatcattttatagtcttgaccttataggaacaacgcgccttgcccttcaacatggcccccagctttcctttaatcatctgtttgcgtaatgcagacaaatgatcaatgaacatttttccgtccaaatgatcaaattcatgctgcatgacccttgccaaatagccttccacccactcgtcatgttctttcagctcctcatccaaataagtcacatgaatacggtccggacgtttcaccgtttcatggatacctggcaaactcaaacaaccttcttccatgctgacttcttctccacccacttctaaaatatgaggatttatataagcccgacggaaatccttaaattcgggcaattcatcagacatcacatccagatcaatagttacgacacgaataggcaaaccaatttgcggagcagccagacccacaccatctgcacgattcatggtttcaaacatatttgctatcaactctttcaaattagggtaatccggggtaatatcctctgcttctttacgcaacaccggttgtccatacacataaataggtaatatcatttttcttaatctgtttttatttattaaatatatttcttcgactccaaataggactgtaagattatcgtagcactgatttcatcaactaaagctttattctgcctatcttttttcttcaaacctccatccaacatggcttggtgggccaatacggacgtaaatcgctcgtcaacaaactctatcggtatatccggtaattttttccttagttgattgacaaaagggacaatattacgcatattttccgactcttgattattcatttgcttgggatgccctacaatgatgcgttccacaggctctttttccacatatttcagaataaagtccagtagttggtgtgtagggacagtcgttaacccgtttgcaataatttgcaaaacatccgtcacagccacacctgtgcgctttttaccgtaatctatcgctaatattctactcatatagtttgcaaaaatacaaatttattccatacctattttatatataaagattaaaatatgctttttcaactgttttttcaaaagaaacgattcatttcgtttaattttatttgctatttaaaaaatagtacttatttttgcaccgaatatgtggcttaacgtaagggtcgcataatgttaaattgaaacaagtatttgttataaaatgaaaaataagagctcttcaaaaggagttttatatagatgtttgttgtattgtatagctatattgttgcttgttatgattccattaaaaagtttcagtcaatcaacaggagaattaacaacagatagtcttgtaaaaatgggatttgaaaatgtaagatggacagatactcctgaagaaagagtttatgtggttgaaaacagtgcttacaaaattcaagcgttgggtattagaaaggctgtagatatcatacagtcaatgggattacccaaggataaatcttgtaagttgattgttaccaactataatatacctcaggtctcactgacctatcagcctcttgccggtgacacaacagtggtaagtggtgaagattggaaagtcagttatgatataggtgacagttgggacaaggtgaagaaagaaaagaaaaagaacagttcgctgtttaaagtagatatattggtatatccgcagctatactttaagaactatatcattacacagatatatcaggctttattagagtttagcccggcggtagaggtgtcgctttggccaggaatgaaatttaccggacagattgtatttcctgtatacaatgatggatatggagaaacagccggaaaaattcatccaggatatttgacattagcacaaaaatttagattaccatataatatacaaagtacagtaactattggtatgtttgattataatacatatggtgcagatttaaatttgttttatccgtttaaagacgaacgtttttctttggaaggaagaattggctatgttggattcggatattggcatggttttaaatttcgctataatgataagtacactacttattggtctgtagggggaaacttttattggccaaggtataatacacagtttaaattgagagctgaacaatatttattaaaagaaaaaggggtaagatttgaaatgatcagacacttccgctatgccagtataggtttctacgctgtaaaagcagaacatgctaatagtaatggagggtttaaattcatcgtcgcattaccaccttataaatataaaagacataaatatataccaagggtttctacctcattgggtacgggtataacatataatgcaggaaatgaaaaatattattataaaatgccatatagtaatgcaagtgacaatataatgcaacaaaatagttttaatccatattttattaaatcagaattattaaatttttaattttattgagatgaaaaagaaaagttttttgagcggtattggtgctaaattagcattagctgcagtggctttaacaacagtagtgtttacaagctgcgaaaaagaagaatttaatgtagaaccggtagaacttcctaatgcaagtgcaactgttgttgtaactgtttatgatttagctactggtaatattattagtgatttatcaaagactgaaactattacagccgcttctgatggtactattgctgcaacaaccaaaacatatgaagcttctaaagaaggttatttttcaggttcagtaacagtttctattcctgctttagctaaaggacagtatgcttatattcctgctaatatttatttgcaatcatatttgtctgctgccaaagatcctgtcataacagaagatcctgaaactaccatcattgtagatgaacctttgaaagtaacttcttacaccaacactgaggaaaaagctatagataaaaacttgagcctcactgttaaagcaggacaacgtattacgaatatagacgaagtgaaaaactatattgaatcaatagctccttctgctagaaatatgtcttcagctgaagtcaacaaagtattaaacgctttagtgaattcatataattcgggaattcaaaatacaacaatagaacgttcttattctattcctgcattaagcatatttactgtatctcccaaagcaacttcaacaactacaacttgtactattactacaacagttgacggaaaagcatattctatacctagcgttatcattgaaaaagtaggtacatttgttccagaacctactacagaatctattgatcacggtcacggacacggtcatggagataacggcaacgcaggtggtggtgcaggtggaagataataattaatcatctatcggttatttgttcagttattcaccaaaaaatataataaaaatgaaatataaattcttaacactgtcacttttgttggcaggagcttgtgcaactacggttatggcacaagatactaattattatactccgaaatggagtgacaatatttttgtcagtgtaggtggaggtatccacgctattgaaaacgatggtttcaataagctggctcctcacttcagcatctctttgggtaagttaattactcccacatgggggatacgtggtcaggtaaatggtatcacacaacacttgtgtttggataacagttactacgaacacaacaagaactacgtaggagctaacattgacgctatggtaaacttgtcaactctgtttgcaggtgctaatcctagccgtttttttgaagtatatggttttgctggtcctatgctttctgtagctaagtcacagaacgtaacaatcaagaatgatggaacaatggttcccgaaggtgaaagcaaagcaagagcacgtattggtgcatccgccggtgtaggcttgaagttcaacattaacaaatattgggctatcgatgttgaagctcgtggcgccatcgctccttctatctttggtaatatcagtagccaccgtaaagctgaaggaacaggtatgttgacagctggtgtcagctacatctttggtggcaagaagtttgctaaagttgaagaccgtgtagtagaaaaagaagtgatcaaggaagtgatccgcgaagttccgaaagaagtagttaaggaagtgattaaagaagttcctagcgctgcagaagttgctatcttcttcaagatcggtaaagcaaagatcagtccggaaggtatggttaatgtacagttaatggctaaagcaatcaaagctaatcctaacgctaagtacaaaattgcaggtttcgctgataaagctacaggatctgcttcattcaaccagactttgtctgaaaaacgtgctcaggctgtttacgatgcattggttgcagaaggcgtaaaagaaagccagcttgaaaaagttgctatgggtggaacagataacatgtttggtaagaactatttgaaccgcgtagttatcttggaagtaaaataatcattgatacctgataaaactctgatagattaaagaagggagtatcgtaacaaacgatgctccctctttttcttcaactgcttttttgatcacataagcagcaacagcaaataaatcatataacaagaatctacagatcttggctatacaattctggaaacttgaggtagtatttaccgaatcttgtaacaagatatcgggctatacaagcaaaaaactgatacataaaaacaacaggacgtatttagaaaagaacaagagcttttttaaatacatcctgttgtttttaaaaaagctcaagacgattttaaaatattctatcgtatagtgacacagactgatatataagcaacattatacaaacaaaagcatttactatcctcaatagaccagcttcacattgtcaacccaaagtgtatttccaggagaaccgataaaagcccccccatgactggacgaaaattgcagtatcatgtgcgtaggattttcattggcctccgcccatcctatttctttaatcaagacactttctcccttactatttctagtataatccctctctctcaaccccattgtttcatgattataagacggatgcttggttatatcaccatacagcacttcataagtagcaccatttacccaaccatccgaatccttatcatatttcatcaccatagttcctaccctcttcgccgtaatatttccttcagcgtcctccatacgtttttgcaaaaagaaaacagttatcgcacaatcctgccctgccacctgacctttcttgctgaaacctgtcaaccggatacgatctttctcaccagacatctttaccttataatcataacggacagctttgggacgttgagtaaaaggaactccccagttcatgttcttctcagcattcttagttcctgttataggctccagcatatcacctaaataaatggatccggctgccaatacagtaatattcaccatccccaatactttgacgctctctatatgcgtttccaggcgagcacaatatccattgtcccgtttgtctctataaacagaattatttgttttaacaatgcccactaccttagccatcacattagaggttccccaaggagaccctcccatatttttataaggtttgttaccatctatttcctttgtaggacctatctcataaagaagtttggtattgccgcctataacaccggactcatgaaccttacggattatccactgatccatatctccgtattttataggcaccaccttttcctgggcaaagccatacagcggtgctatagccaaaagagcaatgaccgataatctgccataatatttcatacccttagtttttattgttgtttagaaccgacaaagctataaaaaaaagcggcaacttcacagttgccacttttaataaagaaaaatagactatattttcttcttaatttaccaaaaagaagtcattaatatactctatatagtaaccatgccttctggaaatcgtcacggttaggatattttgccttaaactcctcctttgcctgagtagcctgcgcacggtcatcatatgaagatgctataacgcgatacatatttctttcagcattataaaccactttggcattataaccttgaccatccaaatattgtttcaaaccttctgcattcgctttcacaccaaagctaccacatactacgctatatgcttttaagccgtcacctgaaaccaattctactttctcttcgcgaaccggaccggcaacaggagcagttgtcacaggggcagatactaccggagcagcttcaaccggagttgcttctacctgatcagcaggagcttcagccaattcctgttgttttgctttttcataagccttcttgtaagcactttcgctagatttacatgaggaaaatgccaaggctacgcacaatcccatacccaacacaactaattttttcatgattactcaatcttttataaattaatactctagtttaattccattatattggtgcaaaagtagcaatatatcaacagctttcacatcaagaatggagttaaatttagttaatcagagaagaatctccaatttctattcaaaaatagacaaaataaacaacaacattcagttttatttgttagatttgtaaggtacaaaaaacaaaaaaactatgaaaggattaagtattttagctgcattcctaggcggagccgtagttggtgcagcagcaggtattttatttgctcctgaaagcggagaagacactcgtagcaaaattgctgatgctttacgtaaaagaggtatcaaattaagtcgcacagatatggaaaatctggtcgatgaaattgcagccgaggtaaaagaataagcaacgcccacaaaagtgtattgtcattccggacttggatccggaatgacaataatttttaaatcaaaactccacgcatgtttgcaaacgataaaaatatagataatctgcaacaacttctggcagagcttaaaaagtacgcagagttacaaaaggattatgtaaaattacatttagtagaaaaacttactatactgatatcaaccctcatccttgtctttatattattgatattaggtattatcgcacttttctacttgtcatttacattggcctatgtactcgaacctcatgtaggcgggcttatggctagctatggaatcattaccggatgcattattctgctgattctgttaatcgttttattccgcaaacggctgattgtccagcctatggtaaatttccttgccaacctgcttttaaatgacaactgattatgaaagagaatactcctaataaaacgcccatcatcactttggaagtgatagcacaacgaaaagctgagaagttggaagaagtacagcaagctaaaaaagaaatggtacaaaccatacatgaactttttgcgcctgtagaacaaaaaggaggcgtagaaggcattatgcaacatatcaatacaggaatcgccgtttatgacggagtacggaccggtatcaagatcatacaaagaatcagaggatatttcctgaaaaagaagaaataacttagtattaaccacaacattttatccacatgaaaagacagctactaggtgtggcagcaattttgttgtcaatttccacgtatgcacaggacaatccattatggatgcgttattgtgccatttctccggatggaaccaccatcgcattcacctataaaggtgacatctacacagtaccctctacaggcggcagggccagtcagattacaaccaaccctgcccacgacaccaaacctatctggagtcctgacggaaaaaaaattgctttcgcatcagaccgcatgggaagtatggatatttttgaggtaaacaaggaaggaggtatccccaaaagattaaccacccattcgggtaatgaaacaccggtggcttataaagacgccggacacattctgtttctagccaatataatgccaactgtagaagacgcacaattcccctccggacaattccaacaagtatatgaagttaataccgaaggaggacgccctgccctcttctcttccatgccgatggaagatatcagtatcaatcacacaggtaatactttgctctaccatgacaaaaaaggatatgaagatccttggcgtaaacatcacacttcatccattacccgcgatatttggctgtgttctctgaatggaaaccgtacctttcgcaaacaaactactttcaatggtgaggaccgcactcccgtttgggcttcagatgataaatcattctattatttaagtgaggaaaaaggctcatttaatattttcaaacgtgatattgacggtaatacatccaaacaaatcaccaaccataccaaacatccggtacgcttcctgagtgccgcctccaatggaacattatgctatggatatgatggcgaaatctacacggtaaaagaaggtgccattccgcaaaaagttcagatttccattgtcaccgacaagaacgacaaagatctcatccgccagattaagcgtagcggagcaacagaaatatccctttcacccgatgcaaaagaaattgcttttgtactacgcggagatgtatatgtcacatcaacagaatacagcaccaccaaacaaatcaccaatactccgcaacaggaacgcgatattcacttttctccggacggaagaagtattgtttacgcttccgaaagaaacggattatggcagatttatcaaaccagtctagctaaaaaggaagaaaaacagttcgcttacgcaaccgatatcaaagaggaaagactgaccaattcggatatcacttcattccaacctcaatacagtcctgacggcaaagaagtagcctttcttgaaaaccgtactaccatccgtgttctgaatctgaaatcaaaagctgtacgaaccgtcatggatggcaactatgaatattcatacagcgacggtgaccaatggtatcaatggagtccggacagcaaatggattcttaccaactacataggtattggcggatggaataacaaggatgttgcactggtcaacgcatctggcaacggagaaattcataatctgaccgaaagtggatacagtgacggcaatgccaaatgggtattggatggaaaagccatgatttgggaaagtgaccgcgcaggattccgcagccacggaagctggggcgctgaagcggatatctacatcatgttcttcgacttggacgcatacgaccgtttcagaatgagcaaggaagaacttgctttgctggaggaatcagaaaagaaagacaaagagaagagtgaagagaaaaagaaggctgataataaaaaagataaaaagaaagactccaagaaagaagatgacaagaaggaagtaaaaccactggttttcgaccttgaaaacagccgtgaccgtgtgattcgtctaactgtaaattcttcacgattgggagatgctgtattaactccgaagggtgacaaactatattatcaagcagccttcgaaagcggatatgatttatgggaacacgatcttaaagaaaacaagactaaaatcgtcatgaaaaaagtcggtggcggagccctgcttcctgataagaaaggcgagaatctgttcctttgcagccaaggtggtatcaagaaagttactgtcagcagtggtgaaaccaaacctgtagaattcgaagctttcttcgactaccaaccctatggtgaacgcgaatatattttcgatcatgtatggcaacaagtagaagataaattctatgtaaaagatctgcacggagtagattggaaaggctatcacaaagcatacgcacgctttcttccatacatcaataacaattatgattttcaggaaatgctaagtgaaatgctgggtgagttaaacggttcacacaccggagcacgttactactcaaacggtcctacactatccacagcgaccctaggagcattctatgacgaaacttatgatggtgacgggctaaaaattaaagaaatattagcaaaaggtccatttgccgtgaaaaaaacggatgttactcctggttgcatcatcgagaaaattgacggcaaacctatcgtaaaaggacaagactacttcccgctactggaaggcaaagccggaagaaaagtgttactggccatatataatccggctaccggcaaacgttttgatatcaccatcaaagctatcagcacgggcgaacaaagtaacttgctgtataaacgttgggtagaacgttgccgcaatatagtcgataaattatccgaaggccgcataggctatgtacacgtaaaaggtatggacagtcaaagtttccgcgaagtatatagtgaagtattgggacgctgccgcaacaaagaagctattattgtagacacacgccacaatggaggcggctggctacatgatgacttggccactttattaagcggcaaggaatatcagcgtttcgttccacgcggacaatacataggcagcgacccattcaataaatggctcaagccatcctgcgtattggtatgcgaggacaattacagtaacgcacatggcttcccatgggtttacaaggaattaaagataggcaaactgattggcgcaccggttccgggcacaatgactgccgtatggtgggaaaaccaaatcgatccgagcattgtgttcggtattcctcaggtgggttgcatggatatgcgtggacaatatgcagaaaatcaccaactttctccagacattgaagtttataatactccagaaaaggcattggcaggtgaagaccagcagttggaagcagccgtacaagaaatgctgaaaacaataggggaaaagaaataaaacaatcccatcctgataaaaaagaaaaaagacagatgcgaagatattttcgcatgcctgtcttttttcttgctctattcacatccgtccaagacaaagatggctcatccaacctttataaagcgatcatccgatgaatataagacatacgctttatatccgtcggggatattatcaaaaggaaacaatatgaaatagttcttgatcagaagaaagattctcaagcctccttcgctcttttttcccaaagacgagtcatatcttccaaagtctttccttttgtttcaggaaccatcttccatacaaacagagctgcaagcacacaaatcacgccataaagcccataggcaaacaccggactgaattcatacatggcaggaaaagtggaagagaccagataattgaatatccactggaaagctacagcgatagccactgccttgccgcggatagtattcggaaatatctctgcaatcaacacccagcagataggtccccatgacatcataaaaaatgcagcataaacaatgatggaaagaacaggaagaatacctcccacctgaaactcatcacaaaatgcaacacagaatgcacctacagccataccaatagaaccaacaatcaacaagggtttacgtcccatcttctctacggtaaagatagcaaccaatgtaaagagaatattaactacccccattaccacagtctgcatcataccatcaccaccgccaccgattttctcaaaaatacgcggtgcataataaagcacagcattaataccgatagcttgctgaaatacagaaagcaagataccgactacaataactgtcaacccgtatgtaagcagtttctctgttttctcggaagtcacagcctttatttcagacaaaatagttttagccttatctgttccatttactttttcaagtacagaaaacgctttatcatcctgatgggtcatagccaaatagcgcggagtttcaggaaccaaaaacaataaaatgccaaataatgcagccggaaccgcttctgaaccaaacatatatctccaaccatcggaaacaagcacttcatccggcataccatctttaatcatataattcacaaaatagactaccaacatgccaaaaataatagcaaactgattacaagaaaccaatttaccacgaatttcggaaggagcaatttcggcaatgtacatcggacaaacagcagaggcaagtcctacaccgatccccccgatgatacgataaaagttaaaagcaaggatcaatgcaaacgaagtatctcctttagagaaaaataaaaattcgggataataagagcctaaagcagacagaaagaacaataaagcagccagacgcaacgaattacgacgtcctaaccccgaagcaaaataaccggaaaaagcactaccaatgacacaacctatcaatgcactggaagcagtcacgccatgccagaaagcatctaatcccaaatgtttttgcagagcctgctccgctcccgaaataacagctgtatcataaccgaaaagtaaaccgccgagaatggctataaacaccactcccatcagatagaaattgtttttcttgtttttcataataaaagaattataatagttttcgtaataaatacaataacaaagctgtgcgaaattaatcattaatacgtaattctattataattctccaaccattttaaatctttttcacatcaaggataaacaagattatttcgtctgaactgttctatgtcttccttttttaatcctatcttatccaatgacttaggaagattatgatcattaagataataacgcggacgaatgagatattgtctatttgctaccgataggctatctgccctataaggtgtctgtatccctgccaaattcagcatggtatgaaacacagaagcatttcctgctaccggtttttcacggttctgcaatatagcttcatgtacttccacattctcttctctatatgctttggacaaccaaattaaaaatggtacatgcagttgataataagacgggaccggggatgcatgtaaaaataattttcgattatcatcaaaaatatcctctccatgatccgaagtataaagcatagccgaaaaagagttcattttctgcaataaagtgatcaaagaagccagaaaaccatctgtataacggatagtgttatcgtatgcattcatcaaatactctttattctcatatttggcgtctgtcagattatccggtttaaagacagacatggattcgggataacgttctttataattaaaatgtgatccataggcatgcagcacgataaataatttttgatgacctgcctttagctcctcttctactagaaacaatagttcgtcatccgaaatattggctcctttcggagtgtctttcttgataaacttccaatcatctgcctccatccccaaaaaatcaataaaagaatggttaggaagctggttcgaaaaaaaggctgtatgaaatcctgcctccttgaaagcggtaatgattcctttctgtctataaagacagtcataatcctcagccgaagctgccgaaagcaacataggcacacttttatgagtagtattagactgggtaagcacatccgtgaaagttaccaacccctccattttatcaagtaatggagtggtattcctttcataaccataaagtccgaaattacaggcacgggccgtttcccctatcaccaagacataaacttcccggctgtcttcatcatgtgcggcactggcattaaaagtaaaatcccttgaagtttccgcatatccggcagtttcgcccgcacgttctgcagccaatactaaattataacatacattagccggatacatttcaatctttacttgataatcacgttgcgtcgcatagcagataacagtcaataacactcctgcaacaatgcctgccaaggcatacttacgttgagaacgaataaaagaatattccaactgattacctcgggcccatgagaaacctcccaagaccaaagcaggaatgtaaacaacaaaaacaccaattacagccggcagtaaattatccaacagttccatcacctccccggaattagtagttgtcagattcaggaacatatctactgcaatgatagaacgcccgaacaggtatagcaataccaattggaatgccgcaaagaaaacaaacggaaataagatccaaatagtcttcccaggtttacgccccaatgtcataatcaaccaataaaccgataccggcagaatgacattacaaatacgtgccaaaagtgtcatttgttgttctgtaaaaaacaatgccacattgggaatggccaagacaacgatgaacagaacgaacaatcgttgtggctcacaacaccactgaataaattctttaaaatgcttcatttatattaaaaataaaaccagactgtccattttttccaaatccatagtccagacgaacatttacattctttttaaactcccaacgataacctattccataattaggcaacactctgtccatgcgcaaagcactgaacttattgaatacagttccggcccctatccaaactacaacaccattacgtttccatacatgctgacgcaattccacctgcccctctattttatgcttgtcacgatagcgcccttcgtaataaccacgcatggaatacgaatttcccaacagcgccatcatagcccacgacggattaccgaaattaaaagtaccgcgtaattctcctgccaacaatcctccttcccatacaggatgataataactggtacgcaaatccgtagtactgaatgcataatcgtttcctaaaaacttaagacggaaacattgggtaatattcaaataatatcccttatggggattagtcaacacatcgcgcgaatcatatgccaaagaaaggcccactccataattagcagtagtaaggttcattccctccagtaatccggggcgttccatattcttaccatgcacataatcataagatgccataggacctatatataaattatccgctatccgaaacaaaaaactagctttaatttgtgcttgccagcgatctaaatcagattcattggcatctacattacccatatcgtaccctattccccaaaacttggaaggaaaggaataaaaataaagagtataatccagccggtatttgtcctgcggaaagatatgagttccacgtatccccaacatatagaagccaacagtggaaacatctccaaataaagatacattggacgggggaagaagcatgtcacttctatcagcacgataaagccccgctgccaccagtccaagccccagtttggtatccgtactgtaatgtggtccgccaataatactaaaatcaaatttcttatgattcttatctttattagcatcattaaaatagtccagaaatcttttgaaaaaagtccttttctgtactgtgctgtctttgtgttgcattgtcgtatcttcaggcaaataaaacagaccgccctcttgcgtgactgccaaagccgcatctgccatacatataaagattacgatcaaaaatgatattttcttcattgtaacctgttattttttccactgttaaaacaagctttacagtaaacataaactgataaaaacaaataaagcagattgggatacaaagatagccaaacctgctttattgtgactttttttataataagaatctggtctgaatttacctatttctgtcctaaataccttataccggtcgcttttctgtaatcagccaacgcaatcttctgctcataataagattggataaggtttgtatatgcctgtatccatgtcagctgtgcagaaagcacatccaaaatagtcaacttaccttcagtataactaaaagtgttcaaatccaaattctcttctgccagtttgcagttctcctcggcaatacttatctgacgggtattctctgtcagactagtccacgccttcgccacttctttgcttatttggtcttgcttatcttgcaatgcatactgcttgcccaataaaatagccttctgtgcagccgtcgatttaaagcgggctccccaatggaaaatcggcaatttaatagaggcatacacattactattaaacatagtttcgcccgaaatgttcaacatctgtgttccccatgtctctttaaaaccgatagaaagagaagggttgtacttggcggcagccagacttacctgtcttttctgataatccacatccaattgggagatagcataatcgggacgcacattcaaggctgtttccgctccaacaaaggcaggcataggcaatatggtagaaatagaatccgtcaaatccatttcagccagcgattccaatcccatcagtacattcatattctgcaaggcgacctgataagactgatagctgctggaacgttgcaattcagcctctttcaaacgagtctgcatctgaatgagatccgtcttgctgatatagccatcatcgtacttatcttgcagcactttggtcaactgctcaataatctgtacatactggcacatcgtttcatacatttctttttgtgcggctgttccccaataactggcttcagcggcatagataatattatccgttgtcaaatccaccgacttatccgccatctgagtttgtatttgggaagccttataattgtgatagatactgccaccggcataaataggttgtgatacccctacttcggcactgtatgaatcgtgctccataggaacagccattccgccaaaatccatctcgtatttgttaatacgatactgatagcttcccgttgcatcaacagccggaaagaaagcggtttttgccgctttcatagccttctgcatagctgtacgttgcgccacactctgttttaaggtttggctataatccagtaccttttgttcaaaggtagaataatccacgacagtctgagccgaaagtgtaccggtcatacaagccatacttataatatagatcatcttagttttcattatctgtctgctctgattttaaagaaaatacaataagttaccggaagaacaaaaatggtcagtatcgttgatacgaacaaaccacccataatggtagccgccatacctgcaaacatggcatcgcccaacaatggaagcatacccagaatagtagttccggaagccatggtcaccggaacgatacgcgtcttggtagcctcgaccacggcaggcacagcaccctttccatccttcaactgaagtccgatttcatcgaccagcacaatggcgttcttgatattcataccaatcaatcccaacagaccgaggatggcaaagaagtccaatgacttaccaaacaaaagcaatccccataccacaccaataaacaccagcggcaacataagcataatcaataccggcttgcggtagttgctggggaaaagaaacagcagaaccacataaatcaacaggaaggtcagcggaatattcttcgccaatgcagcgttactcacatcctgtgtttcctgctcgccgaaatatttcattttatacccttcgggcaaccgcatctgctcttgtacggcagtgagcacctgtttaaacgcagccatcgtattggctccacgtctaggttcacattgcatcatcatacaacgctcgcggttaaagcggcggactacattataatcataacccaaagcaaaattatcgatcacctgttccactttcacggaatttcctttcgtactgaatacaggcacacttttcacatcattcaagttcattttttccacatcctcatctttcaacagaataggcaaggaaacatccccctcacgatattctcccaaaggcaaaccattggtagccgtacggaatgaattagcaacctgctgacgggtaattcccaagcgtaaacctttctgttgagagaacatcggtttccacacaggcaccttatctccccaattggaacggatatccgtcaccatatcacactggcgggctattttcttcgccctttcaaccaatgcggtcaatgtatcgggattctcaccgataaaaccgatctcaatagcagcttcaggcaccggagacaaagcaaaaagtgccgaacgggtaatgatattgggaaagttctgggtcatgtgctcataaaactgctgttctacttcggctgcatcttcggggtctttagtttccaccatcacattagcatagttagacttcggtccaaaagaagaacttgccaaatagtaacgcaacggagtaccacccaatgtcaccgaatatgatttaactttctcatgattcttcaaataaccctccaccttcatcacatcctgatctaccgcatgaatactgaatccctcagggaataccagatcagcacgaaaataaggcttattcattttcggaaaaaaactctgaggcataacagccataataaccaaagaaagcaccaaagtcacaaagacggtggtcaatgtcacaaaacggcgtttaatcagcaaggtcagaaacttctcgaatttatgatagagtttagtatcatacggatctttcattgcaccgccgggaacagcttctttcaaaataaaattaccaaaagtcgtagtctggcacaaagccagaatccaactcaatcccagtgacacagccaatacaacaaatagcggtttcacaatctcagccacggatgccggtgccagatacaaaggcaagaaagagcagatagcaataaaagtagcgcccagcaatgcccactgcggcttgatggccccctctatcaatgactgataacgtgattttccgcgcttgatacctatttgcgcattatctgtcaccacaatggcattatccaccagcatacccatggcgataataaatgccgccaaagaagtacggttcaatcctactccccacatcaacataataagcaaagtaccacctactgagaaaagtaacgaactacctatcagcataccggcacgcgatcccatcaccacaaagataatcaggataacaataaccaatgattctatcaaattcaggataaagccattattcgcctcatcggcaatcttatcctcaggataaagggaggcaagttcaataccgataggcaacaattgctctatttccgccaacctttcgtccactgctttacccacagctaccacattatcctttgctccactggccacacctataccaatagcacgtttaccattgacccgcatcaaggttgaaggcggatcatagtatccacgctccactgttgcaatatcccccaaacggacttcccgtccgtccttactgataatcaactgattttctatatcttccagactggtataagttccttccgtacgcaagcgcaactgataaatttctgtcgctatatctcccgtattcacctgtatattctgcttctgcaagatgcccataattgaagtgggatcaatgcccagtgccgaaagtttggaggtggatatcttgacattgatcacttctgtctgttccccatacaacatcactttctgcactccctcaatcggagtcaactgggtacggatacgctgggcccagtcacgcaaatcagtatacgagaatccctcatcagcggtcaaagcataataaatgccatacacatcaccaaagtcatcattcactgtaatggtagacgccccactgggcaatttgggttgtatattcgccactttacgacgtaattcatcccatttcacaggcatataatccggatcaatcgtaggctgaagttcaatagaaatcttggacagtccgaaataagattccgatttaatctgatatacatctgtcatggactgaatttcacgttcaatcggttccgtaatcagtttctccacttcatgtgggttcgctcccggatactgggtaaccaataccgcagtctttatcacaaaaggcgcatcttctttcttaggcagcttgaagaaggagattactccacctatcagcaaaatagccaaaaagaaatagataaccttccggttctccaaagaatattttggaatattcatgatatgctttctccttttttattctgttaatatttttacttgctggccatccacaagataagaggctccggcagaaacgacctgttcacccgctttcacatctccggtaacaatcaagtcattacgtccaacaatagtacccttatcgttgactttgcgttgttccactttctgtgtggatggattataaacaaatacttttttactattcaatgtattgtcaaacactacagccgacaaaggtactgtaatcccttcttttaccacatcattctcaatattgacaataacacgacatgagaaccccaccgataccttgtattttttcaaatcaaattccggatcatcaatgtaaaggaatacaggaactcctgccccatcgggagaagcctctacatactcctttacttttgcttgaaataattttcctttataggcatcaaattctacgtaaatagtagaaggagaagttacataagaaatattcgtttcggggatagtgaactccacttgcaatttagccggattaatcaaacacactactccttgtcctggttgtacacgctgatagttttcaacgtattttttttggatgaaaccatcaaatggagcgcgtagctttgtgtcattcaatgtgttttgcgcatcttcaaatgccgatttggcattggtatacgaagcttgggtcgtttcaaattcttgcatggaaatggcgttcttagccaatagtttctccgcgcgttgcatctgtgatgccgccttttgaaatgaagccctcttagcgtcataatccaatttgtaatctgtcggatcaatttcggccactacctgtcctttctttacccgctgtccttcgagtacattcattgctaccagcggaccggacattttaaaggccaagtcactgaactgatcaggcgacacaacacctgaatacgatttttcgatcctgcttaacgaggtcacttccgccaatttcacgggacggggaccgcgttcttgtgcaggttgctgtccgcaagaacagaacactgctgcaatcattgccatgatagacaaatttttacctttcatactgttaatcttcactattagtttccgctgcaaagttctcataattattaaaggcgtacaagtgctaacagtaagatatattagtctatttttaagcattttctttgttatctgctttaactgtcctatatttgtggtgcataatcaaaatcttctttatttttatgaagtatatagatgacattaacctatttaaatcaaataaggatttcgttgcagaaattgacatgacaggatcattaggccgtatttaccactacccgcaacgaatggaaggatgcttgttccttctgtgcctgcgaggtgaatgtgacataacgatccatctgtctgaacacaagatacaaaagaacgacattgtcactattttgccagaaacctttgtacatgtccatcggcaaagtcccgactgccgtctgtacctgatagggttcaacaaagagttgctgaatggaataaacctcttcaattccaccatgaactatctttcagccctgattgacacgcccattattcctctgcgtcccgaaataaccgagttgtttcaagactattttatgttgctgataaaaatgaaacgtatgggagccaagcccaataaagacttaatcagcaccatgctgctcactatattgcatggtgtaggcagcattcatcagaacaccaatgtaaccacacgtactttcaatcgtggagaagaaattgtaaaacgtctggtccaatatatcatcaaacattatacgaaagaacggagtgtagctttttatgccgatctgcttcatatatcccctcagcacctcagcactactgtcaataagattacgggaaaaactgttacagatatcatcgccaaactagtgataacagatgcggaagccaaactaaaatccaccgatcttactattcaggagatagcctattcacttaatttcccagatatctcattctttgggaaatattttaaaagatatacaggaatgtcaccgaaacagtatagggaaaacggatagtgaaaacagactcagcccacgttagtacgtgtaaggtcatacgtcagtacgtataagcctacatatactaacgtataagcttatacatactaacaatgtaaaaacacatgtccaaagtctcttacaccataaaagttataagtttttcggcttataaatagcgttccaccaagtcgcatcgtcctgcaaccatttggcaaaccaggcaaagattgtattctgccactggatcctcttgccatagtctacaatatgatgatcttgccccgttaccgccacaaaagctgtttcgcgtcccagcaatttcagtgctgtaaacatctgaatactctctcccaccggtacattcacatccgcatcaccatgcaggaacagcaaaggcgtatgtatcttgtccgcattgaacaacgggctttgttttacaaaaagatcaggattgctccacggataactatccgccatggaaacttcactatacgaatatccccaatatccttccccccaataactggtatggtcactgataccggcatgagagatggccgctgcaaaaatatcggtctgtgtttgcaggtattgtgtcataaagccgccataggacgcacctatacagcctattttcttgtcattgacaaaagcatgttctttacaaaacagctttgtaccttctataatatcctgtgccaccccttccccggctgtattgacgtggcgggcagagaattcctgtccgaaaccggtagcaccgctaggttctatcacatacaccacatagcccaatgccgcgtatgcatgatgcggataacggctttcaaaattacggctgaccggactgcacccaccataataattcacaatcataggatatttccggttagcgtcaaaatgaggcggcaggtaataacggccgtaaatggtatcaccacgcgaattggtaaaactccaagccttgcattcgcccagctccacatctttcaagatgtccttacttaagtcttccaacaaagatgatttcatctttttggtattcatggtgtacaaacggtcggaatttgaggcgctttgtccataataggccataaccggagcattttgcgccaatgagaatgaattgaccaaatcttctgaaacctccagttgcagaattttcccatcagcgggattcatccggtacaaactgtaacagtcacggttctcggccgtgaaatatatttgcccgtcggccttattccacacggcacgctgtacgctgggattaaaatctttcgtcagcggagtgaccctcttatcagctatattcagcaaataaagctgaccgtccgtcatactcggagtctgcccctcctttacatttttccctattccacccagcgattcaggcgagccggataccaatacctgcgttccgtcaggtgaaaaacgggctccactgataaaaccatctttatctatcagcagttccgcctgtaaagtctgcatatccaaccgatatagtgagaataaagtagtaggacgcttggtcagacggctctgactggtcatcatcaaaagataccggccgtcattggaaatatcggcagcccagacattgtgataaccgaaagtcagtggctgcaacaaaccggtcttcaaatcatatttagccagataagaacggttacgccatcccggctggcggtcatccggctccagtacctcataaatttctttacgttctttcggtccttcctgggtcatggtgaaaagcaggtagtcttccgtaggtgcgaactggaaatacccgtcaggtaatttattcaccagcacggcctccactccggtaagtggatccacaactatcagctgcctgccatccactcctgtacgggtataataataacggttagaacgaggcatccattgcatattctcagtacgctccgccaaaaccttaccgctggcaagttcagtaatacgcgtactgccggccgaccggccacctacacaagtcgtacgataattagtaatcagatatctgccatcaggagaaagtcctactccggcaaaacgagttccatgcaacacatccgctaaagtatatagctttttgttatcttgcttaagtgaaatgcttccctcttgatccgtatccacactcactttcaaggaatctgttttccctgtttcagaaagatatttaacaactacagaatgggtggccggctccaaagcgagttcagtcccttcctgctttttcccatctacataaagttggtatttttccagaccgtcaatcttcaacttggccgtagcataacgagtattctccaacacaaagcccaccatgtgcaaggcatatcccgagtcacttcccggcaaaactccgcctgtaaataaagttccctgctgcaatacgtccacagaaagatgagtatctaacaaacgtccggatacaaaagtctttgaattcacatccacgctgtctacctgaaaaggagcctgtacaatgtagggtccggcataacggaaagtagtaatgtcaatcgtttcagcacctgccatcacagcccaggcaagagcacaagacaataagatttgtttcttcatatttctaacaatttgtgttacacaaagatacgaaatataaaagaaacaaaaacctttttctacgaatttcaatgcttcctacaacatattatttcacctctcccggcagatagcgcaactgcaaatactgttctcccggtttcagataccccccttcgaacatttctttcctgatccggtaaactgccacccttttcaataagtaattttctaccttcatcggctgctttttacaccaagaaagcactttcagacttccatcggcatgaacatccgcatagacttttaccgttcttatcggagtcccgtccgctatcttacgtcctcttttataatccacccacaaaatagctttcgctttttccccctcacatgtcccagcatacttatccgtttcggatgcggtggaaggtgaagaagttcccttacaacctacaaccgcacataaaatcaaaagatataaaatatagccccctcgtattttcatatcaatcggattagtcttttatctcttctataggagtaatatcctctatttcaggcatacccggttctttcttctgacggaagcggatgatgtttatcaaatcggacagtccgtatacaatgctgctcactcccagaatgatgaatggaacagccgccgccgtaaatggattaaataataccacaatacctgcaatcagcaccaacacaggtatcacaaagaaacctcccggtaccaccgtccaactacgcgcagcagacaaattcacaatctgactgattcccgccagtaccaaaacagcacccagcacatacatcagaataccgacaaaaaatgccggcataatcatcaaccataatccgaacaaaaggctaccaagcccggcaatagggaaactgctgccatcctgcttgccacgaatcaaatacccaaatacagaaaagagtcccggtactagaaacaggacaccgattgtaataaccagataaagaatggcagcttcaggccatgccaccagcaacacaccgatgaccaatgcacagatacatctgattatagaataattcattgttttcatattcaatcatgtctaattggttaatgaagcgaatatactgattatttctgagaagacagatgcaaaatggatattaatttttcagacagaagaacaaaagaagaaagccggaacagattttcctgtcataagcttagaactacattctattgttctatagactttagcaaacagaatattctaccgactattccaatatgttctttcgtacccatgcctgaagatcatccttttatcatatggcaaatcactctatctgttctgtttcaggcagactttgttcattctcgtcctcatcgatcaaaatagcccaaaagagccaccataacagcaatcctgccaacaacacggcacctatccttatccaaagtttacgtttcatacacttcattttaatgatttattaactgatgtattaaaaccattccgccacccgaaatgttcatttataaaaccaatttaaagtaataagattatgaataatggaaaattctttgccggactggcactaggagcgctggtcggcagtgcattaagttgttttgcgcacagcaacagaggccgcaaattgagaagagacgtgtatgatgccattcaggacttacaagaagatgcaaaagacctggctcatcatgcaaaacataaagcagaacaagtaagcagtgaagtagccggaaaagtaggtgagaaagtggaagaagtgaaagggaaaatacacgaggctgcaaataaataaaaaaaaagtaagtttttctttggagtttaaaacaaaacgcttacatttgccccaaaataaaaacagattttatgaatagaatcatggtaaatacatattggtggcgtttcttacaactaaacaagtcgtaagggaaccagaccatgtatatatacctgacattctaataaggatattcaaactgaaggcctgtcgtacttacgacaggccttttttcgttagtgcaattaacaatcaaaatttaatatagaacgacaatgaaaacttatcaggtaaacaaagaaggttattatggcgaatttggcggggcctatattcccgaaatccttcatcgctgtgtggaagagttaaaaaatgcctattccaaagtattggaaagtgaaggattcaaaaaagaattccaccagttactacacgactatgtgggacgcccttcacctctatacctggcaaaccggctaagcgaacaatacggctgtaaaatctacctgaaacgtgaagatttgaaccacaccggagcacacaaaatcaacaatgccatcggccaggtgttactggcaaaacgtatggggaaaaaacgtatcattgcagaaaccggagctggacagcatggtgtggccaccgccacggtatgcgctttgatgaacatgcaatgcattgtttacatgggcaagaccgatgtagaacgccagcatatcaatgtagaaaagatgaaaatgctgggagccgaagtccgcccggtcacttccggcaacatgacactgaaagatgctacaaacgaagccatccgcgattggtgttgccaccctgcagatacttactatgtcatcggctctaccgtaggccctcatccctaccctgatatggtggcacgtctgcaatccgttatcagcgaagaaatcaaaaagcagctgaaagaacaggaaggaagggaatatcccgattacttgatggcttgtgtaggaggaggaagcaatgcggcaggaaccatttatcactatatagatgatgaacgtgtgcagattgtcctggccgaagcaggaggcaaaggcatagacaccggtttctcggccgctaccatccaactggggaaaatgggaattatccacggagcaaagaccttggttatccaaaacgaggacggacaaatagaggaaccttactccatctctgccggtctggattatccgggcataggccccatgcatgccaatctagccaaacagcaacgcgctttggtactcgccataaacgatgatgaagccatccgtgccgcatttgaactgacccggctggaaggtattattcctgcattggaatcggctcatgcattgggagcactggacaaaatgagattcaagccaacggatatagtggttctcaccgtatcaggacgcggagataaggatattgaaacctacttgaaagaatccagcacaagggcctccttgcaataacacatagaaacccacgagagtaaaaatcttatacggacaactataaacagaaaagaaacaatgaaaacttttacctataccacccgatacaaaaccatactgggtgacctacatacaccggtcagtacttatctgaaagtacgcgacattttcccacagagtgcgctgatggaaagttccgactatcatggaagtgagaacaaccgttctttcatcggactgaatcctgtagccagcatcggaatcaaccatggcatagccactgccacctaccctgacggcagcatggaagaacatcccatcaccgaacatttccgggcagaccatgcgatctccgattttctgaatcgtttcaaggtaagcggagaatacaacaactactgcggactgtatggttataccacgttcaatgccgtacgctacttcgaacatatcaatgtaaaagacagccgtgaccctaagaacgatgctccggatatgttgtatatcttatataaatacctgatcgtcttcaatgacttccgcaatgaaatgttattactggaaatgttgcaggacggtgaggacagccatctggattatgtggaaaaagcaatccacaaccgtaactataccacttacgacttccgtgccgtgggcgaaactaccagcaccctgaccgatgaagagcataaggcgaacatccgcaaaggcattgcccactgtatgcgcggtgatgttttccaaatcgtcctttcacgccgttttatccaacgttacgaaggagatgatttcaaactttaccgtgctttacgcagcatcaacccgtccccctacttattttacttcgatttcgggggcttccgtattttcggttcctctcccgagacccactgtaaaatagaaaacggacgtgccaccatcgaccctatcgccggaaccacccgccgcaacggagacaagaaaatagatgctgaactcaccgccaacctattggctgatcccaaagaaaatgcagaacacgtaatgctggtagatctggcacgcaatgacttgagccgcaattgtcacgatgtacaagtagaattttacaaagaagctcaatattacagccacgtcattcatctggtaagccgggtcagtggcgaactgaaccccaaagccaatcccatcaaagcatttattgatactttcccggccggaactctgagtggcgctccgaaggtaaaagccatgcaactgatcagcgaatacgaacctcacagccgtggagcctatggaggttgcatcggatttatcgggctgaacggcacattgaaccaagctattaccattcgtacattcgtcagccgcaacaacgaactatggtttcaagccggtggcggcatcgtagctaagagcaatgaagagtacgagttacaagaagtaaacaacaaactgggagcacttaaaaaagcaatcatcctggcagaacaaatgtaaaaacgaatcatcatgaaaacagtaattatagacaactatgactcatttacctacaacttgagtcatttggtaaaagaactgggagccgaagttaccgtattacgtaacgatgctttccaactggaagaattggaaaaattcgataaaatcattctttcacccggtcccggtattccatcagaagcaggcctgctgctcgaagtaattaaaagatatgccggcaagaaaccgattctgggtgtatgcttgggagaacaggccataggagaagcttttggcggcaaactgaccaatctgagcgaagtatttcatggcgtacagacccccatctcaattaaaaagaatcaattaaaagacaaaggagagaaaaccgattacattttcaacggactgccggatgaagtgccggtaggacgttatcactcatgggtggtagatacggacggtttccctgagtgccttgaaataaccgcagtaagccgggaaggtctcgttatggcattgaaacataaagaatacgatatccacggcatccagtttcatcccgaatccgtactaacccccgatggtaaaaccatgatagccaactttctaaacgcataaaccaaaccgtacataataaatatgaaagctatattatcccgcctcttcaatcacgaggaactgacccgaaaagaagcaaagaatttgctgctcaacataacccggggaatgtataacgacgcacagatagccgctctgttgaccgttttccaaatgcgcggcatcaaagtagaagaattgataggtttccgtgaagcattgctcaccacccgcatacctatagacttttccgcttacacccctattgatattgtaggtacaggcggtgatggaaaaaataccttcaacatctctacttgcgcctgcttcattgtagcgggagccggatatcatgttgccaaacatggcaactatggcgcgacttccgtcagcggagccagcaatgtcatcgaacaacacggcgtaaaattcactaataatccggataagctgacccgttctatggaagaatgtggaatggtctatatgcatgcccagttgttcaatcctgccatgaaaagtgtaggccctgtccgcaaagcactgcaagtacgtaccatattcaacctgctaggtccgctggttaatccatgtcttccggcttaccaacttctaggggtcgccgatctgccgcaaatgcgcctttacaccaacgtattccagaaactaggcattggctttgccgtagtaaacaacctggacggttacgacgaaatctcactgaccgatgaattcaaagtgatgaccaatcgctacgaaaccatctacaagccatctgaactgggtttctcccttgccagacaagaagagctttatggtgggaacactcccgaagaagcgtcaaaaatcttcaataacgtactggagaacaaagccaccaaagcccagacagactgtgtgctgattaatgcttcttttgccatacaagccatggaaccggccaaaccgatagaagaatgcgtggccatcgcccgtgaatcattggaaagcggaaaagcattgaatacattgaaaaaatttgtggaactgaacagttgattacacacccagtattccactaccaaacgcctcatacaatgacagatatattaacagaaatcatcgcctgcaagcagatcgagatcgaactgcaaaaggctgccatcagcaaagaaatgctgataaacaattgtaacgaacccatgccacgtatcagtatgcgtgccagtcttgcctcttctccttacggcatcatctccgagttcaagcgtcgctccccctccaaaggatggataaaagaagacgcacaggcagatactattcctcccgcttacgaggcggccggagcctccgcactttccatcctcaccgatgaaaaatacttcggcggcactctgaaagatatccgttcggcacgcccccacgtgcaacttcccattctaaggaaagatttcattatagatgaataccaactttatcaggcacgcatcgtaggagcggacgctatccttcttatagccgccgctttgaagaaagagcaatgcaaagccctggccctcaaagcccatgaacttgaactggaagtcctgctggaaatccacaacgagcaagaactggaatatatagacgagaacattgacatggtaggagtcaacaaccgtaatctgggaagcttccacacagaggtggaaaactctttccgcctggcggaaaaactacccgaagaaatgctccggatctctgaaagcggcatctccagccccgaaacagttaaacaactccgagctgccggcttccgaggcttcctgataggggaaaactttatgaaaacacccgcacctggagaagccttaaaagaatttataaccaaactagagaaatgttaggatgcaacaacaatgattatcaaggtatgcggtatgcgcgagcccgaaaacatacgcgccatagagcaagccggagcagactggatgggattcatcttcttcccccagtctgtccgccacgtatcacatcgtccggaatacctgccggaacaatgccgccggatcggagtcttcgtcaacgaaagcagcgaaaacatcctgctgaaagcacaggaattcggtctgcaccatatccagttgcatggcagggaaacaccggaacaatgccgcaaattaaaagccgccggattaggaatcattaaggtgttttccattgcacgggaaattgacctgcgacccgtcggctgttatgagggcatttgcgattactttcttttcgacactgcctgttccggatatggcggttccggcaaaactttcaactggaatatcctgcaagcctatcggggaaaaacgcctttcctgctgagtggcggcctccgtcccggcagcctttcctctctgttgcagttcaaacatgaacagtgggcaggcatcgacctgaacagcggattcgagactgctccggctctgaaagacgccgccgccgtccacacatttataaaccaattaaaacaaaaaatacaatgaacagaatcaaccagttattcagtatcaagcaaaaagacatcctctctatttatttttgcgcaggctttcctactttagaaggtacggcaagcaccatcaaagtcctggaaaaaaaagggattaacatgattgaaatcggcattcctttcagtgacccgatggctgacggtcccgttatccagcacgccgccacccgcgccttgaaaaacggcatgacactgaaacttcttttcgaccaactgaaagatatccgtaaagaagtacagattccgctggtgttgatgggatatctcaatcccatcatgcaatatggattcaaggatttctgccgcacttgccgggagacgggaatcgacggggtgattatccccgacttgcctttcaaagattatatggaggaatatcgttccatagccgaggaacaggatgtgagaatcatcatgctcatcactccggaaaccagcgaagaacgtatccgcctgattgatgaacacaccgacggttttatctatatggtatcttccgccgctatcaccggtgctcaaaaagatttcaacgcacagaaacaagcctatttccaacgcatcgccgacatgaatttacgcaatccccgcatgataggtttcggaatttccaataaacaaaccttcgaaaccgcatccgctcatgccgcaggagccatcatcggcagtaaattcgtgaccttattggacgaggaaaacgggaatgcggaaaaagcggcagacaagctgctggaagctttgaaaaactgatcttccacaacccgtaaacgcagacgcagcagacgcaggcccttttttctcacacacgtgcgcgtacattatatatgtaaatgtgtatctatttttaataacctgttttaactgtcatcagagagggaggtcaaaacgaagatgaacgctctgaaaaagatacagattgtaactgaacaacataaaaaagttgtatccttattccaatgtagagtgaatacgactcttttattgtcggttgaaagtacaagtttcagattcaaagttcattttctctaaaatagggtcttccaccttacggtagtttattctatttccccaccttgtattatacgcgcacgtgtgtgagaaaaaagggcctgcgtctgctgcgtctgcgtctgcgtttacggcattcactcataatgccctcctcttcaaagctcacctgaaaggccagtacgatgaaggtgaaagatacagtaccttgcaggcataagattatatatcttacaagcataagatatataatcttacacgtaatctttccatatcttccacccaccctatccgggaaaaccagcctcggtccatagagaaaacattttgttattttcccctcttatttttgtcatacttatacataattactatctttgtgccaaaattaaacaagagaagcgcatgatacagagtgaatatccttccgttttgctaatatacacaggcggtacgatcggcatgattgaaaatcctgagacaggtgcactagaagcctttaatttcgaccagttacaagacaatgttcccgaattgaagcggttcaactatcgcatctcctcttaccaattcaatccccccattgactcttcggatatggaacctgccttgtgggccaagttagtcaagatcatcaaatacaattatgataattttgacgggttcgtcattctgcacggtacagacaccatggcatacaccgcttcagcgctcagcttcatgctggaaaacctgagcaagccggttatcctgactggcagccagctgcccatcggcatgttgcgcaccgatggaaaggaaaatctgatcacttccatagaaatagccgctgccaaacatccgaacggcactgctattgtacccgaagtatgcatcttcttcgaaaaccatctgttgcgcggaaaccgtaccacaaaaataaatgcggagaatttcaatgcgttccgttcatacaatttcccttcgctggcgacagcaggcatccacataaaatatgaatatgaccgtattcacaaagccgatcccaatctgccattaaaaccacactatctttatgataccaatgtaattatactgacccttttcccgggcatccaggaaaacatgatcagcaatatcctgcatacaccgggattacgcgcagtggtattaaaaacctacggttcgggcaacgctccgcaaaagccatggttcatcgaacttctaagggatgccacttcacggggaatcatcattgtcaacatctcccaatgctctaccggaacagtggaaatgggaagatatgaaaccggactccatctgctggacgcaggggtcatcagcggctacgacagtacggtggaatccgttctaaccaaactgatgttccttttgggacacggaaaaagtgaaagagaaatacgttaccaaatgagtattccagtagccggagagtttacgaaatcataatttattgcgttccaattattatccggcgggatgattacagaatcattaaaatggtgtaatctgcgatgaaaacttaacgattttataacatgtaatctttttgtaatatttgtttcatcaaatagtaataaaaatgctccatctttgcaatgctgatcagaaaagattagttttgtagtattaaaaagatggatatatgaacgattaccgcattttagtagttgacgatgaagaagatctatgcgagattcttaaattcaatttagaaaacgaagggtattttgtggatacagcaaactccgccgaagaagccctgaagatggaactgacccaatacgacttgctgttgctggatgtgatgatgggagaaatttcaggattcaaaatggcgaacatgctgaaaaagaataaagctaccgcttctattcccattatattcatcactgctaaagatactgaaaacgatactgtgacaggattcaacctgggagccgacgactatatctcgaagccattttcactgcgcgaagttatagcacgcgtcaaggctgtccttcgacgtaccagtcccacacagggaaaagaagtgcaggaacaattgcaatacaaagggcttttagtcgacatcaccaagaagaaagtcagcatagacggtatagaaatttccctgacaaaaaaagaattcgaaatcctgttgctgttgttacaaaacaaaggccgcgtattctcacgcgaagatattctggctaaagtatggcaagaggaagtctatgtgctggaccgtaccattgacgtcaacattactcgcctgcgtaagaaaataggcgaatacggaaaatgcatcgtcacccgcctaggatacggatactgttttgaatgcgaataacctaacctgtacctttccatgactattgaattatccagccacgtcctgtcattcaacaagaaactattcttgtcggtaatctccttattcatagcattcgccatctgtttcatggcattccaatatcgcagggagaaagaatacaaaatagagctgctgaacacacaactccagaattacaacgaccgcctgaatgattttctccgtggcagggatacgctgaatattcaacaattggacgactatgtatgcgaacacacctttgaagatctacgtgtgacactgatcaacaagaatggtactgtaatttatgacaatctggaaaaagatcccagccacttcgagaaccaccataaccgtcaggaaataaaagaagccatcacttatggcagcggctattccattaacagacaatcggaaagcctgggcggtgaatttttctattcggccaagtattatcctaacctggactatatcattcgttcggcccttccctataatgtcagtctgatgagacacttgaaagcagactcccattatgtatggtttacactgataatcagcctgatattaataattatattctaccggttcacacataaattgggaatgtctatcaccaaattgcaacaattcgccatgaaagccgaccgcaatgaaccgatagacactgatatgcaggatacctttcccaaaaacgaactgggcgagatatcccaacatatcatccaaatttacaaacgtctgcatcaggcaaaagaagatttatatatcgaacgcgagaaactgatcacccatctccaaatctcgcacgaaggtttaggcgtattcaaccaccgcaaagaagagattctggtaaataacctgttcacacaatatgccaaccttatctcagacaaaaatctgagttctacggaagaaatcttctccatccccgaattgcagcccatcacccgtttcattacaaaaaacaaggaacgcagtatcggcaaaggagagaaacggatgtcattaaacatagacaaaaacggacgtatctttgccgtggagtgcattatctttcaagatgacagctttgaaatctccatcaatgacatcactcaggaaaaggagcaagcacttctgaaaaaacagctgacacagaacattgcccacgaattgaaaacccctgtaagcagcatacagggatatctggaaaccatagtaaacaaccctaccctgccccgtgagaaaatcaatgcttttttggagagaagctatgcacaaagtaaccggctggcacatctgttacgggatatctccgtacttacccgcatggaagaagctccgaacatgatcgagacagaaccggtaaacctcaccaccatgatgcggaatattctgaacgaagtaactttggaactggaagaaaagcagatcactgcccacaatatgctgcctgaaagactgaccgtacaaggcaattcttccctgctatattccatcttccggaatctgacggacaacgccattgcatacgcaggaagtcatatttccataaccatccgctgtttccgtgaagacgaacgtttttactatttcagtttctcggacacaggcgtaggagtagatcccgaacatctaagccgtttgttcgagcgtttctaccgggtggacaaaggacgttcacgcaaactgggcggcacaggcctgggactggccattgtgaaaaacgctgtcattctgcatggaggaaccattttcgccaagaacacccccggtggaggtctggaattcatatttacactgagtaaagaatgagaagatgacaagcacctgtttctaaattttcttcaaaatttaaacaggctctaaaaaataaagaaagataattgttttcttaaatataaactgtatctttgcggtgcatcggttcatttatctcccctccgaggtgaatgattaaaagggaatcaaggtgagaatcctgaacagtcccgctgctgtatgtttcactaaacgcataagcaaaatgccaataaccactgggataatttccgggaaggtgcttatagcggaaacgagtcagaagacctgcctgtgcatttatcaaatctgaagctttcgaggaaagagcttggaacactgaacgtaagggatgcctttaatcacatccgctattttctccgtttcactgtccggaaaagagtatcaggtaaaaagaacatttattttaaagtaaactctgccaagtttatttggaatgctcagccgaagtgattcgcctgagcattattttataatccaagtcaatacaaaatcgggatgagtgacataacggacccggtaacgtccctgccggcctgtacgatattcgcatgcctcgaactccccctcttccgacaggctgaaaggaaaaatacgaagatgacgaatgaaatccacctcctctactcccatcagtttgaacagtgcctccttggccgaccaatggagcaacaaagcataaacttcatctccttccatcattgtggactcttcatcggaacgaataaaacgggaagctactttccgcactctggttccatactgctctatatccattcccacctcacaggaagaatgaagcgccaccgccacataaccacgagtatgcgagatgctgatataccggcttccatcctttagataaggccttcccgaagagtaataagctatctccttttcttctccacacaaagccttcagcagcacacgtaccgacaaccattcatgcttccgtttttcggaaaaaacagccagtttctccctataccagtctttatgctccaacgatgccagcagttgttccgttgtttcatcagacttccatattccaagcagaaattccccttcgctataagtacggtataaaggcatgataaaatctatttctttccttcttccatttccatggagtgggaagggtcaatgataacttttactttcaaaatgcggcgcgtattcatttcaagtacctcaaaatgataattcccgtaatccaaccgctcgtgcaatacaggaaactccccttttatttccagcaacaaaccggccaaagtgtccgcatctccttccactttctcgaaaagagcgggatcagctttcataattttataaaaatcggacagtaaggtttttgcctcgaatatataggtacggtcattcagtttcacatacgtacgctcttcatcatcgtattcatcattaatctctcccacaatctcctcgatgatatcctccattgtaacaatacccgaagtacctccaaactcatcgacaacgatggcaatatggatcttgtttgcctgaaaatcacgcaaaaggtcatcaatcatctttgtttcaggcacaaagtaagcgggacggaccaatgtttgccaacgaaagttgtcgcctttgcccaaatgaggaagcaaatcctttatgtaaagaatcccctttatattatcccgcgattcggcatataccggaatacgggaataggcattttccacgatgcatttcaacacttcggaataaggggtattgatttccaagtccaccatatccagccgggaagtcatcacttccttggccgtttcctcaccaaaacggataataccttctagaatattgctttcctctgaaatctcactcttgtccgtcaattccaaagcctgtgaaagctcgtcgacagaaatattataattcctttttgccacacatctgttcaccaaaaaggaagaacggaccagcaatgccgacaaaggtgaaaagaatttctttaaaaaagaaatggcaggagctgccttacggcaaaacttcaacgtgttctgtgccgaataaattttaggcatgatttcaccgaaaagcaatagcagaaaagtaaggacaaccgttattagcaggaattccagaatcacggaatttccaaagtgtatggtgctggcaaaaaaataattgcacagcatgataatggttacattgacaaaattattagagataagaatagtcgctaacaagcgttcggaatcattcagcagggcgctgatacgcctgtccgaagtatgttttccttcctctatctcacttaaatcaacaggtgaaagggaaaagaaagctatttccgaagcagacacaaagcctgaggcatacaacaataaaacagctaataagatagctatgatggctcctatggtaggagccgttacggttacaccgtcaaataaatccgccaagcggcataaatacgagtcagggtccaaggaatctggttttagttaaacatcaagttctcttacttaaaaaggtaaatcgtctgtcaggctattatccgaagtttgctgttgttgcggagctacttgtgcagacatctgctgccgggataccgcttgtgcctgcacatatcccgtacccggttgctgtgaggcgttacgcggggtcaacatctccatattatcagcaaaaatctcgacaatggtgcgttttataccattctgatcatcgtatgaacggctacggatttttccttctatatagagtttgtcgcccttacggacatatttttccgcagtttgagccagccctctccataacacgatattatgccattccgtacgttcgggaacctgtgttccattctgcaacgtataggcacgatcggtggtagccaacgagaaagtggcaacggcaatgccggtatccaaatatctcacatcagggtcctttcctacatttccaatcaaaatgactttatttactgacattctattattcctttttaattattaggctccaaaattagcgaaaaaaactgattcaccaaacgcgatacggcaaatttatgcaaatcttccacgcttattctctgatacttcgcaaaagaagccgaattctcagggagaatcacttcataaaaatttgcgtaaatcacccggtgggacaacacgtgctttacccctttccgcaccagccgcactatgggctcctctcccccggacagcatcccgcgaaactgtggcgatgcatacagttcctcttccgtccattcacgatctgtttctaccaaaggcggttcatacaaatttttccatatatcatttccgctgcgcttatgtataaaggtatacgcgcccatgcgtacatatatataattaaaataacgattggtcaccttgattttatgttgcttcacaggcaaaaagctggcaatccccttcaggcgcgccacacaagaatcgcttagcggacaaaacaggcagtcgggcgccaccggagtacactgcaaagctccaaaatccatgatagcctggttatagagaccgggacactcacagtccagcaactcatcggcaatccggacaaacagtttctttccttccgtcgaatcaatgggagtatcaatgcccaaccagcgggacagtacccggtacacattaccatccaccacagcgtatggcatatcgtaagcaaatgaacaaatagccgccgccgtatattcccccactcctttcaaagcacgcaccccggcgtatgttacaggaaaccctcctgcctctgccatccttctggccgcagcatgcaaatttctcgcacgagaatagtaccccagcccctgccaatatttcatcacctcatcctcatcggctgcagccagtgcgaacacatcaggaaaacgagtcacgaaacgttgatagtaatcatatccctgagccacacgggtttgttgtagaataatctccgaaatccatatcaaataaggattttttgtccttctccacggcaaatcacgtccgttttccctgtaccaatctatcaattttctgctaaaattctccatatcagtattatataaaagtacattctatgcaatatttccgcaaaagtaaaccaagaaaatggaagaagatgctttttttaggaaatttattctgaatatatttcttaaagagggagaaaagctatatatttgcagtccaaaaaattaagatataagtataacaataattatttagcgaaatgactaaagcagatatcgtaaacgaaattacgaaaaataccggtattgacaaggtgacagtgttaaccacacttgaggctttcatggatacagtaaaggattcattgtctaaagaggaaaatgtgtacctgcgtggttttggaagttttgtagtaaagaaaagagctcagaagactgctcgcaatatttcaaagaacactacaatcattattccggagcacaatattccggcatttaaaccagctaagacatttacattatcagtaaagaaataataaacaagagtattaacccataaaatttgaagctatgccaagcggaaagaagaagaaaagacacaaaatgtctactcacaagcgtaaaaaaagactaagaaagaacagacataaaagcaaaaaataacttgtagtctgtctgtgacgacaaataaagaacaaaccttgcaaagcaacaaaagtctttcaggtttgttctttgtttaatgagaaaagtgaacaatttaagattacaaaagtgacaagcgaactagtagtagacgtacaacccaaagaaatatccatcgcactccttgaagacaaggcactggtggagtttcaaaaagaagggagaagtgcttccttcaatgtgggaaatatgtatttgggacgggtaaagaagctaatgcccggccttaatgcctgtttcgtggatgtcggctttgaaaaagatgcttttcttcattatttagacctaggtcctcaatttcattcttatcagaagtatctgaagcaagttttaagcgaccgtaaaaaactttttcctatcaccaaagctacgatgctgcctgacatcgaaaaggaaggaacagtttcaaccaccctccaacaaggtcaggaagtcattgtgcaaattgtaaaggagcctatttcaactaaggggcccagactgacttgcgaattgtcattcgccggacgttatctggtattaatccctttcaacgataaggtttccgtatcacaaaaaattaaatcaagcgaagaacgcgcccgcctgaaacagttattgcaaagcatcaaaccgaaaaacttcggagtgattgtacgcaccgtagcggaaggcaaaagggtggcagagcttgatgcagagcttaaagtcttgctgaaacattgggaagaaacaatcacaaaagtacagaaggctcccaaactgccggcgttggtttacgaagaaaccagccgtacggtggccatgctgcgcgacctttttaatccgtcttacgagaacatctacgtgaacgatgaaacggtgttccacgaaatcaaggattatgtttcgctcatcgcccctgaacgggcggagattgtaaagctgtataaaggtcagcttcccatattcgacaacttcggtattaccaaacaaatcaagtcctctttcggaaaaacaatttcgtataagagtggagcttacctgattattgaacacacggaagcccttcatgtggtggatgtcaatagtggtaaccgttccaaatctgctaacggacaagaggctaacgcactggacgtaaatctgggagctgccgacgaactggcacgccaactaagactgcgtgatatgggtggtattatcgtggttgacttcattgacatgaatttggccgagaaccggcagaaactgtacgaacgtatgtgtcagaacatgcaaaaagacagagctaaacataacattctgcctctcagcaaatttggattgatgcaaattacccgccaacgcgtgcgtcctgccatggatgtcaacaccaatgaaacctgccccacctgcttcgggaaaggtagcataaagccatccatccttttcacggatactttggagagtaagattgattatctggtcaacaaattgaagatgaagaaatttacgctgtacatccatccgtacatcgcagcttacgtgaatcagggtctggtttccctgaaacgtaaatggcagatgaaatacggattcggaataaagattatccccgaccagagtctggccttcctgcaatatcggttcaccgatattcaaggcgaggaaatagacatgaaagaggaaatcgaaatcaagtaaaggaaaagggagtgatcgtgggtcactccctttctttatttcacaactttggtattcaaggcttgatttcgaaatttcacaaactcgaacaacttgtcacattctgccgattataacttgcccaacccaaccatcaacaaaactggcaaaacaacagaccatctgctgcctctactttatttgccttgcttatagtctttcactattccctccgcaatccaatttgccaatgcctgacggttattcttcagaaccagccgctgttggtcacgcttgttccggatatttcccaattccagaaacaccgctacaggagtagtattacgcaatacatacaaattacgttcactcaccgtcccgcgaaaaccacggtttggctgatgcttgtcatatttcttatcaaaggtacggtgcaagttgttggccaaccgcttgccctttatactcttaggagcgttataaaaaaacacatccgtctgctgtccctggctgcgactgtccacatgaataaatacagctcgtttgtaattgctcttatccttccgatatagtttattcacccagtcacaacgttgcttcaaacgagccacctgattcaagggaatagggtctcccatgcaagtttcacgcttactgtttgccaggacatgaccgtcacgaataccatccttcttatcttgaatgataatatgtaccttcgcaccgcgtgacaacaactcacgtgccaaccgcagaataatatcgtatgcatactcatcctcatgcaactgacgcccctgatagataccgatggccccaggatcaggacctccgtgcccactcaccaaataaaaacaagctccgcttaattcattagatgtaatctgataggtggcatactcctttccaaataaagactctttgccggtacgaggctttttctttgccagaagcggtgatagaacaaaaaataaaaatgtaacaaatagtaccgataccctcattgcctgttatttttctcccaacatttcatctatcttcttgcacaaagaagaaaattcctcttcattgtacaaacgggtcagcatgacaatcttgcccgctttgtcaatcaacacattacgggtgatacccgccttgcgatccgcatatctggcaaaaatatcagcccccggatcaagggccaacggataggtcacgccggtacgtttggcaaaagccactacagtttccaaaggttcgtcccgatccactccaaagagagcaaacgctttattatccttatgtttcaaccagatatctttttcaataaaaggcatctcctttcggcaaactccacaccaactggcagtgaactgaagcatcactaccttgccacgcaaatcagagagttttactttctgtccgtctgtcagctccatttcaaaatcgggagccatatcccctacctttactatataaccagcattatcaggagtaacctgttgtgccttcaccggctggctcagcaaacatgcgcaaaccagcaacatcagactcataaacttcttcatcgttattctctatttttatatattcgctacaaagataggctattccatcattttttcgtaattttgccacccaaaataactaccaacttatcaagaagatgaatattttttgggatacaatcactcattataatgcgggtacgtggatttatcaagttattattacccttaccggcattattttaacctgttctctattcaaaaaacctacaaaaaaaataaaggtagcaatgaagttataccttatattcttgaatgtatggatagctgccgtgtattacatgatttattgtgaaccaagaagttataacagtgctttggcaggattttgggggatcatggccatcttctggatttatgacctgaaagtaaactacaccccttttgatcggactcacaaacataccgcactagccgtcctgctttgtatgttgccactggcctatccactcttctccattataagggggatgagctttcccatgatgacctcacctgtaatgccttgttcggtagcggttttcaccatcggactgctgctggcattttccaaacgagtcaatatctttctcgtcatgtttctctgccactgggcgctgatcggtttcaccaaaacttactttttccatattcccgaagattttctgctggcaagttcggctgtaccaggactttatctgttctttaaagaatacacagcttcccatctgcatacttctacccttttccgtgcccgtatgattaatctcgccttaattattgcttgcggtgcaatcggtgtactgttcatgatatctatggtatgcgaactggctcaagaacaggctttatcgaaataaaaacacgtcttaatgaggtactttgcaaaatctttcgtatttttgccaacaaattgagttaatgttttaacaggatgaacgtattagaactaagtgaacaggagattatcagacgaaacagtctgaatgaattgcgcgctatgggcatcgagccataccccgcagctgagtatgtaaccaatgcattttctacagatataaaagctgagttcaaagatgatgaggaacctcgcaaagtatcggtagccggacgtatgatgagccgccgtgtgatgggtaaagcttcattcatcgaattacaagactcaaaaggccgtatccaggtatatatcactcgtgacgacatctgtccagatgaaaataaagaattgtacaacacagtgttcaaacgtctgctggaccttggtgacttcgtcggtatagaaggattcgtattcagaacccagatgggtgaaatcagtatccacgctaaaaaactgaccgtactgtccaagtctatcaaaccacttcctattgtaaaatataaggatggggtcgcttacgataagtttgaagatcccgaactgcgttaccgccagcgttatgtggatttagccgtaaacgaggaggtaaaagacatcttcatcaaacgcagcaaggtattcagctctatgcgtgaatatttcaactcaaaaggttatatggaagtggaaactccgattctgcaatccattgccggcggagcagccgcacgtccgttcattactcatcacaacgcactggacatgccgctgtatatgcgcatcgccagcgaattgtacctgaaaagacttatcgtaggtggtttcgaaggtgtgtatgaaataggcaagaacttccgtaacgaaggaatggaccgcacacacaatcctgaatttacctgcatggaaatatatgttgcctacaaggactataactggatgatggagtttacagaaaagatgattgaaaaaatctgtctggatgtaaatggaaccactcaggtaaaggtaggcgacaacattattgatttcaaagccccgtacaagcgtgtcactatgctggattccatcaaggaacacaccggctatgacctgacaggcatgaacgaagaacagatacgcgaagtttgtcagaaactgaacatggaaattgacgatacaatgggtaaaggcaagctgattgatgaaatcttcggagaattctgtgaaggtacttacatccagcctactttcatcaccgactatccgaaagaaatgtctccgctgacaaaaatacaccgcagcaatccggatttgacagagcgcttcgaactgatggtaaacggcaaggaactgtgtaacgcatactctgaactgaatgaccctattgatcagttggaacgcttcgaagaacaaatgagactgagcgaaaagggagatgacgaagcgatgattattgacaaggactttgtccgtgcgttggaatatggtatgccccccacttcggggatgggtatcggtatggaccgtctgacgatgctgatgaccggacagtctactattcaggaagttttgttcttcccccagatgcgtcccgaaaaggttactccgaaagacactcccgccaaatttatagaattgggcatttcagaagactgggttcctgtcattcaaaaggcaggctataacttggtgagcgatatgaaagaagtgaacccgcagaagttacacatggacatctgtggcatcaataaaaaatataaattggaactgaccaatcctacggtggacgaagttgccggatggattgcgaaaattgagaattgagaattaaaaattgagaattattccaattgtcaattatccatcataaataataagcatgaaattgcccggtaaaatagcgataatgggtggtggcagctgggccacggctattgcaaaaatagtcctggctcaggctgactcaatcaactggtatatgcgccgcgacgacagaatcgaagaattcaagcgtttgggacataatccggcttatctgacaagtgtgcgctttgatataaagaacatcaacttttcatcagatattaataaggtggtaaaggaatcagatactctgatatttgttaccccctctccttatctgaaaagccacctgaaaaagctgaaaaccaaaataaaggacaagttcattgtcactgctatcaaaggtatcgttcctgacgagaacctgattgtttccgattattttcaccaggtatacggtgttcccgaagagaatatagccgtcatcgccggtccgtgccatgcagaggaagtagccttggagcgtctttcttaccttactatcggatgtaaagacattgacaaggcgaaaatatttgcccgccaactggccggacattatataaaaacttctgtaagcccggatgtggcaggtatagaatatgcttctgtgttgaagaatatttatgccatcgccgccggaatttgcagcggtctgaaatatggagacaacttccaggccgtattaatatcgaatgccattcaggaaatgaaccgcttcctgaataccgtacatcccgtagaacgttctattgacgattccgcctatctgggtgacctgttggtaacgtcttattccaatttcagccggaaccgcgtattcgggaccatgattggtaaaggttattccgtaaaaagcgcacagatagaaatggaaatgattgccgaaggatactacggaacgaaatgtatcaaggagttaaacaagcacttgcacgtgaacatgcctatcgtagatgccgtatataatattttatatgagcgcatctcgcccatgattgagattaaattattaactgattcattcagataaaatatcagatacaatgaagaatattagtttaaacatcgacaaagtagccggttttgcttctaaggaaacaatcgctgcttacgaacctcaggtgaaagcctgcatggaaacattggaaaacggtacaggtaaaggtaatgacttcttgggttggttgcacttgccatcgtctataacagccgaacatttggctgacttgaaagctactgcccaggttctgcgcgacaactgtgaagtagtagtagtagcaggtatcggtggaagctatctgggagcacgggccgtaatcgaagctttatccaatagtttccaatggttgaaagcaaaacaagacggacccgtcatcgtatttgcaggccacaatatcggcgaagattatttgttcgaattaactgaatacctgaaaggtaaaaagttcggtgtaattaatatttccaaatctggtactactacggaaaccgctttggctttccgtttgctgaaaaaacagtgtgaagaccagcttggaaaggaaatggcgaagaaagtgattgttgccgttacagatgccaagaaaggtgctgcacgtgttacagcagataaagaaggatatcagactttcattatccccgataatgtaggtggccgtttctctgtcttgactccggtaggtttgttgcctatcgcagtggcaggtttcgacatcgaaaaattagtggaaggcgcacgcacaatggaaacagtatgtgggccggctactccgtttgccgaaaaccctgctgccgtttatgccgctacccgcaatgaattgtataaaaacggcaagaagattgagattttggtaaacttcaatcccaaactgcactatatgaacgaatggtggaaacaattgtacggtgaatccgaaggcaaggacggtaaaggtatttatccgtctgccgtcgacttctctaccgacctccattctatgggacagtggattcaggaaggtgaacgtactatcttcgaaacagttatctctatcgaaaagccggaacatacacttcaagttccttcggacagcgaaaatttggatggcttgaatttcctggcaggaaagcgtgtggacgaagtgaacaagatggcagaactgggaactcagctggcacacgttgacggtggtgtacccaatatgcgactgattgtgcccgagctgaatgaatactatctgggagaaatcatctatttctttgaaaaagcttgtggtatcagcggttatttgctgggagtaaatccgttcaaccaaccgggcgtggaagcatacaagaaaaatatgtttgctttgttgaacaaaccgggatacgaagaagagtctaaagccatccaagctagattataatcgtcaagaacctataaagaatgccatttatcaatgtcattctgaatgacagtgaagaatctgaaagcatccaccaagtgcttgcagattcttcactttgttccaatccaacggtcacaaccgttggaagtaataattatacatttattctatgtttaaagaagcgataaataactatcttcatgctcatggatacgaatccatcgacctgaaagccgtattattcgatatggacggagtgctgttcgactccatgcccaaccatgctgaagcatggcataaaataatgaaacgcttcggtttcggcctcagccgagaagaagcttatatgcacgaagggcgtaccggtgcatctacgatcaatatagtaagtcgccgggagcgtgggcatgatgctacagaagaagaaataaaagccatctaccaagccaaaactgaagaattcaacaaatgccccaaagcagaacgaatgcccggcgcactggaagtattgactaaaataaagagcgaaggactgactccgatggtagtgaccggttcgggacaaacttcgttattagaccggttaaatcataattttccgggcatcttccaagcagacttaatggttaccgcctttgatgtgaaatatgggaaaccaaatccggaaccgtatctgatagccctaaagaaaggcggcttcaaacccaatgaagcgttagtaatagaaaatgcaccactaggtgtacaggcgggagttgccgccggtatttttactatcgccgtgaatacaggaccattgcacgacaatgtattactgaatgaaggagcgaatttactttttcattccatgcccgacttcaataaaaattgggaaacactacaatctgcattaaaacaagattaaattttgcaagaattcttcacaatcaataaaaaagagctccttgctttcacctagatgaaaaacaaggagcccatattatataaaaaatcacagcctatcaaaatacctgaacctactttaaaactttgcgtaaccaaggaataaccagttcgtttttaaaataatgagaagggggatctacattgaccgtttcgaaataggtctttgaatccagtccttcatcaaggtgctccacatcttttctaactgccttatcagcaaacttcggataatgatgaaactccgcattttccggttttccactagcagcataagcagattgcaccaaacggaaatcacggtccaaccctccctctgtaaaaatgataggacgaggagctaatgacgcaacaacatctggaaaattaaaatacctccaataaccaggtatcagatgacggatagaatttggaaaaggacgcctgttttccttgtcaggtttagtcatcacaacggcacgttcttgagtctggcatagaaaatcattgtacacaaaagcataaatgtccttatccaacacccccaagaccatcatcggttctgtacctaatgagaatccgctaatcacaatcctgtcctttcggatataagactggtctttcatccaattcagcacttgcatatccagataagaagtataccctagccaactccatcccagttcaagcaaaaaacgggaaacaacatcatagtcataattccatcctttatcataacattccaaatcggaggcttctccggcagcggcattatccaccgctaccgccacataaccttctttaaccatattcaaagccatacttactttgggattattataatcctcagttaacttatcacagatgccgggctcaccggccaatccttctttggtccttccggaacccggaatgcacaagactccgggtactgcacccttcaaatgttccggtttcaaaaccagaaaagtggaaactgactttggaaaaggatagaactcccatttctctaaaatatatccctcttttttttccgttttcacacagacaggagacggttgtccctttatctcgggaaacttcatgatctccaccattgcagcacgcactccatcctgccattgcgtaaaatcctgtgcggacataccggaacggtaagcatattggggatgtgtatctttcaacatctcatgcacaatggcataagtacttagtaaccgtccatccccacgatctgatttcacaactgcatgcttctcaggttggtaattctgagaattaccaaccatacataagctgcatacagatactaaaaagagcaatcttttcattatcatcatattatctcactattattcataccccggagtctgcttgatttccggatctccattcaaaacttccacattaacaggccacaacatcatatatgccttatcctctgttaatataggcaatgaacttccataatgcgctttaacagaaaagacaaaaggttttccgttggaatcacgtaaacgcaataaatcaaaccagcggcttccctcacctacaaactctttatcacgttcctgcaaaatagcccactcattatccgcataatctcctgcgatatatttatgttgttcaaatttatcaccataagcacgcttacgtacctcatttatatatgcagcacatttatccggagctcccaacccgttttcacactcggccagcatcaacaaaacatcagcatatctatataccggtacatctgaatcataataatgagttcctccatccgtatgtcccatcagttttttccaacaagcgccacgagtctttccttcgaacatatattgaaagaaagtagcatccaaacgagtatcttccttatcataaatctcgataaacggcactttatactcataacgtaatggtccggctgtcaatagcttcaacggatccggaccatatttatttccatccaagtccgtagcattggtaaacaaggctacattatagaaccagttcgccccccaattggtcaattcattcttattaaaacacagagcgaaaataatctctttattcttcttcccctccggagtccataaatccgcaaagtttggaagcagttcgaattgttggttcaccaaattcaataaagccttctttgctgtcaacaagtcactgttattaggatctacggcagtcagagtagctatatgatcccctgcaatatcatcatcgggtaatcctgtagtgactttggcagaccacatatatatcttggccttcaaaagttccgttgcataataagaccattcatattggtcggacatcttcttatccgactcattgaagaaagcttcggatttattaatatcttctttgataaactctaacgtttcctccggagtagaacgagccttatataattgcgtaatatcaatgctaccctcggtaactttcggttccgtctctaacggcacaccaccaaatgttcgataaagatagaaatagtaatatgcacgcaagccataagcctgtcccaaataaaatgatttctccattccagtcatataatcaatttctttatctacatttctgataaacaaatttatatgcatgatatttgggtacacctcataccaatcatcgacaccggtattatctttcgtaagcagattattagtcataggcggaccatataccccctcacccatagaagtaacatcacttatcagaatctcacttctgaactctcccaatgtgacaggcatctgatatttatctcttaaatcggcatgaataccagtcataaacatttctacctgagacttctgattccaaaaatcattagagccataataatcttcaggagacaggtccaacgcatcacaagcagacaataccatcatcccactcaacaatatgctataaaatattttcttcataatccttcctatttattagaatgtaacatttaaacccaaaacaactgttctagggaggggatatcctccattctgactgacaccatattcgggggtcgccatatttttggctgctgtaatatatcccaaattctgtgctgttacagaaacatccaccttgctcaaaccggatttatgaatccaactctgaggcaaggaatacgacaggcttatttcacgaaaagccaaataatcgccacgataacaattaatgtctgatattctgtcataattacgtttgcctaaaaagtcagcccatccatacaccggatattttccattcggattactttccgaccaggaatctttaaccaaagatatggtattaaatgttccctgcatattacccataatccaaggagttttccaatcatgcacccaatagcctaaagcataatccagacggcagttcaaagttaatcctttccatgaagtattaatgttaaagcctccggtccaatgaggtatcgtattacccaatttcacccggtcataatcatcaattacaccatccccattcacatcctgccatttcacatcaccagcctgtataggcagtcctttctccttttcggcatccgacaatttagcccaagcttcaggtccatagagcactttggcatctgctccattttccgtataagtggatctgtctatcagattacctggaatctcactctcactcttataaataccaagagatttaaaggcgtaaatcacaccatattcctgtccttcctgataaccacccacccattgtctttcataggtaccatctgccagcttgcgtcccgtataaacctgataggcatcctgcatattattcggcaatccattgtacggtaatgagataatcttattcttattataagcggtattcatactaactgtaaatttccaatctttggtacgcaaaacattggcagtcagttctaactccataccttggttttgtacttctccattgttagaaaggaaagaagaaactccgctatgggaaggcagggtgatttctgcaaatttatcctgtgtacgtctattataataggtgaagttcaagatatatttgttattcagaaaaccaatatcgaaacctgtctcgaatgtgtacgatttttcccatctcatggtgggattaggcaaatcgtttatcatcaaaggaactttgccattatagttgggtactattttaccatctttatctttcataataccataagagccttgaaccgtataataatcaagtcctgtcactacattaccattagcatccagtacaccagacacatttccattggcaccgtaactagcacgaattttagcataagaaagtacattgctacaagactccataaaattctctctactcaatacccaaccggctgatataccgggaaaggttccccaacggttatcttttggcagcttggagtatccatcgcgacgtaaaacaaggctcagcaaatacttggacttataatcataattcactctaccaaagaatgaaagaatgcgttgtctgtaatgccaggaatctatttgccgcactccggcagcagtcgaagtataattcaaatcctgaaaatcagataatggagatccataaccggacgccgaaaaacctttcttgtatgagtcataatattctacgcctgccatcgcatctatagaatgatcttgccggaatgtagtctgataattcaagattccattgtaagtctggtccaaaagtcgttcatgcttgttggaagtactatgattagtgtcatacaccggtcctgtagctacaatatagtcccctttgaagaactctctgctgtcatcaaaataaaaccaagttcctgtggtcttgaatgtcaaccctttcattatattaaaggtaaaagactgactcaaattaaacttgtctgtattattatcatagttcaatgcatcctcatacactttcactgtggtccagccacgggcataagaagccacggcagggcctgccaaccaatcgccatccggacttttcacacggaatgtaggaggaacggacaaggtagtactgaaaaaatcaccttcaccggcatatcctgcaccaccatcgtcccattttgcatcggtaaatgtcaaagaagaattagaagtaagccaaggcttaattttataatctgcattgatcgtgaaattcaaacggtgataccagttgttcatcgcatttccttcgctgcgattatagcctaggcttgcataataatgtcccttatcattgccgccggatacgctcaagttataatcctgagtaatagccggagatttgatattataatctttcagctgattatcacaataaatcaatttttgtcccggattcaccgggtcatccattgtctgccaaccttgttttaacaggaaagccagatcatctgtataattcataacaccccatacggctgtattgtccttattgccattaagtacattccctttttcatcaaaatatctgtttcctgttccgtaaggctgtgttccggataaagtcgcatcactggcaaatccatgccaagcgcccgatttatcctgccatatatgcgaagaccgataaaatgctgaacgcatataatacaaataatcatgagcattcaaaaactcatactggctatggaaaaaattgaaaccgactttcgcactcaaatttatttccgtatgtccttccgaacctcttttagtagtaacaagaattacaccattggaagcacgcgcaccgtaaatagctgtagcaccagcatctttcatgacctccaaagactcgatatcctccggattcacatcactcaacgactcgcgtacagcaccatcgataataaccaaaggtgaaccgctaccatccagattggtaccaccacgaagtaccaaagtaggagtggaattcggattaccactagtttgctgcacccttaatcctgccactgcaccagacagtgcttgcgccggattagtatggacacccgtacttaaagtagaattatcaactttagcaatagaattagtcatcttggaacgaagttgtgtgcccccataacctgttatcaccacttcatccaaagtcttattgtcttcctgcagttgaacattcaaaaacggctttttccctacaaccatttcttgagtcagataaccgatataagaaaagaccaaagacgctttttcacttaccattaacgtaaactggccgtctatatcagttatggtaccattggtagtacctttctctataatattagccccaataattgcttctcctttggcatcggtcactatacctttgacagtcactttctcttgttgcataacaatgggaggcgtttcttctctagaaatggccttacgaattattacttgtctgtcacggatatgatattccaaatcagtaccggcaaacatttgtttcagtacctcctctattgttttattccgtacatccacattgacacgacgagacaaatcaatatctgtacgatatataaaaataaattgactattcttttctacccaattaatcacactcttcaaagtctggttctccatagaaacggtaaagctagtttgttccgcataactcatttccgcaaaagcctcttcataacttgtaaatgttaaaatcatggctaaactcatacattttgtgaatttaggcatgagttttattctattcgtgtattttttcatatatttgattgttttttctatttatttcaaggtaaataattaaacaacgattcagtgaccagatagtacggcaaatactgtctggttttcttttttttacattcttcttttattccataggctaaagtgttttaaggttcaacaattctcatttaaggctcacatagatttcatctttatcatttattgtataatgcaatgataatgaaagacataaattatccataacatcggtaatgtctgtttgaagatccagttttcctgacaatgacaaggtagtaatctccgcatcataccgtattttacacccataataccgctcaagtttcttcaaaacatctcctacgggtctttgatgaagcagcaataaattatccttccaactgatgtattcggacacatcaaccttacgtacctgcgttttattacctttaatatccaccaattgattaggtgctaatcttactttgctcttattctcagtagttacttccacgcttccatgtactaaaacaacagatgaagcctcatcttccctataggcacagacattaaacgaagtacccagtacgcgtatatcaaactctcttgttttgacaacaaatgggcaatccttccttttggctacatccagataaacctccccctctaccaggatttcacgtttctgttcttcaaaaatatccggatatatcactttactacctgaatttatataaattctagtaccatcagaaaaagtaatatcagctcttttcccattaggaaccattatctggtgcatttcattctttacagatgaagcctgggatattttagtatttaatgcatactgctgaatattcgaacttcctaaagtatcatattttaaagaagcatcatttttcagattcatagcttggttatctgttatcagaatcacctcatcaccgcaaatggaagtcgtgtcattcagcaatgctatatcaagctccgtaccctcatcagcattggtactccaccagttcatagctaaaatcaaaccaatcgctgccgctatcgacaaagaccacctataaatatgacgtctgtaggaaaccctcttttccctttctactcgtttcatcacgtcctgaaaagatttttccacatcaacaaattccaattcatctgcttcccgaatcttctcagtcaggcatcgaactgttttacgaaattcatctgaattatatattgtttttttatttttcatcgaaatacctttttattaagaaaacggcacccgataaaaaaggtactcataaaaaagaaaagaaatcacacttttctttgcatgagtcttcgtaagaccaatagataaaccttatatgacaaataaaaaaacttattcatcacacaaatatcacttcatgaaaacatgcccaaatgataaaacaacaacaattaactactcgctaaatcaagagaagtgaaaagcccaaacactacgcacaggcacatgaacacaatgcaccaagatactgaaaatccaaatggttgaaacagagaaaaagaattcacgcaaacgtgccaatgtacgcgacaaaagattcttgcttgattgaggattcatacctaagatagcggatatttcctgatggctcaattcctttacataatataaatacagaatttcacgctgacgaccagaaagacgtgaaattgccttagccagcctcctttcattcttcacatccacatcatctttcttaaataaagaatttattatttcttcacccatcggaaaaaactcatggcattcttcaatcacttccattggacgtaaagactgaaacgcatccagcaatttatttctaaaagaacaaagcaaatacgcctttacattatcagtataatgcaaattcctacaatttaaaatcaacttgacgaacagattctgtatggtatcggcaaccagctctctgtcacctaccatacgaattccataggaatacaataacgaataatagcgtcgataaacttcttcaaatgccgccgtttctcctttaatgaaagattcccaaagtttagtttcatcatgtgttctatcaaccataatactagctccttaaaaacttattgagcttgctcagagttaaacttaacaagaaggcaatataagagatgaatcatgtaatggactcatcccttactttataatacctacatattattcaaacagtttactgcgcgacaacatacaggcaccgataatcccggctctttctttcaatttagattctacaataacagaatcacggttcatcaagttcagtgtatattttcgaatagctgtagtgatgggttgtgtcaaataatcacctgtacgtgacaatgcaccaccaataatgactagctccggattgaatatattaataagtcccgctacatggcggcctaatttcactccaatttcttccaccagttcaatacacagcaaatcttccttatttaccgcatcaatgatatcatccaaggtcaaatcttccaaatttttcttggtattggagataatagagttctcaccattattaatatgttccaacagaatacgatgcaaagcagcccccgaaacttccgtttctatgcatccttttttcccacaatggcagataatctcattctcatatccaaaattatgcccgaattcgccagagaaaccggattttcctttataaatctttccatcaatgataattcccatacccaatccccaactgacattgataaagatgatattcttctcacctttcacaacaccttgcatatactcaccgtaaatcatagcacgggtgtcgttgtcaatagaaacacgataaccacccaccttttctgatatgacatccgtcaacgggcgctcatcaaaattgaatatactgtaactatatcccaaatccggattcacacgcccggaaagatttacattaatatttaatatcttatctttctcaacactgactttttgaagaaaatgtttaatcaacttacacaattcgtctaaactctcaggggtattcttcgctttaaaaggaacattcatttttagctgaactacatctcctttaaaatttatcaaccctaagttaatggaaaactgacgcacttcaacacctacaaaatacccggaatctgcattcaaaccatacaaactgggatgtcttcccccactggtttccagctttccatagtcgttaatgtaaccttcctcacacatttcatcgatgaattttgtaactgtaggcacacttaaatccatctctcttgctaaatcagtaatcgtagagcttccattataaatataatgggtaatgattttcttcttcatcacagccatctttgagcccttttcaatttctttcaacaaattctcacccataataaaatattccgttaatgtccacaaatatagttatttttttatgaaatcaaatcacatttaaagagaattttcaaaaaatattttagaagatgtaagcaaattatcattttttgtaacaatcccactttccagatacatttaaataatatttcctagtcgtttattcatctttctatttattaaaagagtgattattaataaataaatttagtttttacttgttgttttcataaatcatttatatatttgcacgcaacatgattaagtaatataaaatattcatttcaaataaattaaaggctatggaaaagattcacggattaattgatgcaccttttactccattttatgagaacggagaagtaaattatgaacctattgaagcctattgccaactattggttagaaacggacttcaaggcgtatttatcaatggttcttccggagaaggctatatgctgacagaagacgaacgcatgaaactggctgaacgctggatggaagtagcacccgaaggattcaaagtcattgtccatgtaggaagcacttgtgtaaaatcaagcaaacgtctagcagaacacgctcagaaaatcggagcatggggtatcggagcaatggcacctcctttccccaaagtaggacgcattgaagaattggtgaaatactgcgaagaaatagcatgcggcgctcctgcacttcctttctatttttatcacatcccagctttcaacggagcattcctctcaatggtagcattcttggaagccgtagacggtcgcattcctaatttcgccggtatcaaatatactttcgaaagcctgtatgaatacaaccaatgccgtttatataaaaatggcaaatttgacatgttgcacggccaggatgaaacgatccttccttgtctggctatgggcggtgcacagggcggtatcggtggaacaaccaactataacggcaaagaactcacaggtattatcgaagcatggaaagccggtgatctggaactggcacgcgaacgccagaatttcgcacaggaagttatcaatgtcatctgtcactatcgtggaaacatcgttggcggtaaacgcatcatgaaactgatcgggctggatttaggaaagaaccggactccgttccagaacatgacagatgaggaagaagctgccatgaaagccgaactggaagcaatcaatttcttcgaaagatgtaacaaataaacctgaaccacgatgttttcaatagactatataaaagaatggtcggaatcatacaaaacagatctgaccaccaatatcatgccgttttggctgaaatacgggctggacaaggtcaatggaggtatttatacctgcgttgaccgagacggcagcttgatggacaccaccaaatcagtgtggttccaaggaagatttgcttttatctgttcctatgcatataataatatagaaaagaacgaagcatggctggcggcagccaaaagtacaatagactttatagaagcgcattgttttgactctgacggacgtatgtatttcgaagtgactgccgaaggcactcctttgcgcaaacgccgttatattttttcggagtcattcgcagccatcgccatgtcggaatatgccatcgcatccggtgaccagacgtatgctgtaaaagcattagacttgttcaaacggatgcagtattttatggaaacaccgggcatactggctcccaaatatctggataccctcccgatgaaaggacattccattaccatgattttgattaatgtggcatcacgtatccgtcaggctattcaggacgaaagcttcaatggacagattgacgcctccatcgaccagctacgtaaagacttcatgcatcctgaattcaaggctttgcttgaaacagtaggtcccaacggagaattcattgacagcaacatgggccgcaccatcaatccgggacattgtattgagacagcctggtttctgctggaagaagccaaataccgtaactgggacaaagacattacggaactggccctcactatctttgattggtcctgggagtggggatgggacaaagaattcggaggtatcatcaacttcaaagactgcaagaaccttccgccacaggattattcccaagacatgaaattctggtggcctcagacagagactgtcatcgctactttgtatgcatatttagcaaccggaaatgaaaaataccttgacatgcacaaacaaatcagcgattggacatacgcccattttcctgataaagagtgtggagaatggtttggatatctccatcgtgacggcacgcctgcacaaatggccaagggtaacctattcaaaggcccgttccacattccaagaatgatgatcaagggctatacattgtgcaaggaaatactcgacaacaaaaaatcacatttataaagccctttatctattagcatgaaaaacagtaaaatttatccttgggttgtagtaggattattatggggtgtcgccctgttgaattacatggaccggcaaatgctatccacaatgagagatgccatggcggtggatatcaccgagcttcagtcagctgccaattttgggcgactgatgggagtttttctttggatatatggctgtatgagccctatagccggaatggtgggcgaccgcatgaaccgcaaatggcttattgttggcagtttgtttgtatggtcggccgtcacttatctgatgggaatagccgacacttataatgaagtctttttccttcgcgccttgatgggaatcagcgaagcgctctatattcctgccggattatcactgatcgccgactatcactccgataagtcacgttcattagctatcggtattcacatgaccgggctctacaccgggcaggccatcggaggtttcggcgctacagtagccgccgctttttcctggcatacaacctttcattggttcggcatcgccggcattgcatacgccgtaattttgatgctttttctacatgaaaagaaggatagaatacaaattgaacaaataaattcaccttccggtaaagaaaaaagcaatttattgaagggattatcattacttttcagtaatattgcattctgggtgattctgctatatttcgcagcccccagtttaccgggatgggcaaccaaaaactggttacctaccttgttcgccgagaacctgaatataccgatgtcacaagccggccccatgtcgactatcaccatcgcactatcctcgttcattggtgtaattattggtggaaccttatccgataagtgggtgcaaagaaatataaaaggacgtgtgtacacgggtgccatcggcttgggacttactattccatccctgcttttactagggttcggccatagtttcgtagccgttgtgggagctggattattattcggtatcggttatggtatcttcgatgccaacaatatgccgattctatgccagttcgtatcatccaaacaccgtgctaccgcctatggtatcatgaatatgacaggcgtgtttgcgggagcagccattaccgaagtcttgggaaagtggacagacggaggtaagttgggactgggatttgccatgttggccatcattgttgcaatagcattggtcgtacagttgacattcctccgtcctaaaacggataatatggaataacccgtatagttaacttaacacttaaaacttaaaaaaagaaagaaccatgagagtaattatcgaacctgattaccaagcgctgtcacaatgggcggcaaactatgtagctagtaaaatcaatgcggcaaatccgactcctgaaaaaccttttgttttaggttgtcctacaggatcttcaccgctgggcatgtacaaggcactgatagaactgaacaagcagggaaaagtatctttccagaatgtcgttactttcaatatggacgaatatgtaggcttacctgaagatcatcctgaaagctaccatacatttatgtggaaaaacttttttaaccacattgatataaagaaagaaaatgtacatatactaaacggaaatgccgaagacctggaagcagaatgcgccaactacgaaaagcaaatagccgaaatcggaggcatcgacctgtttatgggaggtatcggtcccgacggacatatcgcattcaacgaaccgggttcatctttgtcttcacgcacacgtatcaaaacattgactacagatacaatcattgccaactcacgtttttttgacaatgacgtgaacaaagtacctaaaactgcgttaacagtaggtgtagggactgtcctttcagctaaagaagttctgattatctgcaacggacacaacaaagcacgcgctttgcaacatgccgttgaaggtggtatcacacaaatgtggactatcagcgcattacagatgcaccaacatggcatcattgtttgtgacgaagccgctacagacgaactgaaagtcggtacttacaaatatttcaaagacatcgaaaaagctaatttgtaatttatgagaacaaacctaagttcgcagatttctctgaacagagtatctccgaaatattataaacccgaaaatgcggtggaacgttctgtcttaacccgctgcgaaaaagtgcctaccgacatctatgaaacgatggaagaaggcgtacaacaaatagccaatgaaattacggcaaaaattcaggaacgtcagcgcgaaggaaagttctgcgtgattggtgccggaaccggtgcttcattacgtccgctttatgccgaactggtccgtaaacataaagatgaaggactaagtttccgtaacgtagtaattttcaatttatatgaatattaccccttggcttccgaaggggcgggaagcagtttctcacaactgaacgatttattcctcagccaaatcgatattgacaaacaaaatgtattcaccatcgacggaacgattccgcaggaagctgttatcgaatactgccgcctgtacgaacaacgtatccaaacttttggcggtatagatatcgtattaatgggcattggtcgtgaaggcaatattgccatgaacgaaccgggatcaagcttgagctctcctacccgactgattttgattgactcaacctcgcgtgctgaagctgcacacaacttaggagtagacaatcttcctccctgctccatcaccatgggagtggcaactattatgactgcccggaaaatctatttgctggcatggggagatgacaaagccgatatcatcaagaaagcggtggaagacaaagtaagtgacaccttacccgcttcttatctccaaatgcacaacaatgcaaatgtttgcatagatttggctgcagcttctcaccttacccgtatccaacgtccgtggctggttaccaactgtgaatggaacgacaaactaatccgcagtgccatcgtatggttatgtatgcgtgttaaaaagccgattctgaagctcaccaataaagattataatgaaaacggattgagcgaactgttggcactttacggttctgcttacaacgtaaatatcaaaatattcaatgatctgcagcacaccatcaccggatggcccggcggcaagccgaatgcggacgacacctatcgccccgaacgtgcgaaaccatttccaaaacgtgtggttgctttctctccgcatccggatgacgatgtaatctcaatgggtggaactttacgccgtctggttcagcaaggtcatgaggtacacgtagcatacgaaacttccggaaacattgccgtaggcgatgaagaagtagtacgtttcatgcacttcatcaacggtttcaaccagctttttgatgaaaactccaacgaaaccatcaaaaacaaatatgctgaaatcaagaaattccttgccgctaagaaagaaggcgatatggacagccgtgatattctgaccatcaaaggattgattcgccgtggagaagcccgtaccgcaagcacttacaatcaaattccactgaaccgtgttcatttcctcgatctgcctttctatgaaaccggcaagattgaaaagaatcccatcagtgaagccgatgtagaaattgttttgcagttattacgtgaagtaaagccccatcagatttatgtagccggtgacttggccgacccgcacggaacccatcgtgtctgcacagacgcagtgcttgccgctattgacatcgagaaagaagccggtgccgaatggttgaaagactgtcgcatctggatgtatcgtggcgcatgggcggaatgggaaattgaaaacattgaaatggccgtaccgttcagtcctgaagaactgcgtgctaaacgtaactccatcttaaagcatcagtctcagatggaaagcgcaccgttcctgggcaatgacgaacgtctgttctggcaaagaagtgaagaccgcaatcggggtacagccgctttgtatgaccaacttggtttggcatgttatgaagcaatggaggcctttgtagaatacgtacccctataatttaagaaacaacctaacctaattttatactaacctttaaccaaaaaaccgaaaatccccgatggatgtgatatccctcggggattatttttagatttccacttatctcaaacgatatccgataatcatcctcaccacagctacctgtttcgagaaacacacccccaactacatttcataattcattaatcccatagccaaacaaagcaaaatcccccagacaagggtcttcgggaaaaacctcagccaaagccgcagtaatagttctcgcattattcagcgtataagatttacttcgggtcagctccaatctgaaagccatctcactgacatgcgtatccaaagggataatcaactcacatggagagaaattcctccagattccaaaatccacttccgaatcgcgacggatcatccagcgcaggaacatattcaatttcttttgcggcgccttatccgacactccaaacaaacggcaaagacgttgcatcggagttccatccgtttcgcaaagaagagcatcctccatactctcatacctattatatatagtatgcagccaataaaacaattgtgccatcttattttttgaaaccgtccgatagaacgactcctcaccacagaaatctattttccagtttccagacaacacatactgcaaaggttgccgattcattatagaatccagtcgttctgctgccttcagtatctgagggcgggctccgaaactaagaaaagcagtaagaaaagcactgatttcaatatccgccttagaatgataacgatgcggaaactgcaccggatcagaggaaatgaaatcagagttatgataccgaacagcatatttccgcaaaaaatcagccactgccatctggccctcatgagtttgccgttctgtaatataagatatgaattgctcttgttctttctcttgagtcataaataaaacgtttataatttgtacataaaggtggattgtgttttcagaaatcaaattccattcctgatccttaacttgtcctttctatattctttaggtgaaatccctacatattgcttaaaatactttccgaagaaagactgagtaggaaagttcagctggttcgcaatctccttgatactcaaatccgatccttcaagcaattgtttcgcctcggtaatcaccatttgcacaatccattgcaaggcactattccccgacttctccttaatgatcgtagaaaaataacgtggagtaatgtgctgcatcttcgcataataggcaacatcacgctctttcctatacaaacggaaaagagccagcatgaaattctggaagatcacatccttcttattctgtggcaaaggctgcatgggttggttagcgaaatacatattcaatatttcatagcaaaaagtctgtcccattgacttaatcaactctaaagtcaggcgttgttgttgcaaattcacttccagtacgtcctccgcccctatcctttcctgcaaattatccaacagatactccaaatggatacgttgcttatccgaaagtgatatacaaggatggttccgcataaaaagctggttttccacattaatcaccttattaacaataggaatgagataatctaaatccacttcaaccataattccttccgcatccccactcttatgaagcagatgcaccaaggtagaagccatgtaaatatacacatcaccgggatttatctgaaaatgcttatcttccagtgaaacctccacatttcctttccggcaaaagaaaaggccacatttattaaatgtcgaaataatctgtccgtctttaaaagtatgcggatcactgctcgaaagcactgtaaactgaaaaggcatctgttgtccgaccatccatctatctcttttattcattcactgcaaaataaatacaaatcgcaaacttttcagctatatatctactagaaaatatacaaatcggacaatttatcattcatatcaaccttttctatcctcttgcttcgggataactttgcatcagaaaaccaatagcatgatatatgaaacaaatttatcttattctaacaggtatttccttgattctactgagttcctgcacacagcgtacccaggaagccaaaggctatcagacagtaaaaatagacacgatcgtttctgccgacaagcaaactttcctgcaattcccgggaaaggtaaaagccgcacaagatatcagccttgccttccgggtaagcggaaccatcagcaaaatacatgtaaaagacggtacccgtgtgcaggagggacaattactggccgaactggaccccaccgactatcaagtacaactggatgctactgaagcagaataccagcaaataaaagcggaagcggaaagagtcatggccctttacaaagacaacggaaccacccccaacgccaatgacaaagctgtatacggactcaaacaaatcactgccaagtacaaacatcacaaagaccaactggcttatacacggctctacgcccccttcaacgggtacgtacaaaaacgcctgtttgaagctcacgaaaccatcggagccggaatgcccgtcctatccatgatcagcagcgggactcccgaagtagaaataaaccttcctgcggccgaatacatccgccgggaccagttcgacaattatcactgtacgtttgacatctatccgggcgaaacctatccgctgaaactaatcagcgtcaccccgaaagccaatgcaaaccaattatacaccatgcgcctgcaagtagtacccggaacgccggctgttccctctcccggaatgaacaccatggtcaccatctcttaccgcacagaacagacgaacactctctctgtccctaccggcgccatcctgcaaaaagaaggcaaagcgtatgtattcgtcttcaacccatcggacaacacagtgcacaaacaggaaatatccatgctacgtttactgaacaacggacacagcctcatcactgccggacagctgaaaccgggagagctgattgtatcctcgggagtacatcacatcgaggatggagaaactgtaaaacctttaccacttgtcactaacacaaatataggaggattattataatggatatcagcaaatgggcattccgtaacaggaatctgatttatttcctgatagcggttctgctgctcggcggagcctactcctgctatcagatgagcaagctggaagaccccgaaataaaagtaaagcttgccatggtagtcaccacctatccgggtgcttccgcccaccaggtagaactggaagtaacggacgtgctcgaaaagaacatccgcaccatgggcaacatagacaatatagaaagttattcatacaacgacttatccctgatacagatagaactgctgagcaccgtgccggacgacgaagtggaacaatgctgggacatgctgcgccgcaaagtaagcgacgcccacgccctgttgcccgaaggagccaccaccccgatagtcaaggatgatttcggaaacgtatatggtatgttctatgccctgacaggcgacggactgtccgaccgtgaactgtccgactatgccgaactggtgaaacgggaagtgaacgaactggaaggcgtggaccgtgtggaactctacggcaagcgttccgaatgtatcaacatctccctgctgcaagaccgtatggcgaacctcggtgttaaacctgcagaagtactggcaaccttgaacggacagaacaaaaccacctatacaggatattatgaaaatggtgacaaccgtatccgagtcacagtaaacgataaattcaaaaccgtagaagatattggaaaaatgctggtccagggacatgatgacgaccagcttcgcctgagcgacatcgcccgtatagaaaaagactacgaggatcccacacgcaatgaaatgttttatgaccatgaacgtgctctcggtatactcatcgccgcctccagtggctcggacattataaaagtaggccatgccgtagaaagcaagttggtcgaactcaaaaccggacgtctgcccgccggagtggaatgccacaaaatcttctatcagcccgaacgggtaggcagctctttgggaacctttgtcatcaacctgatagaatccgtcatcatcgtagtactgatactgatgatagcaatgggattcaagagcggccttatcataggtatcagcctgatcatcaccgtattcggttctttcctgttcctttattcggcaggtggaacgatgcaacgcgtatcattggctgcttttgtactggcaatgggcatgttggtagacaatgctatcgtcatcatagacggcatactggtagacttgaaagccggaaaaaaacgaatggaagccatgactgctatcgggcgacagacagctatgcctcttttaggagccaccttgatagccattatcgcctttctacctatctacatgtcccccgacaccgcaggagtctacacgcgcgaccttttcatcgtacttgccgtttccctgctgttgagctgggtattggcactgattcacgtaccgctgatggccgaccgcagactacatcctgccatagataccgacagtaccggaaagcgtgtgtacaaaggtaaaatctatgccggtctccgttcggcactgcggttcggtctggcccaccggtggagttttgtattcaccatgattggcctgttgctactttccgctttcggctatccatatatgcgtcagggctttttccccgacatggtttacgaccagctttacatggaatacaaactgccggaaggaaacaaccacactcgtgtggcacaagatttgaaagaaatagaaacctatctgaaaggacgcaaggaaataacccacgtcaccacctccataggcggtacgcccggacgctataacctggtgcggagcgttgccaacccatcgctttcgtatggcgaactgattatcgatttcacctcaccggaaaccttggtagaacatatagatgaaatccaagcttacctctcccaagcctatccagacgcatacatcaaattgaaaagatacaatctgatgttcaagaaatatcccatagaagcgcaattcctgggccccgaccctgccgttctgcaccaactggcagacagcgcccgtaccatcatggaaaatacaccggaagtctgccttatcaccaccgactgggaacctcagattcctgtactgaccatcgaatatgaccagccgtccgcccgtgccctcggcctgagccgcaatgatgtcagcctttccctgctcactgctaccggaggaattcccatcggctctttctacgaaggcatccacaaaaacaatatctatctgaaatgccttgacgaaaaaggagaacccatagaagatttaggcaatgcacaagtcttctcgtcactgccctcgttgaacggactgctgaacgaagaaaccatggtgaaactgaaagccggcacgctttcgaaagaagatttggtggaaagcatcatgggaagtactccgctgaagcaaatcagcaaaggaattgatatccgatgggaagacccggtagttccccgttacaacggtcagagaagccagcgtgtacagtgttcgcccgcaccgggcatagaaacggaaaaagcacgtcttgccattgcagaacgtatagagaagatacaactacccgaaggatattcactggtgtggcaaggtgagaagatagccagcgaccagtccatgaaatacctgttccagaacttcccgttggccatcattctgatgattgccatcctgataatgctattcaaggactaccgcaagcctatcatcatcttctgctgtatcccgatgatttttgtaggagtggtagcagtgatgctgctcacggggaaggtattcaacttcgtggccatcgtaggaaccttgggtcttatcggcatgttgataaagaacggaattgtactgatggatgaaatcacccttcaaatcagtaaagggatagaacctgttaccgcattgatagacagttcccaaagccgtcttcgtcctgttatgatggcttcgctgaccaccattctgggtatgattcccttgctgtccgatgccatgttcggctcgctggcggcagctatcatgggcggattgctgtgcagcacgctgattacactgctctttatccctatattatacgccttgttcttcaaaataagaaacgattgatttatttcactgacatacaaaaccaagaacaaatgaaaaaaacaatgataatccccttctgttttctgttatggcatcttgtcaccccggcacaggcacaggaaacactgagtctgaaagaatgccgtgaaatggcattgaaatacaataaggagatggcggcttctgtaaaacaaacagaaagcgcccactacacagccaagagttacaaggggaacttcttccccaatctgacagctagtggaaccggactttacagcaatgccgacggcagttatggcatagccggaggcaacctgcccgtctttctgcccgacgccaccggacagtttaatccgggacaaccctcaggtttcgcctattttcccggtatcaacctggattacaagataggatgggtctacatgggtggcatacaattagaacaacccctctatatgggcggtaaaatccgcgccgcctacaaaatgtccctgttaggtaaagaaatggcacagatgaacgaaaccctgaccgccacagaagtcattctgaaaacagaccaggcatacgctctggtagtgaaagcgaaagagatgaaaacagtggccgacacataccatgccgtattggccgaattgcaaaagaacgtggagagtgcctacaagcacggattgaagcctcagaacgatgtgctgaaagtgcaagtgaaactgaatgaaagtgaactgggcatacgcaaagccgagaatgctctccgcctggctaccatgaacctctgccacctgataggaaaaccgctgaccacggagatcctcatttccggagatttcccggaaatagaacaggaaatggaattacaggtactggatatcacccgtcgtccggaatacggtatactggacaaacaagtggccatcgcccgccaacaagtcaagttaaaccgcagtgaactgcttcccaaagtaggcatcaaaggttcatacgactatgtacacggtttggaactgaacgaaaagaattttctggataatgccagtttctctgtcctgttgaacgtaagtattccccttttccatttcggcgaacgcagcaacaaggtacgtgcagccaaagccaggctggaacaaacccgtctgcaacagcaaaatctgaacgagcaaatgctactggaactgacccaggccgccaacaatctggacgaagcgaaactggaaagcgaacttgccgaccgttccctgcggcaggcggaagagaaccgacgcgtcagcaaaagccagtacgaagtagggctggaaactctgtcagaccatctggaagcccaagcactatggcaacaggcatacgaaacccaagtggatgcccgtttccaactttacctgaactatgtggcttatctgaaagcagccgggactttacatgacaaactgtaaaagtctctaccctgagtttttggttcttcttcattttggggcaagtgatttattcatatccctttattcatcggctattagattgtattcggggatatattattctctattttcgaatattcattcgaatgtctttattggtcgaactttggtagtgaagtgttgcccccaaaatgaagaagaaccccgagttttaaaaagtgctaccactgctaccaccctttcttgtataaccacctttcttctctttttattcccaaacggataaaaaaactaaacttcgggaacactttcctgcttgcgcagcacatacaccgcatgagagtgctttccctctttgtccaatctcttctcttcgtaccaacccttcagctcataagcagccgtggtgcgcgccatccccaagcattccgaataaaccagacgtgtaatggaaccgtgttccttcaaataagcttccagcaatttccaacgctcctctttagtatacttcttccccgtaggcaggaagccgaactcggcacgaaggatatccgtatcctgacgtaccctcttgactaactccggtaccggacggaagttcactttctttatcctcacggacgccgcacgtatctctttccggtctgtcacctcacgcgaggacaaggcaagagagaacgtacccagtccgtccagccgcacatttttcccttgccgcaaatgggatacaaccatatcggccacctcctgtagcactcccaccacacagcccgccgaatatgcgctgtgcttggacaactccttcacaatgtgatcggtagtaatcgtttccttcaccactaccgccggataaagcaccggcttgccgtccttttccttgaaagggttggccttgaaatcatattttatatccatcattaaaagatttgatttgtatccgtaagccctttctgctctatggttaagggttctcttccttttgtattctatctccataagctttggacttaactccaaaggctatggagttatctccaaagcttatggagtcaactccgcaacctatggagatagaacacatctggacaaaagtacttaatctttaggggaaaaaggcttaatataacggaaaagatggattaaggagaaaaataatcaggtagttggccctttcttaaaaaatagaatgaataaacaaaaggatacgaagtgatttgatgtacacggaaagcaatgaaaacattgtctgatataaacagaaccgttataaccaatcatctgaaaatatatttgatatatatgagttagaaaaagaagtcctatgcgcaaaatcgacacttgcaacaaaactcttactgcctttttgccacatatcacttttttatcctatttttgtgttggtaacaaactaatacccataatacacagactgatgaaaaccaccattttacttggcttattattaactcttacagcttcatgcaaacaccattccaaccccgtaactacagaagaaaacttccacacccaagaagccaaccgtctggtagcagaagcgggaaacctatggtctccttctttggacagcactttcttctttaataatgacagtgaacatatctctataaacgacaaggaaatatgggccaaactggacagcgcgttagccattgaccctaccaatataaaagtgtatgtgggaagaatcagttatttatcagcgtgcaaaaagtaccgtgagattctgtctgtactccggcaagccgaaaaacaatccctcctcagtgccgacttatggtcaatgaaagcgatgtttgaagattatttcggagacagccttaccgcccaaaaaaattatcggtctgccgattccgcctatgccatcctcataaaagaatatgctacagacagcctcaagtatgccagtttccgcattaaccgcgcactgaatatggcattgatgactgataatattgcggttcttaaagaagaggtggaactcgctaaaaagatatttcctgagacatggaaaggacttgacactaatgtttacgggaaaaacaaaaaagactttttcgacaaatgctttaacgtccgcaaaaagtaatcctgcctgctacattaagaaaattactaaatcattgcatttgaaagaacagacctgtaatacctattttcaatacaaagatttttatagcacaaaggtgtaactttctccccttcctgccgactaacctttggaatcttgctttatgttttggctctaaactttatcggaattattggaaaaaaataaagaaagaaatctggaagaacaaataaagaatgtactccaatacaaaaagttatttcattggggctatattacaggatacccaattgttaccatattcctcggtgtatttttttataattaccatcaatggtggatggtattgaccatatctatcttgatgctgatggctattctgactgactatttcctcttccattatgtatctgacagaattaaagagctgacacgggtgaacaaagagttggcagaactgaaagagatagaagaggacattttatgcagtactaaaagctgattcgtccgtcataggatataaatgattttaacgccatgaatgatttatgttcttataaacttcctgtagatattgtgtttcatccctcgtggtggaacaaacatgcagggattgttttcgatgaaagctttttctatgaccccatccgcagggtggaagatgaaagacgcatggaaatggaactgcacgaacgtttcggtgagttcgggttaggcaaagattatgataaggatctcccccagataggtgctgtacatttggctgccggatatttactttcggaaatgttgggatgctctattgactatattcccaatgccgctcctcaagtaatttgcccgcacttggaaggatttgagttggatgaggaaaaaccgtttcaaagcccggctttcaaaaagctgcaaaaactaattgaagagttgaaagctcgctatggatacgtctgtggggatatcaattggggtggcgtgctcaatctggcaattgatttgaaaggagagaatattctgatggatatgatattggagccggaaaagacacatgcctatttttactcgattgctcgtgtggtagaacgttttttctcttatatttatagcgaaaccaagaccacttccatatcggtaaaccgtgtagcccgcttattggagaaaccggtatatattcattcggaatgctcgcataccatgatttccgaagatgattatcgtagtttccttttacccattgatatggaatggagcaaaaagtaccgtccttatggaattcattattgcggaaaagacccacacaggcatgcagcgaattttgcagaaattccacatcttgattttcttgatgtaggttggggaggagatgtgaaaacactccgtgaatacttacccgataccttcttgaatatccggttgaatccggtagaactaaacggatatagtaaggatgaactggcccggatgatcaaagagcgagtaacccaatcgggtaatccaaacttgacaggtatatgttgcatcaatatggatgccgaggttacggatgaaaaagtagccactatattccgcacggcagagcaatgcagaagggaaatgtgacaaataattcaccttgtgaaagctatcattttgtcattctgaacgctgttcagaatgacaaaatataaagagtatcaaattgctgaaagcactcttttttataatgtataagttccttcgaccagcttgcccatcgcccatacggcacggatattcaaatcctggtcaagaatcaagatatcggcatcttttcctttctgcaaggaacctttacggtcatatactcccataaatttcgaaggagtttcggaagccatacggacagcatcctccaaaggaatttccgccttctgcaccaaggtacggatcaaacggtccatggtagccacactgcctgccaatgctgaacggtctgccagtttgcacacaccatcctctatgatgacacgaggatcgaaagccacgttactgtcactggccgcacatgccaaagcatctgtaatgacacaagcacgttctacaccctttatcttataaaccaaccgtaaaatggtaggtggtacatgaatgccatcggccaccacttccacattcatatcgtctatcagataaatactctctactgttccttcatatttatactcacgacgcttgtgaaaaccgggcatcgcattatagaaatgcgtggccagcgtataacctgaatcccatgcagaacgaatgtcttcatattcagcctgagtatgggccacagatgccacaatcccttttcccgtaatgtattttccgaactgcatagcccccggcaattcgggagctgcatcccaacgcttgatacaattccatttctctacaataggaatatactcattagggtccggatctttaatattctcaggcatttgtccaccggccatcttgatgttcagataatgaccttccaggtgcaatcccaataccggactgtccggttccgccatcaacttggtacaagtttcggcagccgcctcaatcatcggtacggtagaagaagacaatgttggaaaaatactggtagtaccatgtttcatgtgagcattaatggctgtacggaaagcctcttccgtaccttccataaaatcaccgccaccaccaccatgacaatggatttccacaccaccgggaacaacatacatacctttagcgtcaatcagctcggctccgataacagctaaatcacaattggtaacttctaaaatcttattgtcgcgcataaggacagacccgtccttcaaccagccctgtggggtaagaatctttgcgttaatgatttgggtcaacatgatactatgataagttaggatttttaattggcatattacatttgacaacaaaaatagcaactttttcatttttagaagcaggtttccccaattattttctaacttttttaaataaataagccccgcttaataaaatcaagcggggcacagatagtggaaattgaaacaaatctttttacttacttattaaaactagcctacctgatttaagtcctttacctgttgcggtcagtgtaatttctcccggtttatcggtgctttgcacaacagcagtcatcattccgttaaacactttcatttgcggaacatggaaaagttccaatgaagtggggtctccgtttgcaccggcacgataggttcccgcaccttttacagcatacttgatgagatgttgcgcatcgggacaaaggttaccttctttatccaccactctcactgtgacaaatgacaagtccttgccatcagcctttatttcattgcgatctgcaaccaattctatatggtcgggcttacctgccgtatggatttccttttcggctacagcatcccctttctcattgtatgcaaccactttcacggttcccggctcatactttgtatccatccacatcaaacggtagcgtttctggcgcttgaaatctgctatggaagctgaatccgcactattttcagccgttacagtcaaatccttggtacgcttaccctggctcttgccattgataaacacttctgcagacggataattggtatagacaaagatcggggtcacttctccttcacgtcccggccatgtccaatgaggaagaatgtgcagtgtctcttcatctttgttccaatggctgcggtacaaatagtaacggtctttgggcaatccggccaggtcgattataccgaacaaagaagaatggctgggccagtcagtataataaggagtcggttcgcccagataatcgaagcccgtccatacgaactctccgatcccccatgcgttatcctcgtgccaaatccagtcgtcttccggcaaattggaccaaccacaatgttccacatcgtaagaagaagactgatgatcgtcatatttcttcatagcctgacggacaacggggaatttatagacaccacgcgaacttactgtagaagctgtttcactacctaaaataatttgctgaggcaacttcttatagttttcaggatatttatggggacgataattgaaaccggccacatccataacggcagccatattattgtttaccacggcatcgggcgcatccataccttgtgttacagggcgggtggggtcttcacgatggcaaatatcctgcaacatacgcgagagtttcggaccgttactgccgctccactggtcaggtacttcattacctgtacaccacatcacaatacttgggttattacgatagtgacgaatcagattcgtcaaatccttatccacccattcatcaaatactttatgatatccattggccatctttgccgatttccattcgtcaaaggattccgccatcaccatcatacccatctcgtcacaagcctccaccagttcgggagccggcatattatgagaagtacggattgcattacagcccatatctttcagaatacgaatctgacgacggatagcggcatcatttacagcacctcccaacgggcctaagtcatgatggttacatactcctttgaatttggtcaattttccattcagaaagaaacccttgtcggggataatctccaaggtacggataccaaaacgagtggtatattcgtctttcaaggtattcccttcatatactttggattcagccgtataaagaaccggagtttcaggactccataactcaggattggctactgcaaactcctgttcaaacaaagtattgtcaaaaacactcaacttgttttccccggtagcaaccactttgccgtttttatccttaatctgcgtcacaatacggtaattatccttattggctccttcgggactaaccaaagaagttttcaaagacacttttgcatatttgtctgtcaccacgggagtagtagcatacgtcccccatgtcgggatatgcgcatcttcattgattaccagatgaacattgcggtacaaaccggcccccggataccaacgtgatgattcaggctcgttttccaaacggactgccagctcgttcttctcacccggtttcagataaggggtcgcatccacataaaaggaattataaccgtatggccaatagcctgcctcctgcccgttcacatagacacgggcatggctcattgctccgtcaaatatcaaagtagccttcttgcctttttcaaaaccgggagcatcaaagttcaggcgataccatccggttcctacaaatggaagacctccggtacggccggcatgttccagagcctctgtctgtccatcctgagtgatagccatttcctgcttgtcgttattgatactgaacggaccataaatcgcccaatcatgaggaacggtgacgttctgccatttactgtcattataaccgggattggcaaattccgcattatcttcacgcgtaaatttccaccctttttcgaaagtctgctctgtacgtacctgcgcttgcataaaagcaaaacaacaaacagctcctaacgcagcacacaaaaatcgtttcgtattcatagttatttcttattaggattttctgttactataaaagtaatttcacctgccttgatcaaatcatcatgcgaaatcaaatatttattaagtttcttattgcccagtctgatttcctttatataatccccttgtccttctttcttgataaccaattctttcttgccccaatagttaggatcaagctgaacggtcactttatcaaaagtaggagtagtcaatgtatattcgggcacacccggacaatccggatagaatcccatcatactgaatatagcccatgcagacatcgtacccgtatcatcattgccaggaattccatccggcttagttgtgaaatacttagccagcaattccttcaccaatttctgtgtacgccattcttcacccttgaaacgactgaacaggtaaggataagctatatcgggttcattagccggatcataatttccttcatcgaacacgctttgcagcttatcgacaaatttcttatcacctcccatcagtttcaccagtccattgatatcatgaggaacaaagaaagtgtaattccatgcgttaccttcgtggaaaccgggactaggtgcaaaattcgctccttctttcgggtcaaacggttcatagaacttaccttccttggtgataggacgcaaagttccgaaatccttgctataataattcttataccccatagaacgtttgcggaacagtttcgcatcttcctttttacctagagcctctgccaaagtggacagcgcatagtcggcaacataatattccaaagcatgagaaaccgagttgtcatactggctttccatcggcacataccctttggacatataatcgtcattatccggacgcatcagattatccttgcccggagtagtggccgacttatacattcccttataagcttcgtcaatgtcaaagtcttgcaatcccttcatccaactgtctaccagaacaggaatagaggggtcaccttccatagtcaatgtttcacgaccatataattcccatttcgggaaccatccgtgttccttatacatacccatcatagtatgtatcatatccatctgacgttccggatagaccaaagtcatcaactgatggtagttacgataagtatcccacaatgagaataccgtataacggttacggttggtggtcagaatcttgtctccctccatttgtggatattgtccgcttacgtcctgcaaaatattaggatgaatcatggtatgatacatagcggtatagaatactcccttttgttcttccgtgccaccttctaccttgatacgggaaagatcatcgttccatctcttacgggcctccgcacgcagtttgtcgaatgttgtgccgaaaggctgttctttttccaaattcagacgagcattctcaatgctgacaaaagatacgcccatactgacctcaatcacttcttccgccgtagtatcgtaagtaaaccacactcctatatcatctccgcttatttcttttgtataagcagtatagagtttgtatttaccggctgtatcgtcccattgcgcctccacacccatcggacgcatcattttccaataaccgcgttttgccggtactttgttgatacgcattacaaaatagatgggaaatactgcctgaggattgtaacagaaagttcccaacaacttggtaccttcaatctcacggtcgtttacaaaacgaacggtagcaccactctcattggtcaatccctctcccagattcaacaagatattgctttgtccggcaggaaaagtaaagcgtgccatactggtacgtggggtggcagtcagttcacatttcacattgtatttatccagtatattggtataataacccggatttgcagtctcaccttgatagaaacttccataattatgataatccacatccagtttgccggtggtaggcatcaataacaatgaccccaattccggacagcctaccccgctaaggttaacgtgcgcaaaaccggtaagatatttattattgaattcgtatggagtggaccaccattgcttatctttatccttatccccttcgggaactcccatcacattgaaaggagtcaccgacatcattccatgaggagttaatgctccgggatttgtcgtaccgtaattagtagtacccacaaaagggtttacataatctaccggctctttctgtgctgccgcagaaaaaactgagatacaaatcagaacagccgataacaaaatttgtttcttcatgctatttgttgtttatataggttctattatttcactacaatttcatctgtaaacaagaaacctccgaattcacccgaagatgcctgataacgtatgtaacgtgctttggcatttccttcccaaccaaagttggtgaaagtcaccttgtcatccttcactactttgtgttccatgcgcttcagttccgtaaactccttaccatcattagaaacggaaatgattacttctgaaggcataaagacttcaggtccacacacctgcataaagtctgctccaacagaatgaatttctgtttctttttccatatcaatggtcacatccattctttttttgtctatgaaaccttgccagcgcttgtcaccataagtccagcctccaatcaccccatctaccaaggcactatcaccaccagccgaatagccgggataataagcggcatccggtccgtaagtcactttcttacctactgccaagtgttgtatgggctgatccgctcccggacgatttcctatctcatttttcaaatcgaaaggatggtatccttcagctttcaatgcctctacctctttcaatgcgcgagcatgaaaatcatcatagttcttcacagaaggatcactccaagcaacttccgccaacgcaagaatacgaggataaatcatcatttccgcatgttccggagtcggaatatattctgtgaataaattagcttgtactccatacactaactggactttatccgcactcaaagtatcgggtacaggattaaatgaataaactttggccaaaggcagataccctcctattgcttccggctgggaatcaggagcatcctgataagaatcaaaatagcagaactcacccggactcataatagccatgtggccggaatcaaccgctttcattcccccttccgtgccacgccatgacatgacagtagcattaggcgccaaaccaccttccaatatttcatcccaacccaataatttacgtccgtgggcattcaaaaagacctcgatacgatgaatcagataactctgtaactcgttcacatctttcaagccctcttttttcatacgtgcctgacacagtttgcaagtgggccatgaggctttaccggcctcatcccctcctatatgaatatattcggacgggaaaagttccatcacctctgtcaacacattttccagaaactcaaaagtcttttcattaccgacacagaaatcggcttgtttgtaaggttcgtgtgtacaagacaactcgggataagcagtcagtacttcttccgaatgtgcaggcatctctatctcaggaataacagtaataaaacgttcctgagcgtatgccaccagttcacggatatcatcttgagtataataacctccgtgagcatctttactaccttcttcttcataccgtcgtccgttattccaccattctttccatgtaggaaactcacgccatgccgcaaattctgtcagacggggatatttttttatttcaatacgccagcccgcagcgtcagtaagatgcagatgcaaacggttcaatttataatatgccaaagcatccatctgcttttttataaattccttgttgaaaaaatgacgggaaacatccatcataaagccacgataagcaaaacggggctcgtctgtaatgactcctaccggcaattctttttcatcagccatttgcagcatagtctgaactccatagaatagtcctgctccggaagtcgcacgaataagtacctgatcaggagttaccgtcagaacatacccctcggaagagtttacctccggcaattgagccacttgcttcaagacaatagtatgtccctcttctgccgctaccggtttcagcttcatgaaagaagccgccaaataatccttcaaaatctttttatctccttcggacgcatctatatacaatcctgtttccggattcagaggaaacacttcctgttgcaattccaccttcaatggtgcaggaataacagaaagtgtgcgttgctcttcctttgtgcaacttgcaaacaacaagcccaatgcagctcctgccaatataatcaattttctcatcttctattttctttaattctattaatttcattggtacgaatgcccggtttcagttctccattaataatgtaatggaatccgtcctgagaaactattacagctccggcacgcgcaccttgctcatattcgcctaatgtagtccatttattcgtctgtggatgatagagcagcagatttctgttaaaccgataccactctacaggatgtgacaaatattcttttcccgcataaataccttggagagcctttaagaatatatccttatcaactcctccggcacacaatatcatcccctcgccaaaagaggttcccattccaccacctaaagagatctcattaccttctgcatcacacggagtggcaaccgatgaccattctttcgtttccggagaatacatatatccatctaccgataaagaagcctggtgcccttcaatagccggggcaaagccaccccatatataaagttttccgtcttgcgccacgcaaacaggttgtactctgggttcacccggaatatctgtttcttttttccatcctccagacaaatccaacagatcaagcatgtacatggccgaggacggaatgccatttacatttcccccgacaatatatagtgaatgtcctactaatgcacctgccatattatctatagttgcaggtaaggatggtaacgtatcctttttcaaaacgtctttttgcaaagataaaagaaaaacatcagacaggctatgggttgctgtagctcctccaacacaaattaaccctttttcagtagaaatagtgactccataagctgctgcctgaggcagttggcctatttttttccactcaaaagccgtatcatttgacaaagaggttatatatacatctgggtaaaagacttttttcccgccatcggccgccggtgtatcgggaaaattacaacctccggctattaataaatttccatcaatcactcccgcatataatgcagaaactcccttaagaaaaccagcatcctccgtaggaaatccctgcattttctcaagagatatttcataaacatccggccggctgctacaagcagccactaccatcatgcctattatcgcataaatgccatatattattttcctgatcatgttttcatggtgaagtttacaaattctttacaagcagtgttgcgcagctatcttttaggacaaacgctacgcaacaccagcactgattttacaattaatctacagtaatttcatctacaaacagaaatgcaggatttcctttacctccatgccaagaaggaatattgtattccggctttgccaatactttcagataacgtgctttcacaggttcaaagctcaatacatgttcatataattggtttggattatccaaagtcattgcaggatattcttctgaagctacttgcttgaaattctcaccgtcttctgaaacagcgacactgatggaacgcgcgtcaaatatccagtcacccttctccacatttgtagtaagtgtcactttgctgaaatcagccggctgcccgaaatcaatcacggcttccatatcattcttataaaaagcaatccaacgtcctgtcttataatttctatttcctttcaaaccatccaccaaggtagagataccggcaaattcatattgcttgttcacaggttgtagagctgttattttctttgaagtcgatttgctgaacgcaatgtcttctttcacaatacgactattgcctgtaggacggacagccatagccttaaacgtacaatttgtattgatcttcaccggttctgtataaagctgtgaagcggtagtgggatctgtgccatccaatgtataatataccggacagttgtctacagtagacaaagtaacatccaccgtaccagtttccgcattaggctcaaaccgggcagacacatcaaacacatgcttggcataattatactgatatacatcatatatcttcaccatacgtaccaaacgctgcaagaaatcctgataatccttatgttcaggatttgtccattgaatatctgccaaagcggccatacgtggtaattccatatattccacctgactaaatgtaggaatatactcagtccacaaattagcctgtacacctttaatatatttctgttcctccggtgtcagtgatgccggcataggttcataactatacacacgttctaaaggtaagtaaccgccaatggcttccggttcctgttccacatccttgctctgataatagtcaaaatacaaataagtattcggtgacataataacatcatgcttctgcttggcagcctcaataccgccaccttcaccacgccatgacatgacagtagcattaggagccaacccaccttccagaatttcatcccagccaataatctgacgtccgtggtcattcaagaatttttccgcatgattgataatgaagctctgtaatttttcctctgccgtgtggttcttgtcagccttaatacctaaagctttgatacgatcctggcactttggacattttgtccaacgcactttaggacattcatcaccacccacatgaatatattctgacgggaaaatctgaataatttctcccaatacatcatctatgaatttcaaggtttcatcatttcctgcacaaagcacatcttccgatactccccagattttccatacttcgtacggaccacctgtacagcctaagttaggatatgcagtcaatgccgcttgcatgtgccccggcaaatctatttcaggaataaccgtgatatgacgttcggcagcataagctacaatttcttttgcttcttcctgtgtgaagaagccaccataaggctttccatcatattttcccgagttatgaccgataacggtttccgttctcttagaacccacttccgtcaattcaggaagacctttgatttcaattctccaaccttgatcatctgtaagatgccaatgaaaacgattcatattatgtaaagccaacatatctataaaacgctttaccgaatcaaccgggaagaaatgacgggaaacatccaaatgagcaccacggtaagagaaacgaggatagtcattgatttcaaccgccggtaaagcgatatccactccttgtgccaccggaatagatttacgcaaagtctggatgccataaaatactccggcttccgtaggtccggaaataaccacttggtcgctggttaccttcaactggtatccttcaggatttttagcatttccacccaattgcaggattatccccttgccatctgtgccagcttgtacagccaatgactttccggtaagatctttgatataacttgccagaaattcagcattcctttgcatcttttcattgccttccggatacattatcttagttccatttgacaaaatgaacggagcagcctgatccattaccgaaatttcctgcggtaacggaattatctgataatttgcttcttttacttctgtgttacaggataaaagcataaaacctgccattgtcagccctgcaaggcccattaaagttttcataatagatattaattgattagttagtatcacttaattgcttgatagttatatcaaccttttcattcttcttcagtttatctgaagtaataatcactttctttgtctgtcccggcaacaagtcaaagaagttatcagtaaatttcgcaccttgaacaggaatctctatgaacacatccctggccagctgtctggcagacagagtcacttcatattttccatccatcggcttcactttatagcggatctcggtcttcggtagctcctgatcttttgcgtggttaaagtaataaatttcttcggataaaacctcacctttcttgttttttaatgtcattagaagaaaagtattttgaggacttgttgttatacccgcataaggttccttataatataaggtggaagcattggccggaacctcgcccttgatactctttttagtcagaacttttccattaaaatccatcacacgcaacaataaagtcacctctttatccgcttccagcttgtccgacataacataaatattcaaatcctccccttccttgacagcatctaccaataccggagcaaaagctctttttgcctgataatgcaacgctttccaattgccataataatcaatgctcgaccaggaaacgaccggccagctgtcattcagctgccaatataaagtccccatacaatagggacggttacgacgatgggcttccaaaccctggcgcactcctaccccctgcaaaaccaaacccatataaaccaactgatcgaaatcttcaggtactttataatacagtcccatagtcttcttgatgaggaaattaccgatagtggctttttgatgagcattcatcacctccgattccaatgcataatcttccggtgaggcaaaagtagcaatcgtcttcatttcaggaaatgcctgaaaaccaaactcactcataaaacgcggaatttccgtatccagactttcaaacggtttctgaccataccagataccccaattatggctgtcggcaatcttccagctttcaggacgtccccaattggcctcgtacggagaaccatgcatatagaaacggtccggatcaagttcagctactttacgaggcaacaactcacggaaaagtttgtcataaccctgcttcattccttccataataccgggatcagtgtatttcttatcccatccccagtaacgcataccttcataaatttcattatttccacaccacatagccagactggcatggttccgtaaacgcttgatattatattccgcctcggcctctacccgtttcataaaagcaggatcggacggataagtagtgcaggcaaaaataaaatcctgccaaactaaaattccattctcatccgccgcctggtaaaaagcatcatcctcataaatccctccaccccatacacgaatcatattcatattggcatctttcacatccttgaacaactggcggtaacgttcttcagtaatgttaggcagcaaagcatcatccggaataaaattcgcgcctttggcaaacatcggttcaccattgactacaaaatagaaggattctccctgatcgtctttttctttcaccacctttattgtacggagtccgatacgctctttttgagaagctatcactttaccatccacctttattacggcttcaaagtcatacaatgcaggttccccccaaccattaggcatccataaatgaggctgccgtatctctatgggaagaagaatatggtttgttcctggctgcaatgtcacctctttctgttcggttaccttttcaccctccttataagaataagcaacggttacttccgctttctgaggagttgcagaaacactgtttacagtcaggaggttttcaactttcgccagatcttttgttaccgaagcctgacgtacatagtaatcatcaatgcgtgccacatcataaaaagtcagtgtcacaggccgccagataccactggttaccaagcggattccccaatcccagccataactgtaaggcgctttacggctatagatactgacccgcttatcactatggtcattatcagcaggataatcaaagccattggtttcccattggggcaacgtttgcttgacaggtgaatgaaacagaatctgcaaatggttttctcccttccgcaacacctcttttaccggaagagtatagccgacaaacatattgtccgtacgttccaacaaagagccgttcaggtaaatatctgcatacgtatccaatccttccaaaatcaacaaggcagcatcccgcgagagttgctcatctgtcacattaaaagtagttttatagacccagtcctcattctccacccactgcactttttgctcattcatcccataaaatggattgggcagttttttatgagaaatcaaatcctgatgtaccgttccgggcaccgtagccggcaaccattcattccggccgacctgggcgaactcccatcccttatcaagactcagactctctgacttcttatactcctttgcactgagcatcatcggaaagcatcctaacatcatcaaaacttttaatgttttcttcatcttacctatctttattaatttatatactattcagcccggaatgtggaagcaggcaaaccggcgccatttaccagattggcacgggtaaatggctgccatccgtaacgaaccgtttccggctctttcaccttatcactccatacttttattttaccgttttcaacaacagcctgtgccggataaaataatccatcatcacctgccacttcgaatgtacgaaccggtttcccatccgaagtggacaacttctccgcataatcaaaagaaatataagccgcacctccactaaatacgactgatttataaagcggtcccgaaggaatgacatttttatatccgtatgttttattcaaagcccatgcagccaaccgttcaccgacttctcttttctgtttggggtgtacgtccaatgagtctcccctatctgaactgacagccataccggtatgaggaatctccgccatcaaacgacgctggctatcacggaaccaagtccatgacggacggtctatactggacaattggacaaaatagaatggaagttccgcatccccccaattcttgcgccaactttccaccaacaatctgaacaacttttcatgagtctcccgattatgggcattagactcaccctgataccaaataaagcctttgaccggaaactgttccaaaggacggatacccgattcatacaaataacaaggctcataaggatggcgttgcaatttattgaaagacttctttacattcaaggcagcacgcccacgcacccagtcttggataaaatcattctgcatccaattacgtaaaatagccggaaaacgatattccaatgtactacggtctatccatgcttcagtaggagatccgccaatggcattgcaaatcagtcctacagggacttgcaaactatcctgcaatttctttccgaaatagtaagccaccgccgaaaaattaccggctgtttcaggcgaacaaactgtccaccgtgtatccttataatattgcagatgattcaatgaatcgagtaccgaagcatcccactccaccgcatccgtacgccaacgggctttcatatcataaaaacggatattgctatttgcagcttgaggaacatcttgtgcggcagtcgcactccaattcagataaaactccatattcgattgtccggaacagagccacacttctcccgccaacacattttcatagaccagtttccgtttttctgtagaaacagtcagtgtatatggaccgcccgccttcaatggccggacatccaccgcccactttccatctgctcccgtcacagcctgaagttgctgcctgtctatggaaacagttactttctcaccggcatccgcttttccctgaatagtcagcagacgtccatgctgcaataccatattgtccgtataaatttccggcatttgcaaaccgccaaaatcaccggttatgccttcatacaccgtttttgccaagacagccgcaccttccttatcgggatggacagcatcgggcaacataaaaggatatggatataaaggtgcatgaaaatctatcaactgtacttgtgcgtatttcgctatcgtttctatagccagctgaatctcatcatgccagtcgcgtgtgccggactcaaaccgcggatggcggtcggcaatcggagtcagacgggcaatcaaaatacgacattcaggattcgccactctgaacgaatcaatcagtgcacgataatccgctataaaaaaatcacggtaattgggccaatcacgcggatctgtatcattcactcctaaatgaataaccactacatcaccagcaaaagccaatgcatccttaaactctttctgttgcataaaaggccggtgtcccttgttcagcaacgtagctcccggctttccaaaacgctccaccgtatacccttcacccagcatttgctgtaaccgggcaggataggactccttatcaggatcggatacacctatgccataggtaatgctattacctacacaagcaaccttcacccgcttccgtgcaaatgaaacggtacaaagaaacaaacataaaatcagtattaatgtcttcttcatttttggtcaacataaggttttacaatatcacgccacagcaagtatccctttcctaataaatgtaatccgtcattagtatatactggattcatcttgcctgtctctttctccacaaaatgactatacaaatcaatataggcagctccttcctttaccgccaatggttccaacaaatcattaatttgttttaccatctgccagcgtgatgtatgcccgttaaacataccgtaacaatcattcaccggcaatacactttgcaaatataattttgtttttggagattcttgctttattttccgaacaatcatacttatttctgaaataattttatccgcagacgttccccgagaaacatcattgataccgatcaataaaaaaatctttgccggttttccctttacaatcggatccaaacggtcatatacccccatacagatatctccactgatacccctgttcttcacattcttattttggaacaactcagcccactcgcaaccgttggtaatactgttccctaaaaaaataatatcttttgaagtaaccggaagttcttcaaacaaagtcgctctctgctcataaaaagtagaatacttgcgttcctgagcaaactggggtaacgctaataataatcccaataacaataagacaatacgtttcattttatttttgtttatctggtgaataaatcaatccttctaccgccctttctccgtcaggagtcacaaagacagtggtaaacatccatttcacaagacgcgtctcagccatcttaaacttaccgataggtaactttaagaaaactttgttccaacctttatttaaatgcaccgccaatggagatcttcctacgcaattttcatttcccaaaggtacttcataacttttcaccttatgcgtagcagtccatacaggaggtaatatttcgcaaccattaatccagatgcggcttcccttataatcccatttgccaggcaatggcgccagatccatttccgaacgactgtaattctggaattccacccacagtcccacctcctgatccttgggcgaatacacccaagtatatgcataagccgtgtggttttccttaggatcagcataaaaagcaggaaccatatccccccagacatgacgcaaataaatacctgcccccattgcctgacgtacaccatacgtattcccgttataatgatagatatcctttaattcctgttcaggcgggaacaccttatccatatcgcccccattaggaaaagcatccgtaatattccattttacattagtctgttttacataggcgaaaggatatcctttaaacgtatgctccttatgccacaacatacgcttttcaaaatcagcgaattctttaaatgcttccgtgtcttcggggggaagtatcgtacccagtccgtcaaaatattccgtacctccccctctccaggcacgctcggcaatagcaagcacattggggtacaagccattttcaataaccagattccactcattgtcaatcaaacgatcgtgccacaaagccaatatagttcccgcaatgtcctcactgccttctgcctgatcataaatacggctgttatacaaagctacaatatcaccgaaaacatcaaaatgattcagataatgaaatttggaatcgatagcaggaatacccggttgcgcctttccacggtaactccacaaatgtgtcatgtctatttcccccggtttatagtgccagcccggattccaggatattacttttttcccttttgagcgtacatacgccaccatttcgggtacaaaatgcggattggtaaactccacctcatctgtacctatatgtaaataaggcacatcaaatgtctcacacacctcatccagtaacagtttcaatattttcatcccttccggactttgcatatcatggcggaaagcacgcacaaaggcagcactatgccctggcatatctatctcaggaatcaacaacacctgatgtttcttacaaaaatccaccaaatcgcgtgcctcttccagcgtataatatttacccggcatacggatagtattcacactatcattcagcataggaaaaattttactttccaatctccatgcctggttttccgtaagatgccaatgaaatacattaatcttaaaccgggataaaatctctatctctcttttcaattcttccattgaaatataactgcgtcccacatcctgcataaatccgcgtatcctgaatgccggccagtctacaatctcacatccggcaacagagcttcttttcccttttttctgctccaattgccgaagtgtctgcatagcccaatacacaccctgttctgttacagcctctatctttattcgcttgtttgaaacagaaagacgataggcttcatcccggtttaacctagcttcatcaatagacggaaccagttccacttcaatcaccgatgatgagtgttcaacaatctcaccacccgcattcatgataaaaacttcccactccggccttaataccggagtagaaagtttcacctttcccatagtaaagttcttccccgtatccttacacaactgaggtttaggaagtaatgagatactggtttgtgctatggttatagcacaaaccagtatcataccaataaaactagaaaaccagcgtttcattatttatttggtctttacaatatctttcaattttatcgcttggaaagtcatgtgggccacactgctttcatataaaatccctactgtttccttgtcaatcatagttaagcagctatatccccaaccccaaccggcatccaacaacaattgattctcgggcaaccaagtcaccccgccatccagacttgctttgatggtaatgctatgacggtttttggtatcattcggattagagaacaaaagaatgtctttacctaatacattctctttagctttaacactaatcaaactggccatacaaaccggttcctgtaaggctgtacgtgaagattcatgttctttccacgttttacctaaatctgtagttgtagaaacggcacgactgccgccacgattatcacgcatattcagcatcagcactcccggttccacttccactacctgagattcagtagtattagtgcgtgccaatgtgctgatattccatgtctttccatgatccttactgtatataacaccggcattaggaatacgatcactgccaatatactggctggcaaagaccaatgttccatcttccatagaaatacctctaccgggaccttgcagcaagaaataccatgacggatctttcacctgttctgttatattcataggctccgaccaggttttaccatcatcatcacttttcaccatcattaattgcgctgtatgattacggtccatacctgtttgtgaattccaccacgcacgaccattccccataccatgtgtccaggcagcgacaatccagatagttcctgtctttttatcaactaaaatggcaggatcacctactccattctgtgctttaggcaacccatcatattcaccaaatgccatcggaatgcgcattttctcccaagtctgccctccgtccgtacttctgctcagacctatttccacatactcctgtaaatccgcactattattatagcgtacatcatatacccccaacaaggttcctttatttgaagtgaccaacccgggaatacgataggcagcagccccgtcatcaccggcatggcgcacgcctacccccatataatgggtatccgccttacgaactatcttcaaaggagcaatctgtccgtcaatcttagcttccaccacttttgccgacactttagacaagatagaagcaataggcttcatttgcaggctaatccaaaaataattcactcccggaaacaatttttggtcagctttcaatataacctcgcgcttcggggcctttacttccgacttcaaaacggaataagaagtattggcagccaatgtttttcccggagtattattagatatataatctaccggagcaaaataagtctttcctctcctctccacgctttcagttccaccataataaagtttcacagattcaatttcatttaaattcacgtctttgccgaagtccaacttcacttcattcagcatctgactttgagcagcctctatacgtaaatgaaacaactcattatcctgcctttcaatcaacacaggaatccgggtttcgcggacagcaaccgtatctgccgccgcacttaacttgaagggtgctaatataaaaacaacaattagcagtaataagctagggtttctcataatatttataattttacgggtgtaaaaataaaagtttttattgaaattagaaaataaaaagacggtttctttattaatttcataaagaataccgtctttttatgcaattaaggatacttatcagacaaaaatttaataaccaaccgtctgtttcaacaatggattattagtaagagctccttggttgataggccaaagcagacgggcagactccgccggagtatagtcaagtacgtacgaatcgccaaaacgccgcaagtcataccatcgttttccttccagcataaattcaaacaaacgttcctgcagaacagcatccgccggatacttatcaatttcctgattggggaatcccactgttgaagcatcatacgcatcaccaaacgcacgctgacgcacccggtttatctctgtagccggatcctcacccaaaagcactttcgcctcagccagcatcaatagcaaatccgaatatctataaataggataatcatcacatctcacccgtgtacttccattcataactccccaatacttatgcggatacagccccaccaattccaactcgccattttccaccttattatatacatctttcaatgtaacgtcacgacgagtgtctcccggcagaaatttcttgaagttttccaatttcaccatcaggcgcatgataccgaaattattctcgacagacgtatttatcaaagtaccatccgcattatagaatttccctaaataatccgcctgcggaaacaaatcattatttccattccacaggttgtattcaaacaactcattatgaatggtaaagataatctctttattacctttattatcataagcaaacactccctggtaagtatccatcaagtccagattgctacgactgatattattctgtatgtcaaccaacgcattctttgctgtccgggcatctccttctcccccgtcacgatgggcactccacaaatatacatccgctttcagcatcaatgtggcagcctttgaccacagcgattttttttcctttatggtataatcaggcccaaaataacttaaagaagattctatatctttttttacctgctcaaagatttcggcagccggagtcgccgcttttgccaatttacccacttcaaaacccaagctgggctcttccgtaaacacggcatctccccatgaacggtataactgatacatatagtaggcacgcaatccatacacctgtcctaaataatagttcttagcactttcagtcagaacatccgcatggagggtcctgctgataaacaaattcatctgattgatattctgatacaaatcaccaaatccgctgattccgggattctccgcattcaatgtattataaggaaaacgttccatcccctgggtggcttctccaccaaaaggagttcccccaaagacatcacttcttgcctcacccaacaaaaacatattccacgaatggcttctgaagcgactatgcagtccaaaaacaaatgaatcaaactgttccggagttttccagtaattcaagtcagtgatatcgctcaccgggtccatatccaacgaagtacatccaccggccaacatagccgatgcggcaaaagccaatattaccttttttatgttcatactttctcttttttacatattaaaatgacaattgtaaaccaaacaaaacggttcttggtgtaggataacgtccattgtctataccaccacgaccatttgcctgaatatccataaccggttccggagaggttccgtcatatccggtaatatagaataaattctgtcccgtaacatacacggacgcatcggtcaagaacaccttatttataagattcttcgggaatttataactcaaggttacctcacgcagacacaaataatcccccttttcatagaaagtagagttattattgttcagattcgttgtaccattattggaacgggtaatgttctttttcgcattctggtcagcccaataaaatttaggaatactagtttccgtattgttttcagaccacgaatttctgacatccgtaatcaaattgaacgacccgttatactgccccaagattcttgctttcaaatcattgtaaatggtatgacctaccgcatagtcaaaacgaccatacaaagaccagtttttataattcagcgtggtagagaaaccacctgtccatttcggatagatattacccaccacctgacggtcgtatgagtttattatgttatcaccatttttgtcatcccacaatacatctccaggctcaataggcttccatcccggctttcctgcatattcggcagctttattcggcccatacaggttggcaacttcatccacaaaatcaccggcatggtttctcacatcatcccagtcacgcaagatacgcacttgtttataagcaatgatatcacccaagctttttccttcctgaataccgcctacccaaaccaatgagttggattttggatcccatatctgctcacccccctgacggttgttcgcattcccattaaaaggcagcttcttcaccatattcttcacaaacgaagtattagcggtgacatcccatgaccagtccttctttgtcagcagattcaccttggcttccaattcaaagccacggttactgatagtacccagattcgtcttgaacgaagggaatcccgtatattccggcaaattcacatcagtcagcaaatcggaagtcgtacggttataatagtccataatcatgtgaacccgattattgaaaaagcccagatcaagacccagttcaaacgtatgactcttttcccaacgcaatttactattaaccactccggtattcaaataacccagattaccattataagcacccaccgaaccgtatttaccatatacatcaaagttaccaataccatttacattcccgttcaacccatagctgatacgcggtttaatcaaggatactacttccgcaaactttgaatctttaaagaaagcttcctcatgcacattccaaccggcggatatacccggaaagaatccccaacgattgtcagatagtttagagataccgtcataacgggctaccaccgacaccatataacgataattataatcataattaacacgggcaaaaccggaaagaatacgataaccggtcttgatggaagtagtataagtacgattagtacccgcattcaaagtaggtatatcatctgtaggagcaccggagacacgcgcctccaagttctgatactgataatcaaaatactcgccacctagcatagcattgatattatgtccgctaaaaccttttttatattccaaagtcaatgcatgttgttgttgaaatacttttgtatttgtttgcgaagcattacgattggtgttaggagcctgacctatctgctgatacttcttttcgaacaattcaaactgataatcggtataatacatagagctgtttccgttcagaaacaattgctgcggaataatttctaaagcaaaaccaatattaaacgaagtcttacggttcgtcgtagaacgagtcagcttatctttccaataataaggattaccatcctgattactccatccggcagcaggacttccatcctcattccacgggttccaagtgggaaacatactcatagtacgatagaacaactcatactctcccgtttctccattccaagggcttttcagatcgtaagtccataaatcgggcatcttggaccatgaaaaactaccaccggcattcactgtcaaaataggtaacaatttatacgagccgttgatagttccgttcacacgctgataattggtggaaataatctgaccatcttctgaatagtatcccaaagatgaagaaaatgttcctttgtcattacctcccgacagattcaaataatgatcttgggtaaacgcggcattacggaaagtcaggtcatgcagttcaccggcatgatttctaaaaatcaaagttttatcaggatctgtagggtccgccataaattgccatccttcattcaataaatgcttgttggcctctgtcatgaaagccagatccactccggagttaactccaaaacctttctggttctccatacttgtaccgccattggtacgctgccatcccaaacgttgataatacaaatagtcaccggcatccagatatttatatccttcacgcgcaaagttcacaccgcctttgaacttgtaagtaatctgtgttctgccttccacccctttcttggttgtcaccagaatcacaccattattggcacgggcaccataaatagctgtggaagccgcatctttcaacacctgtatggattcaatatccgaaggattgatatcatccatggaacgcacaaggccatccaccacgaccaacggaccttccagattcttgtttatggaagcaccaccacgcaaaacgatattgggcgaactacccggtttacccgaagtatttgtcacacgcagcccactgacagtcccctgcaaggattgggccgcattactcatagccgcattctgcaacactttatcgtccaacttcgaaatagagttcgtcatcaacgaacgtttctgactcattccataaccggtcaccacgacctcatccagcatttcagcatcttcttttaaaacaaccttgtaggtgtttgacgcccccactacaatttgctgtgttttgtagcctatataacttacctccagtttcgcccccacaggcacttggatagtaaagttaccatcgacatcagttattgtaccatttgttgtccctatctccaggacactcgctccgataatgggttcaccggtggcatctaccaccacccccgttactgcttttgtttgcgccatcatgtttattgcaaaacagaggcatacgataaaaaagagagctttcttcatgaatctcagatttggttgataaattaatgtttaaataaaaaagtttaattaagcgttagttttaaaacacctcaaaaagaaaataattttaaaatcaacagcgaatatatgcacgcatatttagtatatacaaggaataaaaggaactatatcctttattagtgtttgttttttagaataaactaaatattaaggcatattttaaaaagttacataagggaataactcaaaaaagaaaaaaaagttcatacggagaagatataacaagaaaaacctccttgcaattctttgcaaagaggttactgaattgtacacccgatgagaatcgaactcatatcgtcggaaccggaatccggtattctatccattgaactacgggtgcgtctgaaacttggacgtgcaaaagtacaaaatatattgtctttctcctaataatttgagatatttatctatcaaaataatattttgcacattaatttaagaacaaaacaatcaatttgattatatttttacccaaatatataacaatatcacaaataatttctatatttgcaagcaattaaaacaattagatctattttacaatgagttacctaattaaaccagctaactataaagccttgcttgatttaaaacaaacagagttaggcattaagcaaataaaagagttctttcaacagaacttgtcgtcagaattacgtctgcgccgtgtcaccgccccgctatttgtattgaagggaatgggtatcaatgatgacttgagcggaaccgaacggccggtatctttccctattaaagacttgggagacgcacaggccgaagttgtccattcattggcaaaatggaaaaggctgactttggccgattacaatatagaaccgggttatggcatctataccgacatgaacgccatccgggctgatgaggaattaggtaatctccactcactatatgtagaccagtgggactgggagcgtgtaattaccaaagaacaacgcacagttgatttcctgaaacaaatagtaacccgtatttatgcagccatgcgccgcacagaatatatggtatgcgaaatgtatccgcagatcaaacccttcctgccacatgacattcatttcatccactcagaagagctttgccaaatgtatcccgacaaaactccgaaagaacgcgaacatgctattgcgcaaaaatatggtgctgtatttattataggtataggatgtaaactgagtgacggtaaagaacatgatctgcgtgcacctgactatgatgactacaccacaattaatccggaaaccggactccccggcctgaatggtgacttgttggtttgggataaaatattagaccgttctgttgagctttcctctatgggtatccgtgtagacaaagaagcgttactccgccaactgacactcagcggacaggaaaagcgtaaagaattgtacttccacaaacgcttgttggatgaaactctgcctttatgtatcggcggtggtataggacaatcacgactctgtatgctttatttacagaaagcccatataggtgaaatccaagccagtatatggcccgaagatatgagaaaagaatgcgctcaattgggtatgcaacttatttgattataatctatcagcaatcgaagaagagggtgatacaaaagtcatcctctttttatttgtcatttttacaaataacccctatctttaacgcacatttttaataaaaagaaagcctatgaacgtacaaatagaagaaagctggaaacaacatctggcacccgaatttgaaaaagattactttatcaaactcacagagtttgtaagaagcgaataccagactaccactatttacccaccgggtagatttatattcaacgccttcaatctgtgcccgtttgataaagtgaaagtcgtcattatcggccaagacccctaccatggtcccggccaggcgcacggactctgcttttccgttaatgacggagtaccttttcccccttccctacaaaatattttcaaagaaatacaaagcgatttgggtgctcccatccccacttcaggcaatctgacccgctgggcgaatcaaggagtattattactcaatgccacactgacagtccgtgcccatcaagcaggctctcatcaacgacggggctgggaggaatttacagatgccgccatccgtatactggcagaacaacgtgaaaatattgtattcatcttatggggatcttatgcacagaaaaaaggagccttcatagaccgcaacaaacacctggtactggcttccgcacatccgtcacccctgtcagcctataatggtttctttggcaacaagcacttcagccgcaccaacgaatacttgcaagcacacgggcaaacacccattgaatggtagacataaattaaagaccagaataaaaaaaatgagaaatggttgccgataacaacatgcaaccatttcttattttttattctcagtttctcctagtaccaattcactgcactacccgtattgcttcgctggtcccatttcaaagcatcggtcaacatactggagttagcacgaatactgaagttataggaagtaaagggaccaaataccaagccacaactcatattgaaacagtgcaggtcacggctgatattgaccgttgtcattgacatctctttcgtattaaagtcatatcctgaagaataattcacattccagcggctacccaatttcacattaccagaaacattcaatgaatgggttattgaataaggataacgcatcgtcttaatattaatctgcttacttctgtcctcacgaatactataactataactcaaactcaatgaccatggcatcttgaaagccatatagccatccggatctatagccgccttctctgtctttctcaagccggaattatcttcttcctccttgttttcattgtcatcatcactgtactcatccagattttcattcttcttgtctttatcccctttactgtccttttcatctttcgggccaaaccattttttccacgaatcattattcaatgtatacgaaaaagaaccgctatacccctgaaaacgaccgaaacgtccgtatgaccattctgtacgattaccttccactaccttaccatctttatcaaactcataagcataagtagcaaactgggcgttcatattaaaagtatagctcttggttagtttcaaacgcagattcatactcaagtttccccacggcttctctttagctgctgcattataagaaatgctggcccccaactggtcaatcaagctgattttcttcactccggtagtatccgcatcggatttcactttcatttccacattattgtctatagagaaagtaaaattctcggatttaccactgggtgagaaggagtaaggcaaaccttcatatggattataagtctgagtacgtacctctccatccgtatcagtataagtatacgttcccacatatccatacctagacgtactgaaatccggcgcataactcatgctaaccgaaggagtaaagacgtgacggatcatttcaatcttgtcaccaaacaatttcttccacggtttgtagaaaccatacatcttggtattcacctgcaaactcaaatcatagttatacacacggttgaaaccgttgattgtatctctccgcacattattaggtgccgacggatcataactctgctctaccttgcgcatataccaacgctcggtatagttaaaagaaggcacgatattgatatatttgaataaggtaaatgtagcactgataggaattttgtgctgcataccattggtccatttattcaatccttgcttcagaatcagattatccttggtattaatagagttcgtcacctgaccggtatactgaagtgagattttttcgtaccaacgttcatcacctaccgccttcttacgcttgaacggataaatacggttcaatgaaatattcaagtccggcaacgtcacgctgatagaagagttccgtgtattctgagaaatattgaatgtactggacaaattcaatcctatctcgggaaagttacgcgaataactcacactagacgtcttggtattatttgaatattgctgcggattatacaaactactcaggttacgctggtcataactactggttgcaaagttcacattagccgaaaaagaactgttgggactggccttggcatcctgtctgtggctccatgcaattctgaagtcttttgtaaccatatagtccggcatattcttctcacctgtcttcgttaccaaataactggcattgaaattaccactatatctgtaccttttattataattggactgcgtggaaagtccccatgagccctttgtaaaaatctcacccagcactttcaaatccatacgatcactgatagcaaaataatatccaccatcacgtaaatagaaaccacgattcatttcatcaccgtatgtaggcataatgaatcctgacgaataactgctattgaacgggaaaaaaccaaaaggaatagcaagaggcaacggcacatcctctaccaccaactgagcaggaccaaatactacattcttcttgggacgtactttcgccatagaaagcttcagataaaagtgaggatgttcgtgattatcacacgtagtgtatcgtccgtgacgcagataaagctcatcattggaacctttctttgattcttcactggttacatacccttcaccttgctgagttacaatattattgatgaaacctttcttcgacttgaagttataacgcatgatttttgactcgtacggagtctcgccatctttaaagataggagtacctttttccacgccaaccgaatcgggaacaccacgggcatacaccgtactgctatccatgttcattgtaatcacagcagaggtcaattcaattttctcatagttcaccttaccgtcaccatacagatgggcatatccgccctcagtgaatacgatagagtcatttgcttcataaataacaggcgcatccaacggctgcttctttttaggtgcaaccgtatcaatagacaacgtatctaccaaagtactatctactttcagggaatcattgccggatgcagaattccgctttctgcgttgagcacccgtacttaaagaaagcaacaggcatgcaaatagtagtaggaatgttataaatctatgtcgttttagtggcgtcattcacaaatcatttacgcttttgaggggcaaaattaagcattatccgccaataatgaactatttagcggatatttaatttatttttaaggcttacaagaaacattcgcaccaatggttaaaacggattatcccatcttccccataacgtgaaatactctttaacgccttctccacgcttttttccttgtccagatgtgtctttgaaaaaaacttgtcggcaaagcagataacctgttcctccagtgataccggaaccatatcccgatgaggaacgggcaattgctggtcaataatactttgcaaagatatacctgcccccgtatgtctctcacagaccaacgcatggcgcgggaatccttctttccgcatcagatcagcccccaaatatccatgacaaatataagaataagatccgaaacaacaaataccatcagcatctgtcataaaaataccgatatcgtgcagcattgccgcttcttccaaaaattgcttgtccagattcaattccggatgcttgccggcaatccataacgctttatcggccaccgaacggctatgcgtcagcaggatatgtttcagttcattatcttcaggataatatttattaatgatagcaagtgcgtccattctcaattaaattcttatttttgtgcaatattacaaaataatcaccacatatcatgaaaacaaaatacattttcctatgctgcctcttgtttactttcaacgccgtgaccgcgcaaaaagttattaccggagccgaacagatggaccacctcttacctatattaaaagggaagcgtgtagcattggttgtaaaccaaacctccagggtaggagaaactcatctgttggacaccctgctggcagcgcatatacaaataaaaaaggtattcgctcccgaacacggcttccggggtgacgccgatgccggagaaaccataaagaacggaaaagatatccgcacaggagtacccatcctgtccctttacggtaaaaataaaaagccggctgcggcacagctacaggatatagacctgattgtgtttgacattcaggatgtaggcgcccgtttctatacctatatcagcaccatgcagtatataatggaagcttgtgccgagaaccggaaacaactggtcatcacagaccgtcccaatccttgcgattatgtggacggtcctgtgcgacagaaaaatcagaaaagtttcgtgggcatgcatcccatacctattttacacggttgcactgtaggcgagttggctcaaatgatcaatggtgaaggctggttatccaatggcaaaaaatgcgcgttgaccgttatccccgtagaaggttggaaacacggacaaccctattcgcttccggtaaagccctctcccaacctgcccaacgaccaagcaattgccttatatccttcactctgcccgtttgaaggtacagccatcagtgtgggcagaggtactctttatccttttcaagtaatcggttcaccggatatccgcatctcctccttttctttcagaccggaagccttggaaggctttgataagaatccgatgtataaaaaccaatactgctatggcaataatctccgccatatcaccgccccgaaaggattctctttaaaatacatcatcacctattatcaagcttatcaagaccttggaaaagcggacaagttctttacccgcccacaatggttcgacctgttgatagggaaccgtaccgtaagggaacaaatcacgaaaggagccagtgaagaagaaatccgtgcaggatggcagaatgaactggaagcctacaaaaagatgagagagaaatacctgctttatgaataatatttccttccaagctgacggctttcgtcaaaaaaggagccaacaacccaatctattcaggacacgcaacaccattcctctgcatccaccaagtcccaaccacaaacggctttccaaccgccaacaggcggaatctgtttcaatcttctttccggaaggtctgcatacccttctcaccaccccgatgatatccgtgtcctcacattcctcataaaaacgacaaacgccatctccctgcatcaaataacgactgcctcttttttgaataatccgatgcaatacataccggtctgtctgccggaacagaatgacatcaaaaagtttcaactcctccttatcatacggccccaccaccacttcatccttcccatttctcagtaaaggcatcatggaattgcctttcacccggaacttcacactcctgccacttttgatttccgactccacccacgcaaagaaacattcattcgctatccgcttcatacccatctccatataaagtacgacatactaatttcaccgcctccgcatcgggcaaacactccagatgataaacaggaatggatgaaaccatcttttccaacagactacaaaccccactgtataattcctcctcgtatgcaaatgcaggaggagcagacggatgcaaagctgcataagcctgcaaagtgttcaatctccgtatcttattatacggtgcttgtgacaaacgtacacatccggccaacggataacattccgccttataacaaggagtcttcccactccacgggctgccatatacccacacgcccccctcttcataacgcacaatgggactgtcatcattcagcaacttacttcctgctatattttccctccacaaacgagtatgggtacttttgccggttccgctttcacctaaaaaaagaaccgctttccccttataaacaatacaactgccatgcaaggcaaccgtatctttccgtaccgtcatcaggccataccccatccataaggcaaatcttaaaagacggggagaataatgaccatataaacagatacctttcccagtttcacccatcgtccggagataaagcgacggttctccctgcggagccagttccaacaaaaaactatccccactcacaccgaaagtaccggttacatcttcatatccgaacccataggactttctctgaaaagccggaaaatcccaaccgtttccctcccaaacagtaaaatccggcaaccaagcaccctcgtatacatcttttaccaaaaccagatccggttgccaaataaaaggcttgaaaccgctgataccatccaccacctccatcaacctttcgtccggcaatgcgaagcagtggccacctattttataaatttgatccattgtcttttccatttaatctgattacacgatgacaatatgccaatgagctttcccgatgggctatcgtaagaatagtcagcccactacactccttcatcagactgagaagcatttcattgacagcccgttcagtctcattatccaatgcagaagtagcctcatccagtagaagcacctccgctttcttatacaaagcacgggcgatgcctacccgttgtttctgacctcccgaaagccttcctcccccttcacccaaaggagtatccattccttgcggcaattcatccacccaagcatccaatctcacctgcctcactatctccgctacccgttccttatctataacccggcatcccaaagcaatattttccgccaaggtcccatccagcacaaacacttcctgttgcacatatcccaccttgcgatgccattcctgcctcggcacatcggcaagcggcctgccatctatccgaatagtgcctttatccggagtgataaatcccaaaagcagattaaacaaggtagacttacctacgccactctcaccacagatacctacatattcccctttacgaatagtacaacaaaaatcctttagaacctctttactttcaggataagcataggtgaggtgttctacccgtatctctttttgaaaagaaaacgcttcctgcccccatgatggagaaactgcttctatccccttatcccccaacccttcctctataatccgcagagaatagaccgcattctgtacttgtgtccaaccacctaagatgccgcgcaaagcgggtaacagccggaaagccgccacagcaaagacacctaccaacgctttgatatcccctgttccgaaaacggtgagcaaggtcagccccgatatgaccgccatttcggaaaggcaaagaggaaggtgctgtatcatttccagtttcaaacggctctcactgattttccttatcctctcggcgaatgcctgctgaaaaaaaggaaacgccgcattcagttccaattcggcataccctttcatcgtttccgtgaccagccgggactgctcacgacgagcctgctgctcctgctcaccataacggcgcatcggtttcctgatcccccatccgtaaatcaacataaaaggcagaaaggcaatatacagcatcagtaccgtcaacggagcgtaaaccaacaaagctgccgtcacccataaaataagcagcagttctcctgtcatgcgaagcaagggggaaagaagatttaaagaaaaagtataacaaatatagtttacctcatagcccagcctgatactccccctgctgcgtataaacaataatccccgttgatagtaagaagtaaagagagaaaagctgagccgacggtaaagagacatcagaaaatggttttgaaaacgtgaaagccccgctaccaaagcgtttttcaccaaaataaagactattgccaccagacaaaataacagggcggcatccttatccctcccgtcatccaacagaaaaaacaagacaggcaacagggcagcgagcccggcaaagtcaagtaatgcgcaaagaaatacggcacaaaccacccttatccccattttcctttcatcaggcaacaacaaacggcagattcttttcaacataaaccgcttattttcgttccgtctggaagatggtatggggagagcgcagatgcaacagaatagaatttccaacccatttgcacagtgaaatgcgcaacacgctgttgcacgcacgatgagtatgcagcatacgtttggttttataaaccagaatgccccatttattcttcgccggaactgacatcgtatagggtggccggatgatttcccgcaagatttcctccgccaatccttctcctccatatacaggaacggaagttcctaaataatcattacagaggcgggtcattgccaatatcatatttctaaaacgaatatccgtcacttcctcaggaatatgcaggccgtatctattcagcaggcaagcccagtcgcaaagatgatgaagtgccaggccgcgtgcataatgctgggcggcatgaaaagcgagaaatacggtattaaaggtggaagatgggattaaaatggagcattttccgtccaattccgccgatacgggttgtagcagtttttgaaggagcttatccatcttcactgctatacggtatgtttccgaattaatgaaggttttatgattctctatcggaatacctttatagtaaaacacactatgcttttcggagtgttcaaagtctacctctattcctttttcttccattaaccggtctgccagccggttggcctcggcatcacttttccgggaatggtctgccgaataagtgaagatgtctatatctcccccttccctgtgcgaaggaataggataataggtggagagacccactcctttcaactggaccgtggtaatgccatgcgttttataaaaagctgaaagttcggctatggtatggcagtaccgcaggtagcgtttttcatagttctctaccgccatcgcccagtttaacttcaaagccttcggaggttgcaaacaggccggcagggtttgtattccgtcccatgccaaagccatcactccctgagtgcaagctagtttgtaacacgcctgccaaagggcaggagatatatcggtaaaaaggatttcactaaccggctttgtgctgttcaacgcggatcggagcaaggcaaatagcatttgctccggtttatcgagtattatatccattgttatatcaatcaagtaaggctgaacatttttttagtgcatctgcccaaatcaccacatctctttcggcctgctcttgagaaatatgataagattccaccaacaccaaggctgcctcttgtaaagtgaaatcctttcccgaaagtcgtttccaaagtaagcaagcggaaaaattaaaggaaataatacgggtcaaatcagtatcgggaacaccttggttcacaattattgtttctccggctatggagcggagtttgaaatggggattaagtttcataatcttctaatcttaaaaaaagaaagccgcccgacctttcgagacaggacgaccttcttttattacaaatcactttctgccatgactaataacatgatagcaaataattctcttattttttataactatcccaaccggttcctttaaaagaaggagtaccagtcacgttaatgatagaggaagcatttgttatcgatgaatcaacaaccaaattgccgttaaaagtaccaccctcaatattcaattccataggttcggtgtttccggtactttttgataattccacgttaccattaataatactagtacctttaacagttactttaactccgtcagtgtaggttgaatagccgcaaacatcaaatgcatatgcaccagttccggcattaatcgtagtattgctaatcaaaatattaccacaattgttactcaatacatataaggcatttagccccttcactgtcatagcatccaacgtcaaattacagtagttctgaatcataattttatcattatcacttgccagtgttccgtttttcatagtaacggtagaacctttcaacaattgacaactgttcgtttctgtgccagccgagccaacggtcggtttagcaagtgtaagcacatggttgttcaagtccaattctacagattgtccactttgcgttttaaagccattacaagtagcgtctccattcaaacgtatcttcacgttagcattaccgcttaagtataaaagtgcggacggatcggaaaaagtaccaccggtaacagccagcgatgcacctgcaccaaccacatagatcttgccattcagtgtaccaccactgatagtcatctgtcccaagtcattggctgcaccattatgaccttcattatccaccacatactgagcggaaccagtagtattgaatgtacctcctttgatttcagccacatgatgattctgtacggttgcctgagacatattggtgaacgtaccgtcgttgatgacaagctgggctccatcatcatttttaatggtattaagacctccggcaaatgtaccaccgtttatgataagtgaaggattctgatgattggtaccacttacatatccatttcgcggattcgtattggtataatcataatacccattggctatcatcgaagaataatgcccgttttgcgatatctccacatttggattaatcgtcatctcgccatgattcagaatattataatagctgttaccacctgaactttctgaattctgaccgttttccttacttctaatataggttccgtcattaagaattactgtaccgttattatagatacaagctttcccgtgacttacattatccactgtaccatttccgttgattgtcagtttactatccttgtttacggtaaatgtatcaccagatttgttggtaattttatgaccgttcaaattgatgataacttcctttgttgcggaaatagtaaaatctcccgtcaagtctgtggcaagagtataagttccaccattttttgcgacattttgcaagtcggctacggcagcatcaactacttcaaatgcgtcattaccggacagattgggtaattcagccccctcttctttataaataatgacagttgaagtgttaccgctttcacgactgatggctgttactttggcaccactcttcactcttacattaccggcttttaccttcaatgtattaaccgtaatccctttatcaagaaccaatgtatttgcagcagtagttgccgttacttcatcataagtagctgtttcgccattggcagccaaagttacggtagaagaaggcagctctatctcaaatttaggcgcagtatctaattgcggtacagataccaacacgttttcaggtgctgaattaccactagcgccagtgctcgcttcttttatagcaacagtagcagtagtagaaatattttcaaaggatatgctgacattttctgccggtgtattttttttcggtattgaaactgtaggactggcttcagttggagccacatcagtcacagaaaccgaattagttgttgctaaagcattgactaccgctgatacacttccaactgttgtcggtacacttccggatacttcgtccaacgttatagttgtggtataacgttcgttacgtttagcatctaaagcttttgtctttaaaacctggcttgtagcgccattaccaatggaaagttccaaggcaggatactcggctacaggcaacgggaaatagaatgttttactagtcacgtcattgccagcagtaaagtttatagttatggatgaggaatttaatgttcctgtggttgtcaatgtagggataccttcggcgaatgctatttgtgcatttcctgcaatggctggagcagtagtttttccttgagcggtcatagaagtcaatttcgcccaaatatagtccttcgggatattattgacagttacgctcatcaaagcacctgcatttttaaatgccaagacatcctgtgcgctctcatttatttggcaagccataagagcactgctgttttctccttccttataattataggtatccttcaacgttaatgatattttacttccatcataagaagcattgctgccataaggataaaaagcagctttctttacaggattatcaccttccagtactcctgagaactctgcattcttggtcccggctccactggataatgaatagttagtgttagtataagtagaagaacttccattcgttacaaaaatgccaatctcgtcacctgtgctccaaacgacagaattgccattcatagcagtacgcgattcagcatctcccatagtggcacatacttcatcaacgccacttttcgccacgcccaaatcttcattggaacaaccggttattcctaatccaagaacagccaaagatgtgaacaatatctttttcatacgtgtatgtttttaaattatttatttcaattaccaaggatgttggtcatagtcttctgttccaccacttactgcaaatcctttttccacttctacttcgataacctccactttaggagcctcatacatttccatattgtttgtttccataatttccgtacaataaatttagattataatttttcaatgattctgttcagacattatacgccccaattatataccatagaatatttttatagaaagatgctataattgccgtctgtgggcagaagattcctggcggtccggtgacatacactttgtctccgcaacctcgacttgacagataacgggaaataaggatacgcattcccgcttgcagtgttgttttcatacgtctgtaaatgttagatcagtctatcttgtcaaaagactttgcctaactccccctcctctgttcggcggttaataaaaaaaagcgtgagggctgtatcttgtttatcttatcatcgggccttcgcattgccttggtctagataaacaacagccacccacgccattaggtatatagatgccacagtaatggcaggtatataacacagacgtgagcgttgttgttatcatcttcagacctttatcaaagttgcgaagtttgacgatagaagataatttcaataacgcttcttaaaatatgtaacgttctactacgccatagtagaatagtcggtacaaatataataatttcttaaataggaaaaacgtttcttagcgattatttttaataattgctacaacaagcattaaaaacacttctgtatttcacaataaatcgactcaacataacaccaatattaatagaaagttataagcaaatataccctcatgctctcactaagaagttaacatattgataatgaaatactgaatgaatgatgatagcatatttcaaaaagtatctttgccctcatgccctcattctacagaacaaacaaaaagagtatatctatctgatatccaacaacatgaacacatacaaagtcttaattcaaaagtttgtcaaccatcgcattttgagctttttcatcacagtatactctattttacaaacatccgattacattttcatgctgacaagttctactcatcgtactttgctatttgttctttctattattcgcaattgcttactcactagtgtgactaactctaatcacaaatgtgactaaagttaatcacaagtgtgattaagtctaatcacaaacgtgattaagcaatttcccatagtaaagaactgcaatatgaatgcccgattatcatataatgatctctatataaactatcaagaactccctaaaatgtagtagttaccgttgtttctcctagcaaaatatgataagattcgtgtatataaaagggatcttgtaggcattatgccatttttcttcacctaaaacggcaaaatagactcttttctcatctgagtgattttgaaatgaattcagctatatcacattgaatataaacatattaaataataatcagtataattaaacagtgagagcatgagggcaaattgtttcttctaaaatatgctaccatcattcattcaacactcattatcaattgattatatacataatgagagcatgagggcatatttgcttataactttctattgttttctcctttctttattccttgatattacggatatgtctgacaggaacaccgcccacaaccgtatttgccggaacctctcttgtcacgatcaaacctgctgcaatgacagcattgtttccgatggttatttatcggataaatgaagaataagtgctttgtttcttattctatttatcaaatgtaacttgtaccattagaatgaagaaggctgattagtatgaatgtgaatatgctgcatataaattttcaaccaaaacaattatggattgccgatgaaaaacttaaatgtctaatacatggtttagagttaaggagaggattttttctctccttttttccttccgatacgccccattatgagaacgtgccgtttgaggtgccggaatcatgggtgtggacaacgattgaagaaatatgctcaaagataggttctggtagcacaccaaggggaagtaactattctgcgaacgggattccatttttccgctcgcaaaatgtatataatgacagacttgtttatgatgacatcaagtatatttccgaagaagttcatcagaagatgaaaggcacggaagtgcttgctaacgacttgttgctgaatattactggtggttcattgggaagatgcgccgtagttcctgctgattttaattgtggtaatgtcagtcaacacgtttgtattatgcgttctgttttagttgagcctgaatattttcatgtgttagttttatcttcatacttcgctaaatctatgaaaattacgggtagtggtcgtgaaggtttgccaaaatacaatttagaacagatggggtttcctttgccacctttaacagagcaacaacgcatagttgccgagattgaacattggtttgctttaattgaccaaatagaacaaggcaaagccgacttacagaccatcatcaaacaaactaaaagcaaaattcttgatcttgctattcatggcaagttggtaccacaagatccgaatgacgaacctgccatagaactcttaaagcgcataaatcccgactttacaccttgtgataacgggcattatacgtttgatgttccaaatggatggaattggtgtaagttgaatgatttgtgttcgtttttgtctagaggaaaatctcccaaatattcggaagacgataagacatatcctgtattcgctcaaaaatgtaatttgaaagaaggaggtatttcattagaacaagcaaggtttttagacccttctacaataaataaatgggactcaaaatataaattacaaacaggtgatgtacttgttaattcaacaggaactggaacagttggaagaaccagactttttgatgaaagttatttgggcaaatatcctttcgtggttccagattctcatgtatcagttgtaagaacatatgaagaaatcaattccgaatatgtatttgcttatatgtcttctcaacttattcaacaatacatagaagataatttggcaggaagtacaaatcaaaaagaattatatattggtgtattggagaatttatattttccatttcctcctatcaatgagcaacaacgaatcgttcaaaaaatagaagaattgttttctgttcttgataacattcaaaatgccttagaagtgtaatcaaatacacttctaaggactgatgtaactttaccagttcacgactttatcaacaattttctgttgttcgctggcagttctgcgcagataaatacgagtggtttcaatgctctcatgccccataaggtcagcaagtagagctaggtcgttaaaacgatccagaaagtttttggcgaaacgatgacggaatgaatgaggataaacaacctccttgttcattccgtatttctcggcaaaatgtttgagttgagaagctattccacgagtggtaatgcgctgtccaaaccgattcagaaagatgtagccagaagtaagtcctatttctttgagccatttcgcagcctccgtgcgcaagtttttcgggatatacaaacggcgtatctttcctcccttgctatataggtcaagatgcccgatttgtacatgttctgctttgatatggagtagttcgctgacacgtgcccctgtagcagccataaaccacacgatgaaataccactcatcgtaaccatcagctttaagttgggttttaaggaatttgtaatcggcattgctaattacattttccaaaaagttcttttgctgcacttttacgaacttcactttcagtttctcctgtttcgtaaattcaagatacttgttgataccttgcagccgaaggttcaccgtctgtggcttgaagttctcaaccaaataccccttatatgccaaaaggttctttttgtttacttccccataatgattgaggaaatactgcaccgtccacacatacgaggtgacggtgttcttggcaagattagtctttgccaaatgatttttgaattttgttaccatactacattgatttagaatgaatatggtaataatataatggaacgtatcgggcattatacgcagttacctgatggatggtgttatgcaacgataaaagaggtgttcattatcaaccctaaaaataaggctgatgatgatgttgaagtggggtttgttccgatggcaaatattactgatggttacaataacacttttaaatacgagacgaaacaatggggtaaaattaaaactggttttactcatttcgcaaatggagacattgcagttgcgaaaatatctccttgtttggagaataggaaatcggtagttctaaaaggattaccaaacggtattggcgtaggaacaacagagcttcatgtgtttagacctctatttcttgatgtccaatatgggctttacttcttcaaatcagattatttcataagccaatgtgtaggctcttttaatggagttgttgggcaacaaagagtaagtaaaaatatcatcgaaaatatgattattgccattcctccaataaatgagcaaaaacggattgcttgtgccgttcataaaatatttgctaaattggatatgataatggagagtttataaactccccattatcatatctaaagaggtgaaaattgtttctattctgtcaattattcgcttttgttctgaaagtggaggtaagtgtataggcattgataaaaatttatcaagaatcagattgcgcaaccccgtagtttgagtttgcatcaatctcatatctcctttctgatattttgccagaatataatagtataggaatttacttaatactatgtcgttattccttgttcttaatgccattgtaaaattactgaatgaaaaaacaccacttttgccctcatagagaattgttcttccaacaggattattatcactaccacctgatttttctacaatcaaatcgccattttccaaatgacgtttagcaaaggttcgttgttcaacatcaatgtactctatatttgaataatctaacttaaagtccttagtgaaatttgcattgcgtataacccccacattaacaaatggttctttcttccctttccacaatccattgatgttttcgcataaatctttgagtgtaacaacgcaccatccatcaggtaactgcgtataatgcccgttatcacaaggtgtaaagtcgggatttatgcgctttaagagttctatgg

SEQ ID NO: 14506 - DNA, 47427 bp, Unknown
  gut microbiota DNA sequence
gcacaagtttgccatgtatcgcaaggtcaagaattttgctcttggcttgttttattacagtcagcaaatcacctttaccattcttgactatgtcaattaacgaaatccacttatccatctctgctacaattcttccttgttcctttaatggaggaataggtatcattaattgcgacagtttttgggcattgatgttagactgattaacagcatctgttttcacatcataacaccaatcacgataatagccgctattcattacagtgttaaggtagtcaggagaaatcaataaaggtttaatacgaataagatagcctgcatatatggctggttgttcttccttgtagattgccgtttttccaacccattcactactatttgtgcgattaaacagtaaatcgtttttttcaagagagtattgttcaatatcttcatcattcgaagaatacactaaattcgaataatctattgtaccaacattagtaatattccccattcgtaaaacagctattttacccacacttgatgatttctcagaagttccatattttaattcgcatacaatatcatctagcctgcaccacacccatgattccggcacctcaaacggcacgttctcataatggggcgtatcggaagtctttgcagacttcttgctccgcttgattttgccttcttttatcagtcgttctttttcagccttgattcgttcgagcagaactgatgctggttcatcgttgggatcttggggtacaagttttccatgtatcgcaaggtcgagtatcttttgacgtaacgcttttgtatccatcgttatatttctgtttgtaattgtgcagccaaaactgcacaattactattcatgttcttccagtttctttaatacctcattttcttcaaactcttcaatccattccttcaccttggcttgcaataaagccttattggggagatagagttgataagcagaagcatagatgttagcatccttaggcaaggtaagttccactagtgcatcgttcttctccttacacagtagaataccaattgtcggcttttcaaagtcttgtttgacatagcggtcgtaatagttgacatacatctgcatctgcctaaggtcttggtgagttagtttgtctatcttcaaatctataagcacatagcattgtagcaaacgattgtaaaacaccaagtcaacaaagaaatgctgctcatcaaatgtgaaccttttctgccttgcttcaaatagaaatcctttgcaagttctaataggaattgctgcatcttgttgataatggcattctctaatttagactctgaataaactgcatcgggttttagaccaagaaactctaatgtgatgggattcttgataatgtctgatggtttctcaatagattgtccttccttagccaaccgcattacttcatctttgttacggctcaaagccaatctctcataaagacagcttcctacttgacggctgagttgtcttttagaccattgttgttgagtacattctatttcatagaaactgcgggcatccggattttccaccctcatcagtataagataatgagaccatgagagagcgaatgtcggctcagagatacattcctctgacttcggataatcggctaaccactggttagccttttgactcggctttggacaaccactggttagccctttagaaaaaacaatataaaactgccgtatattcttaagcgttgaatatgaccatccatctcccaacctatcagtcagacgtttggagagttctttcagcaccgcctttccatattcggctcttgtttcccccttttgctcatattctactatatattgtccgatatggaacttagtataaacctcagctatattgacggctgttgccacacgttcccttgcctgcgtgacaaggttaacaaccttcaagaacaggtcgtttatatatttatcatttgtgaaaatctcttttcccataactcaattttcttcaatattcgcaagtagcttttcaagttcaaccacagcagcacttatcgtttggcttttatcctttatatcagccatcagctctgccaatgaacggttgtccacctcaccaccttgctttatccaagtaatgtcaagacttgttttgtctctggcaagaatttcatctacagggtatttacgccaacgaccttgcggattattttctgcatcgtatgtctctactcgattattatagcaagaaacaaaatcatccaaatgatgccgttccagtttattggtggcaagcgtatgctttatatctgtacggtagtcgtaaaaccatatttccttggtcggttgtcctttgctgaaaaacaacacgttggcttttacgccttgggcatagaaaatacctgtaggtaaacgcaagatagtatgcaaattaaaatcctgcaataagcgtttacgaatagtctcacctgctccagcctcaaagagaacattatcaggaagtacaactgctgcacgtcctcccgttttgagcataagcatcatgtgctggaggaaatttaactggttattcttggtctctacataaaaatccgggcggttaatatccaccgatccagccggacgagttccaaaaggaggattggcaagaatcacatctacaagagttgacggttctttttccaaagaatcctcacaaacaatcggactacggtctgtaccaataccatgcaaataaagattcatggaagcaagcgtcaccactaaaggcgtattatccacaccatgcaaagctttgtcacgcaagaaatcacgtttttctttacttgctgactgacctttcatataatcgtaagctgtaagcaagaatccacccgttccacaagccgggtcacaaaccgtttcccccatttgcggattgatacaatctaccattgcctgaataagtggacgaggagtaaaatactgtcctgccccgcttttcttgtcttgtccgttcttttcaagaatgctttcgtagatagctcctttcacatcaccgtccataatgagccattgctcctcatcaatcatggtgatgacctttttcagataaacaggcttgtctatcttgttttgcgccttcgtataaatcgtacctatcagattatcctgctcactaagcaatttaagggtctcttcatattgttttaccaaatccaagccatcaagtactatcaaatctgcccactgataaccagttggaatagccgactcttctccaaacatttctacattttcggcatccatcttcaagaataaaagataggtcagttgggtaatataatcagtaaatccaattccttgtccggcaagagtggttgccagattccatacttttttggtgagcgattgctctgttgtattatttgttaccatttctttatgctgcttttcttaaaactacaaatgtgtaaagtgaatgaagtgcctcgtccgccttctgcatattgccaaacgctctaatcatttgggctgcatgggtagcatcatcttcacgaatatctctgatagtacaagctccgttagaagcgatgtaatccacaatacgactgataacctctcgctgtttgtcagttatttcacgctggttttgccctaaccaaagattgaaaaactgtttagaggtagtaactacgctatccaatcgttcgatttggtggaaagcaaagcgcacaagttgtatgatattggtcaatgcatcgctttcttctttggtaatggaacgccttaccactttagggttaactatggcataagagttccagagttgtttggatgtaaaatgattgtttgccattttaagtctgttctccaaatcctttagcatcgaataggttataggctctccctcattgttgtaaatgatgcgcagtgcctctatttcgtcatagtactttttacaaaaatcttcaaaagcctctgtcgtattttttgcttcctcaatggagaaccctttggagataagcgtatcttcacccggcatcaatgtattgacgaatccggctgcaagtataagaaggtatttccgagcatctgcatgattggcaagcggagcgactagccccttacgttcattgttaggctcatcagtgattacaaacggtggaagaatgcctttctccagtgcatcgtatattctggcagaaagttccttcatgtcatcatgagacaaacggacaaactctttccgttgcggatcatccgccttgttgtatattcgggcaagcgttgcagcaagccgtttgagatactcgtcaggaatatagccatgactaatacattctaatagctcctttagagtaatcgtctttgttgtaggagcatcatctataggtgccactgtttgcgcatgttccgtcacgcctaccgcatcaaccaaataaaaacaatccttgctgaatgcgttcggggtaacattgcgaagttgctcatcaccaatagtacgtactccacgccctttcatctgaatatacaaaggcaatgactccacatcacgcatgaacatcaccacttccagcggctttacatctgttccggtggcaaccaacgtacaggtgacagcaatacggaaatccttgtcgttacggaattggcgtatcagttcgttactgtcgcctgccgaataggtaattttctgaacaaagcggtcatcagtccgtccaaacacctctttagctatttgtacgatatttgtagcatgagcttcattgagagcaaaaatcaatgttttgggcaaaaagtccatatttggttcacgttgcgggtcattaaacaattccgtataaaccacatcccgataggtcgaaaggactaactttatctgtgccggattgataatactccgattaagttctttatttgtatagattttggtttccttactacttacaatcttaacctcacctgtatatcttgtttcttctttaaatttctcaccctctaatatagccccacccgtttctgtgacttgcgtttttattctatatacccgacaatccacattcacgccatcaacaatactcttttccaatgtgtagttaacaatgcagttattattgaagaatgccattgtttcagggataggagttgcggtcagaccaaccaatcttgccgtatcgaaatactccagcaccttgcgccagttcccataaatggagcgatggcactcgtctatgataatcatatcaaagtagtcgtgcggtaagttgggattaggaggcaaggttacttcctctataggttcattctcgtcatcatcattatcctcaatagtttctcctttcaagaatgagaatagacgttgtattgtagaaataacgacattgctatcagaaggaatagaagacgagcgaaggcgattgaccgtaaagatagtattgaaagcctccccgttctctgtcagacggaaggtcccaaattctccttctgcttgttttccaagattatttcggtctacaagaaacaacactctacgcattggtgtataagaaagcatccggtaggcagcaagacaagcagtatatgttttacccacaccggtggcaagaaccatcaacgcccgattttgcccggcacggaaactcttttcaagttctgtcactgcctcatattggcaatcacgcagccctttctttttcaatgtagggagtccggcaaatgcatcttcaattcccagcctctttaccaattcatgtggtgtagggatattcatgacctgcctgaaacaagaatcttgttcacgaaaatcacagcaatatagttccttaccattcgaagtgaagataaaaggcaatggcttttgatatgcctgatagatattcggaacacttcttgcgtataaggctgcttgctcgcatactttggaggcaaaagcgtctgtttcttcacgcttagcttcaagtacccctactgcttttccattaatgaaaaggaaataatctgcctcaagatttcctttcaataaaccttctcttatggctacagccgtacaagtaggttcataatcctccctgttgactactttccaaccagcatcggcaaaccactggtctatctttattcttgctttttcttcaggagtcatattcttaataatatatattatcagaagttcataggcacatctgcaacaggttacaaaaggaaccagaacctcctaaccgtattaaataatttattgtaacctttcttttttatcggttatcaaatccttcaaatcaacttgtaatatctccgcaatccgttgcaaggtttccaaattaggctgaatccgattacaggcataggcattgaccatactgaaactcttatctagctgtttagctaaccacgtttgagaaatacctttttcggataaaacagtctttattctattcagtttcattacttgatatgattttattagacaaatatagggaattatattcgataatagtgtatatttgcattaagaaaagtcagttcttaaatgagttatacctcaaagtaattgaatttagacatatttatgggaaagacagtaacaacatatctcattgatggagacccaaaaggaactcaatacgcattcattagcaacaaaatttgccaaatgtttgtcgtaccacgttctaatctctcttatttgaatacacaagagaagttacaaaaacctgcattctatatattgctgggggaagatgaatcaaccaagccgcaggcgtatataggtgaaacggagaactttaaagaacgtgtaaaagaccacgatagcaaaaaatcgttttggcaaaaagcactcatatttgtatcgaaagacgccgatatgactaaagttgatgtgcaatacctagaacataaagctatagccgaagccaagaaagcaaacgcttttgttttaagcgataataaacaaattcctaaagcccctaacctaccggagcatcaacaggactcaatgaatgaatttttcgaagatgtgaagtttttggcatcatttatcggttgcaatatttttgaagtatcacaacccaaagaagaacatctattctacaccaaaggtagaggatgcaatgcaaaaggtttctacagttccgatggattcacagtcctaaaaggaagtactgttgccaaaacaatggttccgtctttcaactggaaagaaaaacgagaaaagatgcttcaagattacacttctactgagaacggaatattggtattgacatcagataaaactttttcaagtcccagtactgccgcagatttctgtattggtagcagcaacaacggctggttggtatggaaagataaagaaggaaatacattggactcagtttatagaaaacagttggattaataacatatcagttggaggcaaatatggaaattatcaatctactagacttcacagaccgcatcgagttgagagaatggctgaaggtcaaccataatcgggtgaaatcgtgttgggttgtaacttcacgctctaaacagcccacatacgaatgtattccatacattgaagttgttgaagaagcattgtgcttcaggtggattgattcaactctaaagaaattgccagacggatgccttgcacagcggctttcacctcatcgcaaaggaagtcattggactgagttaaacaaagaacgttgtatcaatcttgaagaccgaggacttatgacagatgccggacaccaagcctttgagaaagcctattcctacgaaatagttcccaaaggctctcttatggaagaaaaaccgcattccttgatttagccgagcttcgtaccgaacggaaaatcatttctacaatagaaagcccccattcgggaaaagccatcgatacctatcaaatagtcgaaaggaaacagtcttcgtaccggtcgcttctcctccatcgctacaatctgctcacgtcgcagcaacaacgttcgccccccaatgacccggcaaagcatccgagaaacatccaaatatatctttctccggttgcgtatattgctgtcccggataattattcagatcatcgctcagaaacaaatctccgtttttttttcaaaacatccatcattgagagtaaaacaatagcaatccgagctacgaagagattcatagcctaactcaccaacgagttctgtttcttcgatccaatcaaaatcggcatatacatatagcgtcttcatcgcttactctttcttcgaagcacgttcccttgtcttcaaactcaaattctgcaaagcttttcccaatttatcttctttgaccagccacagaatatcatcatcaagctgcagaacatacagcactcgcaagtatattccgattgctaccatcggtgcgcctttctctattcggaacacagtcaacggggaacaagtgcccgttccgccacctgagccacactcaaattcctccgctatcgagccagttttatctgctctcccacaaccgacatcttctgctccaattttcgagacaacttaatccccattgtattctttgtcataatcaacttatcatataatatgcaaaaatattactttttatctatttaatgatagattgcagacaaaatcgcaagactagaagacacagcagtataaaggctctacactttttcaaacgaatcatccccattacacgacatttttccaaacgaattaaatgtctattctacaaaaattaccttacaacatatattcaagattagtttactattcaaatgaaaaccaactttactttatccccgtattcctatatacgttcaataaagtaaagtcaaaataagggagaagagatggctgcactatgatgaaataacttcaatcatttttcttttggctgcaaaacgtagagtaaccgagtgtaaagatcgaacaaaatacaactccgaataggacacataacactcgcatgggaaccagaaaatacctgtgaatctatcctcgattttactacccttttgggcaaaacgaactccgacataccctatctttgtgaacaagatctatcgaagccctagaaggcagtttttaccctttctccctctgttcgaagagaaacgataaaaaacattaaaacatcggttcttagcgaaaaaacaagtaattttgtaaagtttccaccttttaaatacaaactatcgaaaatcagtcagcatacgatattacattgtataaaaaattatattaagatactacaatatgtcaaacattattcttgatacaaaaaatgtagggaagatcaagggccttttctacctccccgattatcaacggggttatagatggacctcggaggaaataaaactccttctcgatgacatttatgaaagtgcgggaaagccatattgcttacaaccaattgttgtaaagaaaagcaatgagaggttcgagctcattgacgggcagcaacgtcttacaaccatatacctcatctgcaagtatatggaagcaaaactgggagatctatatgaacctagctttaagttagagtatgaaactcgtaaagaatcagcaaactttcttggtaatattgatctttcgcttagagagctgaatatagattattattttatcgcatctgcatacgaatatatagagcaatattttacagaaaagacacagggtgagcgtcgagaaatggcagcttacctgaccaaactcaatgaatatttcatatcatcagtaaacgtcatttggtacgaagtggattctgctgagaatggtattgagctatttgagcgtctaaacattggaaaaattccactgacaagctcggaacttgtcaaagccttgtttcttaaagacagtgtgcgagacaagatgtcaggacgacaggaggaaatctcactccagtgggacatgattgagcaagaactacaaaatccatcattttggggctttttgtccaatattgatggagatcaaatgccaactcgtatagatcttatccttgatctgatggtagacaaatcagggaatgatcgtgaaaagtatcgtacattcttttactttgatcgacaaataaagtctctatcggaaaccaccacagaaaatccgcttcttgagatatggagtcgcatctatcatgtgtttcttacgctccgcgaatggtatacgaaccatgacttttaccataaaattggttatctgattactataggagttccactaaggaaaatttataccgtatggcaaaatgatggcaacactcctcttgctaaggatatatttcttagcgagctcgacaaaatgatttcagaatcaataagcattaaagataaagaagagttacttagcttatcatacgatacaaggaaagacaaactacaaaaggtattgactttgtttaatgtggaaacagaacgtctgatggacgatggtaaacgaaggttcccatttgacaaacataaagattctatatggagtttggagcatatccacgctcaaaatgccgaaagccttaaaaagaataaagatattcttacatggctagaaagtcatattgcacttttgaaatcttctgaaagttctatttttgaggtaaataatgaacttatagagaaaatggagatattgattgaacaacttcatagcgataaggatccagggaatgtgcgtgaacgctttaatgagattcagaaggaagtaattatcatattcacgtctaaggaagatgtcgttaaggagaatagctactcgcatggattagcaaatatggcactgctagatgtatctcaaaacgcggctcttagcaactccgtttttgatgttaaaagacaccgtgtcattaattatgataaagaaggaagatacattccaatttgtacaaaacacgtattcttcaagtactatactcaagagggtccatcgctttttttttggggagagacagaccgaagagattatgccgaggcccttaatgagaaaatttcaccttactataaacaggataataacgataccactatacccaacttgacaaatggaaactacgacactgaagaatctgatttctgaaaacaatccttacggaataagtggaatcactataccacggattcaacgtgcttatgcacaaggccgatctgatgcacatgcagtaaagactcgtgaacgttttctatcagcaatacatgctggattaataaacaatggtttaaccctcgatttcatttatggtaatattcagaatggtcagctgattcctcttgatggacagcaacgactaactactctttggctacttcattggtatgcagataaaaaagagggcatcaacgataagcgacttgcgaggttttcatacaacacacgttatagcgcgagagattttcttataaagctcgttaactacgaacctacatggaaaacacatcttagtgatgaaattaaaaatgagggatggtttccaatggaatggagcaacgatcctacggttagaggaatgctcacaatgcttgatgaaatccaaaagcgttttgccgatattaatgacttatggaacaaattggataaaattaatttctatttccgcgatattgaggagatgaagttaaccgatgacatttacatcaagatgaactcccgtggaaaaccactcactgactttgaacattttaaggcagaactcttaaaggttatgcgttctgaaaatgacgatgaagctactgctaaacgcattggccttaagatagaccgcgaatggaccgatttactttggatttatagggatgagtataatctcgtcgatagcggttttctaaactttttccatatgatttcccttattcttgtctataagtcagatcgctcttcatcagaatttgatttagaagatgatttcagtttactggaaaggctttataagaatcaaccaaaaaatgtagtgttttttgaacaagcctttgattgcatggtcaatattcaaaacaaagagcgacgttctaattcattaatacttaacccaattgatatttttttcaactcttacctgtcaaaagattatcatgaacacgaaaaagttgtcgtatctcaacaaattacagatctcaatattttcaaaggggtattgaccggagccgcgttgcgtaaaaatactacctattggttaataatgctctactcctttcttatctatttaatgaactatgataagataaaagaaatggatttccgtcgacgcttgcgtgtggtagtgaatctgctcaaaaattccagaaacgaagttgtcgatacccctaatggtgatgcaggaaaccgtatgcccgcaaatcttcgtcaggtagaaaatattattctttctggggaaattgcagatagtataatgattgataatgacgtgagactgaatttcaatgtaattcagatggaagaggagcgtcaaaagctccagtttaccaaagaacatcccgagcattctgctggtctttttcagttggaggatcactatctgcttcaaggtcgtacagatgttgttgggtatgagaatactcatctttatcagcgattcatccatgtctttgatagatgctctcgcgatattattgactgtgcaatgttagcaacgtatgattatagccaaaggataaataattggtgcattcaacttggttctgggaatcaggatgaaattggcaataaggcttggtatgcattatttcatccgacaggcaaaaatccagattttaataagacaaaaaaatcattacgttctctgcttgagattgatatagaaatagacgacatttacttacaagaaaaaattgatgcgtatctaacagaatgcaaaactaaaagtcaatacgattggcgatattattatatcgcgtatccatgcttccgccccgagcgttatggcaaatatactatgtatgatgaacaaccatacgctcttgtggcattgcactctgaaaagcgtgaatcatctaatgcctaccaatgtatgcttcaagcactcattgaaggacaagcagtagcaaattctgtagaacgatatgatatccgtgcgctctcttacagaaaagggctgttgagatgtgaaaacaatgcttttgtatcatactctttgaaggacaataaagagcgtgccagatttatcattccacaaaacaaagaaggcattgacatcgttgaccgtattcaatatttcaaagataatagaaaggataatgattactggatatatcaggaaggttagtattaaatcgtaagtaaagtcgctctcttcaattatagagcgactttacctaattctatagggaatgcttattttatacggcagagctatagaggaaacactaatcacatcaacggcatacaagagtatcgggttaaaaaaattcaagtataaaactctcttcataggggcgaccgcctagggtccttcaagagaatcaaatacgaggtgttggcactgcagagcggtgtttctatgcaataccgcagctttaagctctttaccgaaaagacagaccttcccgtaaccaagctctcgatgcgaatgcaaaagatactcaccgattggtttgcaaaaagttattagatcaaatccacaactgttagcttcatcgtagcctggaaacccaaggatgtcccgaaggagaaaccggaaacaactggctgactggccgacccttgtactcaccctctgatcgaagatccaacaaaaagtcgggagccgaaaagacggttttgccttttttctctctgtttggagaaagaggatgaaaaaaatcgttaaatcatcaatttgttgcgaaaaacaagtaaattttagaggcttctatcttttgatgtaaactaatgacaatcaattagcataatatgctgcatcggacaactctactcctataccttttctttcagagatgagaaagataaacgacctttactcatccaaggatacttgacaagataccatcagatcaaaagctcagaaggacggtatagggattacactttatcatcaatacaaacaaaatgtaacttcacagagttcaatgaaaagcagcccatgttacagaacattttccacatttctgctttactcctagcaacatcccattatgaaattccatgaaactttcattcaacctcctcacattcttctcactcgttccgcttcgcatcatcacttgcacccatactctcaagatactgcaattcccgttccgcaaactcacgattctcctcctctcccagcatttgatagagcagttccctagcttgcgaataatatttcaagtttactaatacttgtgctgccctgcgccgaagaaaatgataaagtggaaacaaggtattcttttcatcaccatacatctttatctgactgccaaccaaactcaccatagaataaatatactcaagagcccctgtatccttcatttcgacgagacagttggtaaaatcacgaatcgcatgaatggatgaatttcttttagcattagtcaaataataataagccttttcaaaatgccctaatgtgagataaacaaaaccgatatgataacaaatcacataatattcttccttgccacgctccggcaattccgtccagtggacttgataataccgaaaaatagaaagataacaccccaacgcctgaagataacattgctgcctgaaaaatttcttcccccaataaatagtagtctgcaaggtaggctcggtataagccagcaacgcctgttgttcctccgtcagttcgtcaaactgtttgttttccgctttttctttagcatcgtccaacatatatttcaactcccaataatcatcatgatccgttgtcaatctaacctcaatcatactactgaatactctgcctttttgggtttcatcgaaaaaagcatccactctgtccgtccgcatagccgacaacttataataaagagatcgttcattactgccttcagctttctccaacgcaatcaccaactgcccttcagcaagtgtgatacagatcagagcatcttttcccgcctgtcctttttcatccatcacagcatctttcaaccgaaaagaaagaatagacaataattcggtacgcctctctatccgcccattgcaaaccagtgtcattccctttatatcttcctgtttcactgtaccaaaaagagaaagaatatcctctatctgatccatatcttgccgggaaacatcgacaggttccaacagcttaccatgtccaatctccaattttcgtcttaacaaagccaaacgattttcgaattcttttttcaccaacacgtcttgtattgaagcagattgttctgccaactctttaaaactacgggctatcataaaagatgactcaagcaatacccgcaaatgttgttttaactgagtttcactgcccgacaagaacagacaggcagacagacaagccgtaaaaggtgtctcactttctccgtcctcatgacttttacgcaaatagcaagtccaagctgtgtatcggcagttaatgttgttaatgtcaaaaactatttttttagactgttcatagctacatgcatagaaatctttataatataactgaatattctgacctgttttttctcttaataaatgaaaataacctccttgaaaaccgatgataatggcatcagcatcaattctcttcactagttcacagtgcatggactgcacgaacctgataagctcatcggtggtcatcgccgaataaatcttttcttgctgctttttcggctttgtaacaaaatgataaactgttacgaaaaccaccatcatagatactaagacgacagaaataatcatatcttgttacagttaatctttgtatgtctgtaaaaatacaaaattaatcgggaaatgttagaagtgataggatattttaatgaattcccctaagaagttacttaaaaatccggttcaatcaattccttccgatgcatccggtgccacctccacaaaatcataaaacatagagggaatttccatcggagatattctgaaatacctaaaaatagggattgtccatttccacattttcatcgaactttgcaaccccaaaaaacgaataaatgaagaaactttatataatactgtttatacaaataggatggatattcccgctctccgcacaaaaacaagattccatttatatcggaacgcgtcatacattgttttctgaaatactgaatgaagaaagaaaatattggatttatatacctgagaccaaagcaggtgaaaaaggaaaggcttatccggttctttatctattggatggagattccttctttcattccgtggttggctttacgcgtttcttctcttcttctaaaacctcaaatttacctccttgcatcgttgttgctgtcttaaacacagaccggaccagagatttcactcctacctgctcagccgcccgccgggatggtactatttgtccctatgataagccggcaggtggtggagctgaacagttctatcgctttctgatagaggaactacgtctggaagtggaaaataaagttcctgccaacggtacaaactttcttgtcggacattcatacgcaggtttatttaccctacagacactgtcaaatcaccccgagtcttttgactcgtatatagcaatagatccaagcttatggtgggaccgaggagtttttctacaacaagctgcaaagaatgtttatcaaaaagacttctccggcaaacatttgtatgttgctttcgccacccgccaacgtcctgcaatcaaacttattcagttttcattggccgacagcttaaaaaataagatcatccctgaaatgaaaaacaagcatttgcatgtcatttataaaaaatttcccgacgaggtgcatggcactattgctcttcctgccattttcgatgggttaaaatctctatttcatagcactatttcaaccaaagaggcaacatgataatttcttgcagtattcagtttctcacctgttgcaaatacgctccggttactattggtaaaaataacataactgatgctgatagtgtagtcactcgctcgattccggggtattacgtagctgtaatccttgcctaatttcctgtttaacatcaatttaagatttcaaactctatacttatcattttctagaataacaggttgagacattgtatcaaccttggctacagatttatactattctttccggaaatcatgtcattagggttataacatctgtaatttatctacactgtattttcagtcatgtatttatctttgcatcaagattctgaaattcaaaacttaataaaatcaagtgataatgaaacgtatatcagtcatcatgattgcaagtttatttgttataggaacaactgccataacacaatccgatccggtttagagcatatcgtcatttgtggtacgcaaatcatgacaacagttatcgtgactccgttgggcgtcttcgccatcgcagccaattcatttgccattacagccgaaagcttctgcatatgcccagtacgggattgccgatgctgcacgacactggttgggcagagtatcggtgccgatcgccggaaactggtccgaagtttcgcccgcattaccatatttatatggtatgaccgttatggggttataggtgtactcatgtatctgttcgccccctaaattatcggttagatgcccccgtcggggagattcgggaattgggcataatggcactgcgcatcgaagcgttcgctgagccgatgtttgcagcctcgattatcacttacggtgtctttgtcggagcagcggatacgcttgtcccgtgcttgatgaatttcttcaatatccgggcggtgcgtctgtcattagccgccttgctcgccccgtcattaggtctgaaaagtgtatgggttgccatgtgcatcaagctgtgtttcagggggctgattttcctggtccgcttgaagcgagaacgttggatgagacacatgtaaaaaaatgtctgtaattgaggttatacaatcagtaatccatctaccggcttttcctgtaatccgctgtaattttgcactatgataaagaaaacaataaaaatttaaattacatcggttatgaaacgtacaactattttaatggctgctttcctctgcctcttcggcctgacggaaagcccggcacaaaacactcacaaaaatatggaacagttaaatctgacacaggaatgggacaagacgttcccgaagagcgacaaggtgaaccatagcaaagtgactttcataaatcgttacggcatcacgctcgccgccgacctgtatgcaccgaaaacgattttcggaggtaaactgccggccattgctgtcagcggtccgtttggagctgtaaaggaacagtcgtcgggactgtatgcccagacacttgccgaacgaggattcctgacggttgctttcgatccttcgtttactggtgaaagcggtggacagcctcgcagcgtggcttcaccggacatcaacaccgaagacttctcggcggcggtggattaccttgcgacacgtccggatgtggatgccgaacgaatcggcatcattggcatttgtggttggggtggttttgctatcaatgcggctgccaacgacacacgtatcaaggcaacggtagcttccactatgtacgacatcagtcgctgtacagcaaacggttatttcgatgccgcagacaatgcggatgcacgctacaaaatacgtcaggagtttaacacccagcgcacggaagactaccgtaccgacacttatccccgcaccgtgatgaacccggagcctaccggtgatgcgccacagttcataaaggattattacgattattacaagaccgaacgaggttattatccccgttccatcaactccggtttgggctggaacaaaacctccaatcttgcatttctcaacgcacctatccttgcgtatgccgatgaaatccgcagtgccgtgttgctcattcatggagaaaaagctcactcccgctattttagtgaggatactttcaagaagctgaaaggcgacaataaagaactgatgattattcccggtgccgtacatacggatttatatgaccggacagacattattccattcgataagctggaggaatttttcaaagaatacttaaaatagaagacttcaagaaaaagaatgggatagctcagaaagcgaaaatgtattgccgatgtgggtggctgacatggatttccgtacagcccccgctatcgtcaatgctttacgccgacgggtggaacacggtatcttcggttatacccgtgtgcccaacagttattacgaggctgttacagattggttcgcacgccgtcacagttggacgattgactgcacatggataatttacacatcaggcgtagtcccggccatctcggcagtcatcaaggctttgaccgttccgggagataaggtgttggtgcagactccggtttataattgtttcttttcttcaatctgtaacaatgggtgtgaaatggtatcatcaccgttgatctttgcaagtaatactttcaccatcgattatgaagatttagagtgtaagactgctgatccgaaagtgaaggtgatgctgctgtgcaatcctcacaatcctgccggaagagtatggaaacgtgaagaattggtacgtattggtgaaatttgtattcgccacgatgttatggtcgtttcggatgagattcattgcgaactggtttttccagagtaccgttacacaccgtttgcttccatctcagaaaatttccgtcaccattcgtctgtatatctcccagtaaagcgttcaatattgccggattacagattgcgaacattatatgtgctgatgctgaccgtcgggcgaaaatcgatcgggccattaacgataacgaagtatgtgatgtcaatccttttggtgtaattgctactcaagtagcttacaacgaagaggaagagtggctgaaccaactcatcaaatatttacaggccaattttctctatatgcaggagttctgtcgggagcatctgcccgagtttcctatcacggcattggagggaacctatctcgtttggatggactgtcacagactcggcatacactcgcaggaactcgaacagcgattggttaacgaagctggattatggctcaatgcaggagcaatgtacgggactgaaggaaaaggattcatgcgctggaacatcgcctgcccacgtactacactggcagaaggattgaagcgttttgcaggtttcgtaagaaatctttaagagatatatacggcaaattcatttttaatggaacgcagctatatactttactataccaagcattacgtataacaaagtaaatagctgcgacttaatttttcatctcattttttcttttcttccacaactgataactattgatgatgttttgccacaccacataactacctggaccgacagatgataaaggattaagatacgtaaccgccatccaaatagctagtacagtatttttttgccccaatgcctgtcctgcacttatacggtcattgtatgcactaccaattcttttaccaaaataaaattgtaaacaacaagttactaaaccagcaaaagcaatcaacatctctaccgttacatcagctgtactgttaaccaaagaacgagtagtctgccccattacaatggtcaatgctatcgcccataaataaaaagctgaagtatgatattccagtaaaaacttatggaatcgagggatataataacggaataataaagcgataaaaaacggcgcaagcaacaatgggaaaaccttacttaaaatcttaagaaaagcaataccaaaagtaacatccgtatgtggctcaaccaatggaaataccaaaggaactgctattgcagccaaaatatttgaaagtaatgtataagtagtcaaactggaagcacttccacctaatttccccgtaattactgccgctgccgtagcagtaggacaaataagacaaaccatagccgcctcgaatatctccttataagattcgtccatcggacaaaatatcaacaacaacgcaatgataccacaagaaatagcttgaatagccaacaaccagccatgccatactctagggaccaactcttttggttcaattttacagaatgtaagcaacaattgggcaaaaatcaaggaaggagttagaaaagaaatcaacccattcataaatggctttgtcggctccagaaaagtgaagttggcaaaaacaaaatagccgataacccctgcaagcatagctaaaggtaacgtccaattcttcataaacttaagcaaatccatctttcaatacttattttgggatacaaaataaaagaatttagtccaaatactcgtctatttttcgggttttgtggcaagtttcgaataaaaaacgcaaaacttaaagacaaaagccgagttttcactaaaaatcgctacatttgcaacttgattgatatgaaaaccgatagacttaaaataatattcctgttgtgtagcctgtggctggtcctcccctgtttctgcctggcggcaaagggaaaggattttatagtcgtcattgatcccggtcatggcggacatgatcctggcgccatcggcagacgtggaaaagaaaaaaatatcaatctgaacgtagctttaaaagtaggacaactgatccaaaataactgtaatgacgtaaaggtaatatacacccgaaagacagatgtctttatccctttagaccgtcgtgcacaaatagctaataatgctaaggccgacttattcatctctatacataccaattctgtagcccgtagcagaactgtacggggagcagaaacttatacgttaggacttcaccgtactgaagaaaatttggaagttgctaaaaaggagaactcggttattttgatagaggataattatgaacaacgttatgccggattcaatccaaattcttccgaaagctatattatttttgaatttgtacaagacaaaaatatggagaagagtgtaaaattagccactcttatccaaaaacaattcaagaatacagccaaacggatagacaaaggagtacatcaagccggatttctagttctacgcgccacttccatgcctagtgttttggttgaattaggttatatctcaacaccggatgaagaacaatatcttttatccgatgcaggcactacggcattatctaacagcatttataaagcattcctcaattacaagcgcgaacatgatgcccccaccggtcgcagcagagtacaaggacaagaattgccggaaccagaaaacaaaccgaaagaatcaagaatagaaatacaaactgcggaaccagacactgcaacggaacctgacaaagttaccaaaaagcctgtgcctgccacacaaaaaaagatcacaggcgaccaagcccgaacatctgccaagcctgtatttaaaatacaaatattggtatcaaacaaaatattacccaaaggaagcaaacaactgaaaggtgtatcacccgttagctattaccgtgaaaaaggactttataaatatacttacggagaaagtacggattataataaaatactacgcatgaaacgtaatattactcctaaatttaaggacgctttcattatcgctttcaaaaacggagagaaaatgaacgtgaacgaagccatcaaagaatttaaaaagaatagataatataaaaggtacaattgaaatgacgaaagaggtaaaaataggattaataggcatcgctgcattggctatgctgatctttggtatcaactacctgaaaggaataaatatgttccaatctgccaactactattatgtagaatataccaatataaacggattagccggatcaagccccgtctttgccaatggttacaaagtaggtacagtaagaaatatcaattacaactatgctaaaccgggacatgtcacagtagaagtggaagtagacaaggaaatgcgtatccctaaaggaagtgcaggagaattggttacagaaatgctgggaacagtaaagatgaacttactccttaactttaattctacagaatactatcaaccgggggatacactgcctggcaaaacgaatgcgggactcatgggagccgctgaagaaaagctagttcctcaaatagagcagatgctgcccaaaatggattctatcctacattcattaaataaaatattagctgatcctgcattgggtgcaaccttacacaacgcagaaaaactgacagccaatctggatgtgacaacacgtcaattaaacatattaatgcaaagggatcttccgcaacttactggaaaactaaacacgattgctgataatttcattactatcagcgacaacttgaaaggtattgattatgcatcaacattcaataaaatagattccactttatataatgtacaaatgctgacagaaaaactcaatcgcaaggacaacagtatcggcttactattcaatgatcctaccttctaccaaaatctgagtgcgacaacagcaaatgctgcaaccttattggaggatttgaaagcgcatcctaaacgttatgtacatttctctttgtttgggaagaaagataagtaacagatttgttaatttaaaaagattctaaataagtctacttaaccatttttctaccttttttcagtaaatgactgcaaatagggcagaaatactatgtagacttatttcatttaaaataaataaaagcctattttgacagatagtcagctataaatcagccaattatcaaataacaaaaatatttcagaagcctttagatagagttttttataagttactgaaactaaatagattactctttaaaaataaaaagcaagaaaaaagcgatttgttttttcagaaattcatttcgaaatttgcattgtagaagtttcgctttttataataaatgtttcatatgattgaaaacgatcacgtcgttttatggggtcgttgtctgaacattatcagagacaacgtacctgaaacgacctttaaaacgtggtttgagcctatcgtaccgcttaaatatgaggacaaggcactgacaattggcgtccccagcccattcttctatgaatttttagaagaaaagtttgtggacttgctgcgcgctgccctatataaagaaattggggagggaacgcagcttatgtattgtatcttgaccgataaaaccaaccatataactgtaaacatggagggaagcaaacgctcttcagcactacccacacaaacagttatacgagatggtaacaaggcacctaatccaatgcaggcaccagctccgcaggatttagacccacatttgaatccaaattacaactttgagaatttcataaaaggaaatagtaatgagttctcacgtacggtaggggaaactgtagctaaaaatccggcaaaaacattcaatcctttgtttttgtatggaccgtccggcgtgggtaaaactcacttgactaatgctattggtactcgtatcaaggaattatatcctgaaaaaagagtattgtacgtatcagcacatctgtttcaggtgcaatataccgactctgtgcgtactaatcatttcaatgatttcatcagtttttatcaaaccatagatgttttgattattgatgatattcaagaattcgcaggagtaaccaaaactcagaacacgttcttccacatctttaaccatctgcaccagaacggtaagcaacttattttgacttctgaccgcgcaccggtaatgctacaaggtatggaagaacgtctcctgacccgctttaaatggggcttagtggccgaattggaaaaaccggatgtagaattgagaaagaatatcttacgcaataaaatacgtcgtgacggtttgaatataccggaaacagtaattaattatattgctgaaaacgtaaatgaaagtgtacgtgaactagagggcatcattaattcacttctggcacaatccattatcttcaagcgtgatgtcgatttggatttggctgaaagaattgtacgaaaagctgtacgctgttgtgaaagcaagcctgtcacagtggaagatatcatacagaaagtatgcaaccattacgagatagaggaatctgccatccataccaaaactagaaaaagagaagtggtacaagtacgtcaggtagctatgtatctggccaaaaaacatacagactcctcttcttccaaaattggtcaattaataggtaataaagatcatgcaaccgtattgcacgcttgtaaaatagtaaaagaccaagtggaggttgataaaacatttaaagcggatattgaggaaattgaagcttctctcaaaagaaaatagaaataaaactacagaggtgcgcaaagggtattttctttatttccctctgcgcacttctgtagttttaaggttaatagtttccggtaactcatttttcaaagccctgtttcttcaaggtttctttcaaagttacagacatgcattcattatccgacttcttgtatctgacctcagtaaatacctgagccaatgtttctttatgattttctttaataaactgatgattttccggaagtgactctttatatctatagatacgatcaatatcttctttggtataatcatgatatacttcttcatgcaaaataccctctataggaagacgatcgacttgtgaaggacattcgtccggatatcctactgtaatagtagccactggcataaccaattccggcaaccgaagaatatcaataatttgatcaggattataaatcgttgttcccaaataacaaatacctaatccattttcctccgccaatgtacaaaagttctgagtcacaagtaatgcatccgtagcagcattcagaaaagaaatgggattgtcataacccggtaccgccttacgccctctgcaccatttgctaaaacggttaaaatccgcacaaaaagtcagtacaaccggagcacctgttaccatcggttgattaaaatgagcaggtgccaatctctctttcatctgcttgtcacgggtcacaatcacactatataattgcatattgcccattgtagaagcacggaatgccttttcaagcaaatcatttaacaaagaagcagaaatatcttcctgcttatatttacggatcgtccgtctattatttatcgattccatatatatttttcttgcaaagataaaaaaagaaaagagtaataattcattttttgcaaaataatatatgctaagaatttggtcttttcaactagtcaatcacttatttccttcattgaaattttcaaaatagaaaacttccgtaaataaaccaacacatatatcttttgataatcaataaattaacaaatatttttggataactttcaatttgttgaaaacttatctactttttattttgttaattgaaaaaacatatatagctttgccgaaacttttgttataatgagttgcggcttctacactaaaacaacttattgatattatagtaaatctaaaaataaaagtggaaaaacaaacgtacacctatgacgaagcttttgaagcatctttacaatacttcaaaggtgatgaacttgctgcaagggtttgggtaaacaaatatgcagtaaaagattctttcgggaacattttcgaaaagtctcccgaagacatgcattggcgcattgcaaatgaagtagcccgcattgaagcaaaatataagaacgggttaaacgcacagcagctttacgagttattggatcactttaagtacattgttccgcaaggtagtcccatgacaggtatcgggaacgattttcaagtggcttccttatcgaactgctttgtcattggaattgatggagcagccgactcatacggagctataatccgcattgatgaagaacaagtacaattaatgaaacgtcgtggtggcgtaggacatgatttatctcatatacgacctaaaggttccccagttaaaaattcagcactgacctcaaccggactggtgcctttcatggaacgctattccaattcaacacgtgaagtagcacaagacgggcgtcgtggtgctttaatgttaagcgtatccatcaaacatccagactcggaggcatttattgacgccaaaatgaccgaaggcaaagtaaccggtgctaatgtatccgtgaaactagatgatgcatttatgcaggcagctgtaaatggcactccttacaaacagcaatatccggtagattccgatcaacctgttttcacgaaagaaattgacgcatctgctttatggaaaaagattgtccataatgcatggaagtctgctgaacccggtgtattattctgggacaccattatacgtgaatccgtgccagactgttatgccgacttagggtatcgtacagtttctaccaatccttgtggtgaaattcctctgtgtccctacgattcttgtcgtttattagctatcaacttatactcatatgtagtaaacccttatacaagggatgcttactttgatttcgacttgttcaaaaagcatgtagcattggcccagcgcattatggatgacattattgacttggaactagaaaaaatcgagaagatcatagctaaaatcgattccgatcctgaaagtgaggaagtaaaagaagcagagaaacatttatgggaaaagatttataaaaagagcggacagggcagacgtacaggtgtcggtatcacagctgaaggggatatgcttgccgctatggggttacgctacggaacagaagacgcaacagagttttctgaacaagtacataaaacaatcgctctggaagcctatcgttcatctgttaacatggcgaaagaacgtggagcattcgctatctatgacagtgaacgagaaaaaaataatccgtttatcaaccgtttaaaagaagctgatcctaatttatatgaggagatgaaaaaatacggacgacgtaatattgcctgcttgaccatagcccccactggaactaccagcctaatgacccaaacaacttctggcatagagccggtatttatgccggtatacaaacgtagaagaaaagtcaatccgaatgatcctcagactcatgtagattttgtagatgaaacaggagatgcatttgaggaatatattgtattccaccataaatttgtggaatggatgacagtaaacggttacgatcccaccaagcgttatacgcaagaagagattgatgaattggtagaaaagtcaccttattataaagccacatcaaatgatgtagactggctgatgaaagtaaaaatgcaaggacgcatccaaaaatgggttgaccattcaatcagtgtaactatcaatttgcccaatgacgtagatgaagcattggtaaaccgcttgtatgtagaggcatggcgttcaggatgtaaaggatgtaccgtttatcgtgatggctctcgctctggagttttactttctaccaaaaaggacaagaaagacaaaaaagaagaacttcctccttgcaaaccacctacggtagtagaagtgcgccccaaagtactggaagcggaagtagtacgcttccaaaacaacaaagaaaaatgggtcgcatttgtaggcttgttggatggacatccatacgagatctttaccggtctgcaagatgatgaagaaggtatttcattgcccaaatcagtcactaccggacgcatcatcaaaaacattgatgaagaaggcaacaaacgatatgatttccagttcgaaaacaaacgtggatataaaacaaccattgaaggtttgtccgaaaagttcaacaaggaatattggaactatgcaaaattaatttcgggtgtacttcgttggaggatgcctattgatcgtgttatcaaactggtagattctctgcaacttgacagtgaaaacattaacacatggaaaaacggtgtagaacgagcactgaaaaaatatgtaacagatggtactagtgctgaaggacaaaaatgtcccaattgcggcaacgaaactctcgtatatcaagaaggatgcttgatctgcaagacttgtggcacatcaagatgtggataatggtttattatataatgtaacaacacaaaagaaaagctccttcacgaaagtcatgaaggagctttttatataaaccaagtaaattctttttctatctcacccctacaatacggtgaaaccgttccacaatacgccttcccaaatccatacgcgtactatctactttatgaatggcagcaggagtcacatcatctttatatttagctttacctacgcgtattttcatcttatccagattaccggaaatattcactccggccttaaagggcaagggtgacttcaaaatggatatatgatatttaaaattcatatccaacccttgctctccccctatagcagctttataacgatctatagacacttgaaatggataaacaagaacactaccgtcattgacaactatattaaccgaaatactatcaaatacattcttctttttatttttgaacatcaacatctttgatatttcggcaaaggtttcaccatccatcaatactaagctgtccccttttatatgcatggccgaacgtaaagtaggtatacgaatattcatatttgaatccagacgtgcctctgcagccacatcaaactgaacccttcctttaaaagatctcaacataggtacaatggtatccattgaaggtataaaatctaccagcttagctatatttatatccctaattttaaagtcaaagcctgtatatcctcctctgactgaatccgcacggtataccataacggccttcatatcagcgtctaatgcacgcattcccaaattccttaaatgtaatgtacgatttttcaaatccacctttccacacacatcttcaaattccacctgttcaaacactacttttttcaaatctgtctgtaattcaaaatccaaattacccggcaacacaaacagcttcatttctgttggaggcactgtatctgtcaccgccacagatgctgaatcttcagataaagagaacgaattaatcaattggttacaatcaatcatctcagaagatattgctaaacgcgcttttaaaatttcatttttagccatcgcacgatataatcctattacctccccggtagcaaccatatctgaatgccctattttcaaagaagcatttcttaatgttattctcggaccatctattgttacagctgtcttacgtactcgcagaggtaaaccaaattcaggagcacgtaccaacaacctatcaaaaccgataatcccccgaggtgtccataacgaatcatttttcttttctaatttcacttttatgcctgccacgcctaatgctaatttcgtttcgttagcattaaagaaaagagaatccgtacgcatggaaaaattaatcatcggcatcgccggattttgttccttcggagcaagttcgccagttccagtagtcttgccactatatattttgagcgaatctcctatattcgcacgcaatttattcatttccaattcacattgtaaagtaacaatctttgtggtatcttgaggattggttgaaacaaccttcgctttcatccgatctatctctgaagataatttcctactattcaatagtatttctctgatttccaattcagcttgcaaagtttcactatcactgaattttaaatcggcattacctaaaaaattaaaattctttgcagtatcttttaattcaaaatcctttaaagccaatcttccacctaacctgatacgcccaatatcctgttttttcaaagaagagagacggcattttaagtttaaacccgcatctaatttaccgcggatagttacactttcctgcaaaggaaaggttttagctaaagcatccaggtcaacagtagattcagtatgaagcgttataaatggatctatcaataaatcctccactttcgcatctgctagaatcttagtatgtactccctcaaaatgaagaattttcaagttcaaaaaagaagggttgcgacgcatcaaatcaatatacgattcaaaatcagccgtaaaattatcaataccataaggaagtccttcatatcgggcggatgcatcatttatctttatattcaatgatatcgccggaagctgcttgtttccataattaccttccaatgttccattaactttaacctcaccttttaccgaaatttgtccacgtttcacataagcctcgggaatcatattcataacggtttccatggaaggtgcatgtaatccatatttcaagttcatacccaccgtttttgtaactgtatcacgtcttaattcaccgtttacatccatccggataccatttatagtcaaccctgtatttttcaatgtccacaatgccgtagacctgtctacctcaatatcagtctgcaagaaaacggctactttattaatcaataattcaccttgctgccaaaaaagaatatttttattttcaaattctactcccaatgaagaagctccttttgtcaacgccagttttaggcgcaaatcagcatcatctatacgtgaataaacctctgtattacgatcgtcaaaaatcaaattgacatgttctaattcaacctgacggatatctatctcgctatcaaatttattttgtggaatagtatctttttccacagccaatgtatccgaagaagttttcacaatctcccaatttgccttacctgttttatttcgataagcataaacagcaacattcttcaaagatagattatggacactaatcttatttttcaaaaaataatccaaaggatttactgtcaacacacattctttaaatgccaataaagaatcagttttttgtggaagactatcgttcaagaccttagaaaccaaaaaaccttcatcaacttttaacccaaattgaggaaaagtagaaaagaaagtcaattcgactctttctatcttcaaatcagcatccagtaaacgattagcaacattcaacactactggagttaatttatctgatgtaaatacatagttaatcacaaaagccactaccacaaacgcagtaaacagcaaggctcccactgtaatggcacttacccttattaatttacgaatccttctttccatattatgcgaaattaatgaaaacacccatgccatcgactctatttcgtgttaatactataaaatagaccaataaaacagataaaaaagaaaacaagaacaataatttttaattttgagatatgaagtgaaagttctacttttgtttttcaaactgaaaaaatatgaaagcaacatctatgtatatttatttggaaggtgccaagtttttcgctcaccacggagtcgatccacaagaaacaatagtaggagctaattttataattgatttaaaactaagaactgatttcacccatgcagcacaaacagacgaactgaaaggtaccgtaagttatgctgatatatatgcagttgtcaaaaaagaaatgaaagcttcatccaaacttttagaacatgtctgtgaacgcatagggcaaagactatttagtgaatttccaactattcaggaaataatcatccggttatcaaaagaaaatccgcctatgggaagtgattgcagaaatgttggagtagaagtacattatacacgatgaaaaaaattatctgacaaacatccagtcatttaattaaaaatttaccctattgtatgcctacctcttaaaaggcaaatatactatcatgcaaataacaacacaaaccaataataatgaatatgcagacaatgttcatggctctacttactaaaataaagaaagttgttttcttccttcagaatgatagaatttcatggtagcactgattcctaatgtttctattctgcgataaaagacctcattcaaatagggtgcattaggagaagtgcattcagaacggtcttcaaaataagttttatatcgcttggccatctttggaaaaatctgctctaccttatcataaaaataatcacgggagccccgtcttaaagttaccccaaacaaaggaagcacataggacgctcccgcttcggcagccttctccactatttcctcaatatcttctatagaatcatttataaaaggcaaaacaggcatcaatgccactcctgtatatataccccgatcggacaatatcttcatcgccttaaaacgctcggaagaggtcggcgcgttaggctccagttttcgcgccatctcgtcatccgctgtagtgatagtaaaactaacggcagcataagtgcgccctatatcctgcaataaatcggcatcacgagtcacaagactactctttgttatcacatgaacaggaaaacgatgtttggcaataagttccaacgcacctccagtcagcttcatctgtttttccaacggcatataaggatcgttcattgagcctgtaccaatggtcgcttttccacgtttcgttcccagttcatgatccagtaattccaaagcattcttctttacagaaatatgagaaatatcaccaataccatagcaacaactacgtgtatcacaataaatgcaaccatgttggcaccctctatacaaattcatgttataagcaataccccaataattatctttacttttcaaacgtgacagaatagactttgtttcaatagatttcacctcatgaacattcatttacagctccttttcttttttgatccaatttcaccaaacaaagatacgggaataatgctataaaaagaaatataaagagaagcaatttaaaaaagtttcaactgagagaaatgttttttacccaacaaataatatttcataagaatactaaaatgagtccgttccgggatcatttcatctgtagacttcattatattttctatacgagaagcagcaaaagaatatcttatatcctcaaattctctcctcgcctgcattacagcacgcgcattcgctctatcctttttcagataaaaaacaagggcagctactctatccagtataccacgtataaaaagtacatgttctaactccttatccggcaaattcttataaagcatcaacagattatttctgaaattcagaaaagtctttctcggattttcttttttcaacgtagcccctcctacgtgatataccacactttgcggaatacagacaagcttttttccccggctgcgcaaacgccaacacaagtcaatttcttccatgtgagcaaaaaaatgatcatccaaccctccaacttcacgataatcagccaaccggataaaaagagcggcccccgttacccacatcacctccgttaccgtatcatactgtccgcagtccttttcaacaacatcaaaaatacgccctctgcaaaaaggatatccatatcgatcaataaatccccccgacgctccggcatattcgaaatattccttattatgccaacttaacagtttaggttgacaggcaactgttccggaatgggtatccatataatccaacaaaggttccaaccaatgcgaagtaacctccacatcgctattcagtaaaactacatattctgcatcaacttgcgccaaagcccggttatatccttcggcaaagccataatttcgatccaactcaatcaaacggactacaggaaattcagtacgaagcatttcaagcgacccatcagaggacgcattatcagccacacaaatttcaatcccctctcctactgaattatctataacagaaggcataaacttacggagcatatctaccccattccaattcaatatgacaacagacacccttttcatttcttttcagactaaaacacccttcaacgctgtaccctcttcattaaagcctcccattcttacacgaatcaactgattatccaattgatcatcgtggtccatctccacccggatataattatcagtaaatccatgcataggagtgccaaccttagatttttccattaatacccaagcttcttttcctatatgagaggtatagaacgcctttgtcttctcatcagataaaaccaacaatctctgactacggcgatgtttctcctcaggactcactacatactctattttcaaggcctgcgtaccgggacgctccgaataagtgaaaacatgtaactgcgtcacatcaagcccttcaataaaatgataagcatcttcaaaatattcctctgtttcaccacgtgttcccacaattacatccacgccaataaacgcattcggcatgatctccctaattttgcgtatcttggaagcaaacaatgcggtatcatatcgacgtctcatcaatttcagcacatcatcgctgcccgactgcaaaggaatatgaaaatgcggcatgaatgcacgtgaacgtgacacatattctattatttcatccgttaacaagttgggttcaatagacgagatacgataacgttcaatccctgccacctgatctaaagcctttaccagatcaaagaaactttcaccggttgtctttccgaagtctccaatattcaccccagtaataacaatttcttttcctccctcagcagcagcctgccgtgcctgttccacaatctcttcaatacgtccgttacggctacgcccacgagcaaacggaattgtacaataagagcagaaataatcgcaaccatcctgcactttcagaaaataacgagtacggtcacctctagaacacgaaggtgaaaaactacgtatgtcttttgcagctgtcgtaatcgcctcaccttgaggatgcttttccaaatttccgagataattcatcaactctcctttttgttcagctcccaaaacaacatccacaccttctatattagccacctggtcaggttttaactgggcatagcatcccgtcactactacataggcacccggatgctgtttaaccaaacgatgaatggcttgacggcatttcttatccgcaacctcggtcacagagcaagtattaataacacaaatatcagctttctcacccttacgtgctgtacgtatacctgcttctttcagtgttttaccgatggttgaagtttctgaaaagtttaatttgcagcctaatgtataataaacagccgttttatcctggaaaattatcgtatcaatcatacctttttatctaattagcgagcaaaggtacatattattctgcttaaattctttagaataccaataattatgcttatttttgcacattacatcaaaaattgtgcaatgataaaagaaaactttatcaagctatatgagaatagcttcaaagaaaactgggatctgccctgttacacagattatggtgaagataccacgtttacatacggacaagtagcggaagaaatagctaagatacacttattattccaatattgcagcctgcgccgtggcgataaaatatctattataggtaagaatacctcccgttggtgtatcgcttatttggcaactgttacatacggagctattgtagttcctattttacaagacttcaagccaaatgatgtccatcatattgtaaatcattctgaatccacatttctgtttaccagcgataatatttgggaaaatttggaagaagaggcattaagtggattacgcgctgtattttctctaacggatttcagatgcctgcatcaacgtgacggtgaaaccgtccaaaaattcatgaagaatattgatgcagctatgagaaagaacttccccaaaggcttctataaggaaaatatcaattacacagaactctccaacgagaaggtcatgttactgaattatacttcaggaactaccggattcagtaaaggagtaatgattacgggcaataatctggcaggaaacgttacctttggtatccgtacagaacttttaaagaaaggagaaaaagtactttccttccttcccttggcccatgcatacggatgtgcttttgattttctaaccgctactgctgtcggtacacatgtcaccttattaggaaagacaccttctcccaaaatattgatgaaagcttttgaggaagtaagacccaaccttattattacagtaccattggttatagaaaaaatttataagaatgtaattcagccgctcattaacaaacgcagcatgaaatgggcgcttaacatacctttactagacaaccagatttatgcacaaattcgcaaaaaactgattgacgcattaggcggacgttttaaagaagtcattatcggtggagctgccatgaacccggaagtcaccgattttttctacaaaataaaatttccgttcaccatcggttacggaatgaccgaatgtgccccactgatcagttatgctccatggaatgaatttatacctggttctgccggaaagatactggatatcatgaaagtccgtatcgactcggatgatccctataacattactggagaaatacaggtatgtggtgaaaacgtaatgaaaggttattataagaatgaagaagctacccgtgaggtatttaccgaagatggttggttgaaaacaggcgatttaggtacaatagatgctaacggattcatttatataagaggccgtagtaaaaccatgcttctgagttctaatggacagaatatttttcctgaagagatagaatccaaactaaataatatgccattcgttctagaaagtttaatcatagagcgcaacaagaaactggtagctttagtatatcctgattatgaaagtctggacagtctgggactcaatacccccgaaaacctaaaaacagtaatggatgaaaacttgaagaatctgaataaactggtaggaaattatgaacaagtgagtaaaatacaactttatcctacagagttcgaaaaaactcccaaaaaaagcatcaaacgattcttatataacagcattactgaagaataaatatgttataaaacatgctactaatcagcaaaataggttgtataacataaaaaactagaaaaaaagttgttctttttggtacaacgtattgaaaaagtgtatacctttgcatcgttttaagaaagcaacattagtattacagatttaaaaagcaaagaaaatgaaaaaattagtatttttgttcgtagccttcgcagctgtatctttcgcatcttgcggaaacaaagctgctaacaacaacacagaagcaactgattcagttgcagtagtagaagaagctgctgttgtagaagaagttgtagcagattcagctgcttgtgactctacagctgcttgctgtgactctactaaagctgaataattcagtacgaactctagagagaattgaaagtctgccgtgcgaaagcgcaacagactttttttatgtctttactcctcccttttctgccaatattccatcgttttgcaatacaaattatctacttttgtttctcaaaccacaaacaaaaacaggatatgaaaaagacaaatctaaaagaaacacttcaaaactggaagttgggaaactatttccgtgaattatctattgttatcactggagtatttatcactcttgccgaactgatttcataagcaattcctcacaagaaaagcagataaaagaaagtatgcaaatgataaaaatggaattagaagaaaatttgaaaagtatcaatcaggccgaagtcgcgtatttaaatgaaatcagtttcttccgattgctaacgtaaaacaggattcacttcaaacaactaaagcttctattttaaaaaacaatgccaattctccttttgcgtaaaagattgtgagtattcggaagatgtgctagaagtactgaaaagttcagcattgatgcaacagatacctgacaaagagttcatttcaaaacttttacaaacctataaaaggatgtagaaaaataactgaggacaacaaagactattataaatacaaacaagattatataacccgctacttctctcacctaaccatttataatattcataaaaattataacaatatttataaagtatgggtagctaggatacaagaatatgatatcaaacaactgatcctcactatgccaaacacttttgacgaaaatccttttaccactcctcaaaaaattataaaagaaacgattgaattaataaatcaaacatattaaaaagaaaaagcccggctcttacgaaccgggctttttcagcatcattatactttaaagtatttacagattttattcagcaactacttcgaacgggatttctacagaaacttccttgtgaagtttaacgatagctttgtaagaaccaatctctttcactgcatctttcacaacgataatctttctgtcaaccttatgacccaatttttccaattcttcagcaatttgaatgttgctaacagagccgaagatagtacctgtggcactcactttagtagcaatagtcaaggttacatccttcaactgttctgccatagcttcagcatctttcttaatcttttccaatttgtgagcgcgttgtttcagctcttctgccaacattttcttagctgaaggtgaagcaatcactgccttaccagtcggaataagatagttacgaccgtaaccagacttcacagttacaatatcatttttgtagcctaagttcactacgtcttctttcaaaattatttccatacttattcctccttattatttcatcatgtcagttacaaatggaagtaacgccaagtgacgtgctcttttaacagcctgcgcgatacgacgttggaacttcagagaagtacctgtaatacggcgaggaaggatcttaccctgttcgttcaagaatttcttcaagaattcaggatctttgtaatcaatgtacttaataccactctttttgaaacggcagtattttttcttcttaacgtctactgagggcggagttaaatatctgatttctgattgttgctgtgccatgattaatcctcctttttagttgatttaacatttcttctcttagcagcatattcagcagcgtatttatccatcttaaaagttaagaaacggataacacgttcgtcacgacggaagttaatttccaattttttaataacctgcggttctgctttgaactctatcaactgatagaaaccagttgactttttttggatggggtaagccagctttttcaagccccagttttcctcattgataatctctgcaccttctgcagtcagaatacctttgaatttctctaccgcttccttcatctgaacgtcagataaaacgggagttaaaatgaaaacggtttcgtattgattcatactacgtttattaaattattaaattaaatttcaaatgcgagtgcaaaagtagatattttatcttaatctacaaagagttatcacaattttcttcaaaaaatatagtttcattttacaattaatcttcctttttatattttttatctgtaaaagataagttatatccgccaagaattgtatatttgcaaagttgtttaaacaataattccatgatagaacaatttagttttgatatccaattaatatttgccatattaaatggcaaagtatctgcagccatcaaccggaaactaagccggaattttcgccaaaatggtgtagaaattacccctgaacagtggacagtccttctttttctatgggaaaaagatggtgtcacacagcaagaactatgtaatgccacttttaaagacaaacccagcatgacccgcttaatagacaatatggaacgccagcatctggtggtacgcatcgccgacaaaagagatcgacgcaccaatttaattcatttgaccaaaaccggcagagaattagaaggtaaagcacgtttcatcgcaaacaagacattgaaagaagcactacaaggattaacattggaagaactgaaagtcagccaagatgtattaagaaaggtattcaccaacatcaaagactaaagtttttcaaggttttcatctttttttcctaaaataatttccatgataagagaattatgctttaatttgtacacaagaataaatataatctattaataaaatacacacatgaaaagcttacttaagaatttaggtctgatactgatgatcatcggcgccgctattttagtcggtgttttcttcaccggaagtgcagcaattaacgacaacggtgttttaggtggaagtgccgcccttatcgttataggtttaatcgtttatattgtattaaacaaacgcattgttgattaaagtataagagaacaaaaataaaaaagtccgggtagaactccggacttttttattttatcgactttactcactttattccagattgccgaaaagaaaagtccttttcttctaatctttatatatgtaatgcctgttagattatatatctttcaactgtaacattagtaatctttcaaccgacacaaacataaacagtcataatactaactctttctgactacggatcatactcccctgtcttgcttacggattttttacagctgaagctttccagctacgaattcttcaccttaatcatctgacaataagctatttataaagacatgaagcttttaacggaaatataacatgaattttacaacctactttaaacaataatttctacacaaaaaatcagctcgttctcaagaacgagctgattttttcatctacttgcaactaaatgttactactaaatatcagatatcctcttattctacttcgggagtaatcagtttataccccttcccgtggatattgataatctcgatagaatcatcttctttcaaatgtttacgcaacttagtaatatacacatccatgcttcgtgcattgaaataattatcatcaatccaaatagttttcaatgcgaaatcacgctgcagaatctcattagcatgagcacaaagcaagcccaataattcggattctttcgtagtcagtttagtctgttttccatcgatagccagaatttgtttctgagtatcaaaagtaaaacgaccaatcttgtagatattgctttccttgtttctcttaccacgtacacgacgcaaaatagcctcgatacggaaagtcaactcttccatactgaacggtttagtaatataatcatccgcaccaatcttgaagccttccaatatatcctctttcaaagttttagcagtcaagaagataataggaatttcagcattagcctggcgaatttcctgtgctaaagtaaacccgtctttcttcggcatcatcacatccaatacacataagtcgtatttgttcttaaggaaagccttgtagccagcctcaccatccgggcaaagttcggccgagtagccttttgcctgcaaatattctctcaatagcatgccaagattctcatcatcttcgcataacaagatacgcaatttctcgtccatattattcattttttaataaaggtaatacaattataaatttagttcctacattcaattcactctcggcacgtatagtccctttgtgatcttgaattatttttttcacataagccagtcccaaaccaaagcctttcacatcgtgcaggttaccagtatgcacacgatagaatttatcgaatatcttcttcaggttttctttcttaatacctattccattatcctggatagagatataaagcttacccgattcattccaagtacgtatattcaacaacaattcgccttcctgttttttatatttcactgcattgtccagcaaattaaaaataacatttgtaaaatgcatctcgtctacaaatatatccggatttaccgcatccaaattcgaagtgattttaccattgtatttctctaccttcaacgtgaaagtattgacaacaccggctatcaaatcatttgcattcacctctttcatcttcagcgtcgctttttgcttttcgaacatagacatctgcaacaccttttccacttgaaaacgcaaacgcttggtttcatcatttatcactccggatatatgctggaacatagcaggagattttcccactgccggatctttcaacatctgagctgccaacgatatggtagagataggtgtcttgaattcatgtgtcatattatttatgaaatcattctttatctcggtcaacttcttctgacggaagatgatatagatagtaaaaatgaacgtcacaagcaatacaaatgtgaagatcagtgacgggatcataaatttaacagaactgaatatgtaactgttcaatgtagggaagtgaatatttactgttgccatacgagccggaggatcatttttaaataaaacctgcggatatgtattctcactaccctctttggtataatcagggcaatggtaaacttccgtcccgtcacggtctgtcaccgtaaaatggtaaggaatatcaatgccattattcagcaattctgtctttaaaaacaagtccaactgtttaaagttgattcttttgttcaagggtttgtcactagctgtatacaaaatgttatagaccacttcgtccaacaatgcacgttggtacacatatctgtctttaattatttcctgcaaggctcttgaagtctgaggaatattcttaccagtcgaaataatcgctttaggaatattagaaggacgattcgcactgaacctcatcttcaattcaaaagtagagtaaccgttcaatccatcggaagttatggagtactcatgtgtatgcgctaccacattaccacttccctccccctttttttcttcggactgctccctggataactgtgctgctttttctgtagcaatcgcatcatcctcaaggtactttttagtttccaccaactcaatatttcgacacgcttggactaaactgcgctgaacagactcatcaaattgtcctttgcgcattttcaccatttcttcaatatagcttacctgcaaatacaataaactaagaaatgatagtcccattacaatacctaatacccaaatagtagactttttcatgtcagcaaaattaaaagcgctaaatctcattacataatagattaaccaaatttaaacggctattctctataattaaccgaaaaagtcatttaagctaagattctgactattataacaaaatttacgccagttggtttgcaaaaataataaaaaattaagttcaaaaccaaataacaaacctaaaagtttaagttatcttaaataaaaagagacgtatttttaacgaaatacgtctcctctaagtatgaaatcttacactttatcaatcatctttattttctttagcttcaaattccttcattaatttttcttgtacatccgtcggaaccaattcatagctggcaaacttcataataaacgaagcgcgcccacctgtcaaggaactcaaagaagtggaataagaagacatttctttcagaggtactttcgcaaccagtttttcatatccactttcactgctcatacccataatcataccacgacgaccttgcaaatcactcattacatcacccattttgtcgctaggaacgaaaacttccacatcataaattggctctagaatcttaggcccagcattcttaaatgcctcactgaatgcattacgtcctgcaagcataaaggagatttcatttgagtctaccggatgcatcttaccatcataaacaatcactcgtacatcacgcgcatatgaaccagtcaacggaccctgctccatccggctcataatccctttcaagatagcaggcataaaacgagcatcaatagatccccccacaatactgttaataaagactaatttaccaccccattccaaaggtatttcctcagtccccttcacatttatcttgaattcctgaccgttaaacttatacgtttcgggtacaggcattccttcataataaggttcaacaatgagatgaacctcaccaaattgccctgcaccacctgattgttttttgtgacgataatcggcacgagctgctttagtgattgtttcacgataaggaatcttaggctcctcaaacttaatctgcaatttttcgttattctccaaacgccacttcaaggtacggagatggaactcaccttgtccatgcacaatagtctgtttcaattctttggattgctctacctcccaagtaggatcttcctcacgcatacggttcaatataaccatcatcttctctacatcagcctcatttacaggcttgatggcgcgcgagtatttagcattaggatatttaatgaaattaaaccggttttcacagtctttgccgttcaaggtatttccagtctttacatctttcaatttcacagtacaaccaatatctccggctaccagctccggcaccggaatacgattagctccggcacaaacaaaaagctgtgccatacgctctttagagccacgatcagcattagttaaatcatcaccttcgtgtacctttccactcatcactttaaaatactgcacaccaccgatatggggttcaacggcagtcttgaagaaataaagagaagtaggtccattagcatcgggaggcacaggcacaccacgagtattatgaactacaggcatatctgatacgaatggaacaacattacctaaaaattccatcagacgacggacacccatatctttacctgcacatacacagaaaacagggaacataccacgtgcagccaatcccttacggatgccttcacgcatttcatcttcagtcaatgattccgattcaaagaatttttccatcaatgtctcatcattttcagcagcagcctctaccaaagctttatgcatctccaatgccttttctctctcagaatcaggaatttcttcaattgtaggagcacctccttctggtccccatgaatatttcttcatcaacagcacgtcaatgagttcatgaaaattaggtcccgtttcaagaggatattgcacgggaactaccttagagccataaatactacgcaactgttcgagtacattgtcatagtcacatttctcgttatcaagctgattaaccaaaaagataactggtttgcctagtttttctgtataacggaagtggttctgagtgcctacttcgggaccgtattgtccattcagtagcaaaatagcagtatcggttacattaagcgcggttatggcagcccctacgaagtcatcactgcccggacagtcaattatatttagtttttttccattccactctacatgataaacggtagagaacactgaataaccatattcttgctctaccggaaaataatcactaaccgtgtttttggcagtaattctgccacgacgttttataataccactctcaaagagcaaagactctgtgagggtggttttacctgagccatcattgccaagaagtgcaatgtttttaatttcgttagtctgatatactttcatgatatctaaggtttaattattaacaaacggatatgtgtttcatatctcctaaaaatgtggagcgcaaattagaaaataaagagaaaaaaaacaacttaaaggatagtgttactaaactatgttttacgacagatattctatattagcattatttttttgtaactttgccacaaaataagttatcatggcaggcatctacctacatatacccttctgcaaaaagcgttgcatttactgtgattttttctctactacttgtaaagaacagaaaacagcatacatccgtgcattgtgccacgaactaactgaccggaaagactatctgaaaggagaacccatagaaacgatatatctaggtggcggtactccctcacaattggctaaagaggatttcgaagctattttctcccatatttataaggtgtataaagtaacccccaatgccgaaattactttagaagctaatcccgatgacttaacatcggagtatatctctatgctacgcacctttcctttcaaccggataagtatgggaattcaaactttccaagaaacgactttaaaacaactccaacgacgacacaccgccgaccaagccattcgtgccttccaaggctgccgcacggcaggttttcaaaatatcagtattgacctgatgtatgggctgcccggcgaaacgctcacctcatggaaaaaagatttaaaacaagccctttccttacatccggaacatatttccgcttatcatcttatttatgaggaaggaactcccctgtggaaactccgcgaacaacataaagtagaagaagcagacgaggacttaagcgtttccctgttcggtacactaatcgacgagctcactactgccggatacgagcattatgaaatatccaatttctgcttgccaggtcttcattcccggcacaattccagttactggacagaaaagcaatatttaggttgcggtccttccgcacattcttataatggcatttcacgccaatggaatgtagcttcactagataaatatatagaggggatctcaagcggaaatcccacattcgaagt

SEQ ID NO: 14507 - DNA, 8997 bp, Unknown
  gut microbiota DNA sequence
tttgccaggtcttcattcccggcacaattccagttactggacagaaaagcaatatttaggttgcggtccttccgcacattcctataatggcatttcacgccaatggaatgtagcttcactagataaatatatagaggggatctcaagcggaaatcccacattcgaagtagaagaacttgacctatatacccgttacaatgattttgtcattacccacatacgtacacaatggggaatgccactgcccaaactcgggaaacaatacggagaagaactgtacaaatactgcctacgtatggccactccacatttacaacaaggaacactggaaataaaaaacgatacgctaaaactgacccgtaaaggcgtttttatatcagacgggatcatgagcgacatgctttgggtggagtaactaatacttcagcgaatattcacatatgctattttaaaagcatcccccaaaaataaatgaataattttataaaatacgatagggagattttcaagtttccctgtctttacttatataaaccaataaactaaaaagatatgaaaacaagtacgcgcatagttcttccattcttccatgcattaatggaagcttatgcttacaatagcgaaaacgattctgaagaacacaggaaaacggaacaaaagagttccgaatgcaaccataacacaaatcaaattttggaaactctttctccgaatattacaaggaggattacagaccctgaataaaggcatataaattattgaataataaaagaaaactaaaaactaaatgattttttcaacttgcaatcaatacagtatcaaggggattttcttgatactgttactaatgatttccactacattcatacaggctcaaaaagcagatctttctttcagcattcactttaaaaaagcgaatctgaaagaattcatatttgaaatagaaaaagcctccggctactcttttatttatggagaggaaatcatctttaaacatcctataaccctcagtctaagaaaagctccattaagcctgattttacagaaagcctttgcaggacagaatatcagtttcaaaataaacaaaaatcacattatattaaaaaaatacgctctacaatccagcaagaaatcttttaccctaaacgggtatgtattggacagtatatcgaaagaaacattgataggtgccaatatttatgatcagaaaaacggagtgggtaccactaccaatcctttcggatactttagcatcacattgcctgaggggggcactaaactaaacttttcatacataggctatgcagtaaaacaagtgtctttgcacctatggaaagatactatgctgaccatccaactccacaatgacaaccaactgaatgaggtcattatcttgtccgacaaacccgaaacgggtattcaaagcagtcgtatgggagcaagcagtattcctattccccacataaaaaacacaccggcattgatgagtgaggcagacgtactaaaatccatccaactactgcccggtgtacaaaacggaatgaacggaaccagtgggttatatgtacgcggaggaggtccggaccaaaatctttatttattagacggtgtacctttatataatgtagatcatacactgggcctgttatcggtcttcactccggaagccgtgaaaaaagtcgatttatacaaaagtagctttccggcacgattcggcggacgtctttcatctattgtcgatgtccgtaccaatgacggaaacatgcagcactatcatggaagcttgactatcggtcttctcacttcacatctgcaatttgaaggacctatatggaaagatcatacttccttcattatctcagcacgacgcagttatattgactgtttcctcccactagttatgccaaaggacgaacggggcggttatagtttgtatgacatcaacgccaagctaaatcatcgctttagtgaacaagatcgccttttcatctctttctataaaggaaaagaccacgtctactataaatacaaagatgaagataagttcaagcaaactcacaattggggaaacatattactgaacacacgctggaatcatgttttcaccccccaactattcagtaatactacgctggcatacaatcgttatgtttttgatatcagacaagaggaaacttccagcatacaacaacctgatggttccacaatcatcaatggttccaacaatctgtttcactccggcatcagtgatcttagcattagtacggattttgattatcatccgttaccggcacacaacatcaaatttggagcgaaatacatatatcatcagttcgctccggaagtgcagaccgtaaatcaacacaattccgacaatggatatccacaaactaacgacaattatagtttgaacaattctcatatccatgctcatgacttttccttgtatgccgaagatgatcttattctgaacgaacattggaaaataaatgccggattgcacttttcattttttaatgtacaaaaacagacttatctttctttgcaaccccgtctttccataagtttccaagcgacctcaaatatcatcttaaaaagttctttttcacagatgagccagtgtacccaattattatctactgcatcactggccatgccttccgacctttgggtgcccgtcacacgccacatccgccccatgaaatcttttcaatatgctgtaggagtatactataccggtatcaagaattgggaattttccatagaaggatactataaagatatgtataatgtattagaatataaagacggagaaagttttctaggttcttcccataactgggaagacaaagtagaaatgggcaaaggacgttcattcggagtggagtttatggcacaaaaaactgcagggctccttactggatggattaattacaccctatccaaatccgaccggcaattcagtacggacgggatcaataatggtaaacatttcccttaccaatatgaccgccgacataccttgaatctcactctaaattatcaattgacacgacggatcgacttcaatatgtcatggacttatgcatcaggttgcatggcaacacttcctacagagaagacacatacagaactaccacctaccaatgtaccaccttcctggattatggataatttgaacaaaggagatatggatcattctagttcacgaaataactacagattgcctgcaagccaccaattgaatataggattcaacttccataaacagacccggcacggagaacggatatggaatatcagtatcctaaatgcctacaatgccatgaaccccaactttgtctatatcagcagggaagcacaaacaggaaagcctatattgaaaaaaatgacaatcttgccatgtatcccttcattttcatacacttataaattttaaaatccaatgaaaaaataccttttatttctttgtgtatttgttattttaggcgcatgtaccaataccattggctatttacccgatgatgaacctaaaaaactgatcgtaaatgccatgatgcaaactgaaaataacgataaccggatttatctgcattacacaggatggacagctaccactcctgtcaccgatggtatcatacacctgtatatcaatggaaaactgtcagaaacaatcactgcggaagatgattactacccagtaaaaagcatattccgaacaggagataaagtgaaaatagaggcttcttcagaaaatggtaaatataaagcaaaagcggaaacacgcatcagtgcacccttacagattataaatgtagatacaacctatataagtttaagagattataacagctgggtaggaggcaagcctgtatatgacaattatcttcggcttaacattcaattaaaacaacccgatatagaggcagagaatacatactatcgtcttgaaataaaacagattttttattctcataaatggcatgacggcagggacactctcagtattgacacgacttataactataattatatttatgacaccgccttgacagacggcaaacccggacatgctatagatgaaggattcgagcttattcagaaatggaacaattattttggcctttttaaaagctgttattttaaaaacagggaatataacatgacgatagatttaaaagaagacatcaactatatacatatagattctcagaaagcagagcgatatatcagtatccggttttacagtatttcagaaagcgaacatagatatttgtatgccatgtcctctgcattagattttgatgccgaaaattttatttatgcagttccccttattcccaataatataaaaggaggaataggtatattcagtattgccaaccaagtaaaatacaaattgaaagaagaaaattgccaagacagatactaagaagaaggcttcagttcctctcatacaataaatcaaaactaaaagttctaaaatgaatagcacatctatttacattttagtagctttgcatccaattataacattaacaaacatgcccaacacggcaatggaggcaactgaactactcaaagaaatacagaagcatgattcccaacaggctttccggtctttatacgatatgtattatgaccgtttctttcgtatcgccttttattaccttcaacgggatgaatgggctcaagaagtaattttagatgtttttaccacgctttggaatcatcgaaaaagtcagcttattcccgatgattttaataagtacagctatatattaataagaaatgccgctctgaactatttggaaaaagaacaaaggagggaagcctcgcctctggaaaatatgccggaaatatcttcttccaacctttctcctgaagaacaaatgatgaatgaagagttatttaacatttatgagaactcactgaatgaattacctgaacgttgccgaacaatctttattaaagtccgcgaagaaaaacaaagttatgcttccgttgccgaagaacttaatataagccctaaaacagtagatgcccagttacaaaaagctgtaacccgactcaaagaaaaaattaacaattattttagaaatagacgatagggagttttccagattctcctgtctttatcaatagaaactaataaactaaaaagacatgagaacaaatacacgtttagtattaccatttttttatgccctgcttataagtgcatgtagtaacaacgacaactatcccaaagagtatataggctttgaaaaacaattcatatcacacacctatgatacaaagaacgaggaagaaacccttactttaaaaataatagctgccgaaaaacaagacacagaccgtaaactgaccattagcagttctacaagtaacaatagcttccacattcaaaatgcccatccggtcatcttgaaaggaaagaaatcagtaaaaatagatatcattctttatcctaaacaaataaaaagcgtacaacgtatcatacggttgatctgtactcctgacggaaaagacgcaaaaatttctgaaatttctatccgtctgcaaaagaagtagtatctttgtcctgcaaataaaataacatgaattcaccgaaatcagacaaagaactggacgaatggttggaattattatcttcttccactcattcaccgcagggaaaattctcggcggagaaaagttataatatattgcaacaacgtcttcaaccggcataccgcaagcacaaaatactttccattcggtatacagttgctgtggctgccggtttcgtcctgcttataggtttcggttggatgttttatttttaccaacgtccggtacgtacactgattgtttccaccaatatacaaactcaatgcatccaattaccggatggctctaaagtaaccctaaaccgacattcccaattgagctatccggaaactttcaacaaggaacgaatcgtaaagctgaatggagaagcttattttgaagtcagtaaaaatcctaaaaaaccatttcgtgtcaaagcaaatggagttaccatcagggtattaggcacgcattttaatgtcaatgcctatgccgccgattctttagtagaaacaaccctgctggaaggtagtgtatccgtcagtaacaatgccaacggtaaacaaatgatattaaagcccaatgaaacagccatttatcgtaaatcgactggaatattgtctatgcacattaatgcaaatgcacagaacgaaataagttggcgtgaaggtgttctttcttttaatgacatatctatgggagaaatcgctcgtcaactatcccatcattttaatgtcaccatacagataaaaagcgaacagttacgtaattataaattaaatgcacgtttcaagcaaaacgaaacgttggaagaaattctagaaatgttggctcccatcgtaggttttacttatcacatgccccaatccaatcttattgaactaaagcaagaaaactaaaaaacaaatgatttcttcactttataagaaacacagtatcacttttttttacttaatgctgttactagtcttttcccattcattcatatcagcacaaactccggatatgccttttaatatttatctgaaacaggctagtttaaaggagtttacagctaaaatagaacaactgtcagagtattcttttatttatggcgaagaagttgtactcaaacatcccataactctcgatctgaaagaaaccccattaacaactattctacaaacagctttcattaaacaagacatcagtttcgagattaccaaacaccatatcatattgaaaaaaacaacgtcacttcctataaaacaacattttacactaaacggttatgtattggacgaaatatcgaaagaaacactgataggtgccaatatctatgaccagcaaaataaacaaggaacaatcacaaatccattcggattcttcagtatcacactgcccgaaggaaacactgaactgaatttttcctatataggttacggttcaaaacaaatagcattgtatttatgtaaagatacgctgctgactgtccaacttaaaaacgataatacattggaagaaatcgttgtcctttctgataaaatggaaacaggctttcaaagtagccgtatgggagcaaacaatatacctttgacacatattaaaaatacccctgctttactgagtgaggcagatgtattaaaatcaatccagcttctgcccggtatacaaggaggtataaccggtaccagtggcctgtatgtacgtggaggaagtcccgatcagaatctttatctgctagacggtgtacccttatataatgtggaccatacactaggtattctctccatctttaccccagaatcggtcaagaaagtcgatttgtataaaagcagttttcctgcccgttacggaggaagactgtcctccgtcattgatgtacgcactaacgatggagatatgaggaattatcacggcagtctgaccatcgggctgctgacttcccgaatgcactttgagggtcctctatggaaagaccggacatcatttattatttctgccagacgcagttatgccgatttaattatcaagcctttcatggataaagatacgaaaggaggttactacttatatgatatcaacacaaaactaaatcatcgattcagtgaccgtgaccgcctgtttttctccttttatcatggcaaagatcatgccagctttacaaatacttcttcttattactttgaagaagaaaaggagacagacacaagagagagacaagtcatggcttggggaagtacattaggggcattacgttggaaccacatagtcagtaatcgtctgttccataacatcaccctatcctataaccgtttccgattcaatataaaaaacaatttcacgtccgccaacaaacaccttgacagccaatattattccggtatagaagattggggattaacatctgacttcgactttcatccatccccctcccatttcatcaaattcggaggaaactatctctaccatacgttccgccccgaaacccaacatacatttgtgcactctccgaatgaacaagaacaacctgataaaacatacaccatcggaggaaatgaagcgacacactcacacgaaatttccctttatgtagaagatgatttcaaatggaacgaacaatggaaaacaaatataggcgcacatttctcactcttccaagtacaaaagcacacttatgcctccttggaacctcgcattaccgttagtttcaaaaccagtcccaaccttactttcaaggcggcctatacccacatgacacaatatgtacatttactttcttcatccaatctctctctccccactgatctatgggtaccggtcacacagaagatccgcccgatgcaagcatgccaattttctatcgggggttactatacaggtattcaaggatgggagttttctgtagaaggctatagcaaaatgacgaaaaacgtattggaatacaaagatggtaatactctagtcggtaattccattcattgggaagagaaagtagaaatgggcaaaggacgcaatttcggcatagaattcatgctggaaaagaaaactggacgtactaccggatggataaattatactttggctaaagccgaccgtatattcagtaaaggaaatgtaaatggagggaaacgttttccctataaatacgacagacgccactccgtgaacatcacgataaacaggcgcctcaacaaaaaagtatacatgagcgcttcttggatttacgcttcaggaaatactgccaccctgcccaaagagaaagcaaccatcattctccccgaaggaagctatggatggggacatatgggaaatacaggcaacggggttgtttttccctttgaatatagctcttctcgaaataactaccgtctgcccgccagtcatcagttgaatctaggattcaactttcacaaaaagacaaaa

SEQ ID NO: 14508 - DNA, 50765 bp, Unknown
  gut microbiota DNA sequence
attgaatatagctcttctcgaaataactaccgtctgcccgccagtcatcagttgaatctaggattcaactttcacaaaaagacaaaacatggagaacggatttggaacgtcagtattatgaatgcctataactctttgaatcccaatcatgtatttatagattattacacggatgagcaatcggaaggaaaaaagattcctgtgatacaaaaagtcactctccttcccttcttaccttcattctcatatacttataaattttaagcaataatgaaaaaagcacttttactcctttcatttgttcatttattggccgcctgtaccaatgatatagaaatattgcctaatgatgaatctcaaaagctcatcgtcaacgctctgataaacgcaaacaaaacgaacaatgctatctttttagctttatccggctatcacgaaccccaagtagtaaaaaatggaattattcacctttatatcaataatgtattatcggaaacaatttcggaatgtacctatcgtcctaacaatgattcaccgttagactatcaaaattatttttaccagataagcagccgttttaaaaccggtgatcaagtacgtatcgaagtagaaaccaaagacggaaaatataaagcgaatgcagaagcaacagtatatgagcccattgaaattatcaaagcggacaccattgaatctaatcattctctatcagagacttcggaaagcctttggatatatcaagcaacaaagtggaaaataaaattacaaactcccaccacaaaccattcccaatattaccgggtcaacataaaacaaacatatacttaccgccttactaaccgcaaaactttacaagactccactgctatctccacccaatgggaatgtagcggatattatgacactgcattaatggacggaaaacctggcactcccaacaactctgatcctatcattaatttcatccccactataaacaactattataatgtattcaatgatgcttactttaccaacaaccaatataccatgactttagacagttggtatagtttcctattagacaataaactatataaaattaaaaagataactggaaaagctatcatacaatattatgccatatccccggctgaatatcaatatttacgagccgccaatgcatatgccgaccatgacagtagcaacctgttggaaacacctgtcatctttcccaataacatcaaaggaggaataggtatttttgccatagaaaatccgacagaaacaagcattcctttaaaacccatcgaagattattagaaagctttgccactttcggatctctgttaaattatttatcttccaatgaaatctgaaaaggagaagccggtagtccggttctatttttcaaattcgcatgaaccggattatcatcccaaccataacgtaccgttacaggatgagggatatctttatgccataccgccacctgattcccattaacgacaactgcttccgcccactgaaaatgcccatcggcaccggctatcgcaaatcccttcaattcatctaccgcccataatttatcagtcccggcttcgaaagaaagaacagcctttccttcatgattgacagtcatacccgtacacataggcccactgtgcacactctttttatcaccatacacccttcttttcaccaacagggagatacgtcttgccagttcttttttgtttaatggatgaatgtcgttccactcgcccaaatcaatcgccaccgccaaagctgcattcgggactttcaacgccactcgccgttgcgcttcacgcaaagccgcccaattactttctaccgggtgtggatgtgtctgcatgaaattggccaactgtacaatgaagaaaggcagttctttatcggccagtttctcacgccaatcggcaatcatggcagtcagcaattcctcatattcattaggacggcccgtattcgtttctccctgataccacaacgcaccggtaaagaccaaattacgcagaggggaaatcatggagttatacataccagtaggaatattctgaaaagagacactgttagtgcgtgcaggcatctcacaacctaattgatatttccatcggctagacaaatggactgtatctgtcccccataccagacaatagggcttatcgggcacaaagctggcggcgcctccgtaattaatcagccggacagtcaccagattctcaccgggtttcaataaagaagccggcacccgataaatacgtggcggatactgatagaaagtgttacctacgaaggtaccgtttacaaataccgaatcggcatccaccatgcatcccaaacgcaggacagcatcttttccggcttgttccgctgatacattcactttctgacggaaccaatgagagccactcaccggatatccattcttcctgccccattctttggaaaacgtatctaccgtctgccagtccgtatcatccagttccggacgattccagcatatcccgtcatgaagtccttggtctcctttgtacaaagcagcatcccaaaaacggttcatcatctgtcccgaacggttgcacaactcacgatactcgtccgaattaaacaaatcacgctcgtgcaactgacgcggaaacttctgcaaggcctcctcactcatccaagcctcaacggagcttcccccccaactagagttaacaatgcccacaggtacttgggtttccctatacatctccttggcaaaaaaataagccaaagcagaaaaggaaggagcggtttcttcagtcagcgacatccagtccgttcccggcaaatcgtctttaggtccatgcaaatcattgcctaaaggaatcttcacataccgtatcatcggattctcatcccttgctatttcctcggcaaatttatcagtcacccgtccgacggtcaattccatgttggactgtccggaacaaagccagacatcacccactagaatatttttcaaccgaatatcattcacgatcatttcaaaagggccacctgccttcatgggaggcagttccaccagccactttccatcttccccggctaccgtactgaatttcttctttttaaaaacaacggtcacactctctcctttatcggcatttccccatattttaacggaccgctcacgttgcaacaccataccgtccgataggatggcaggcaatttcacctttgcttcggtccatacggaaaacgcacaaaaagctgacatcactaaagctaacttatatttcatgtttcttctaaagctaagtaccgtattttatttattaaacccactctcaggacattcatagttcgagatttccaaccggaagcgtttcatgtcctccaactcgtgtaccggacgttctatgccagccggaataggcatccctgagaaagtctggaaataaagcagacaggcatctttccaccacacggcgtcacgcatctggattttcaatttcgactgcacttccctgaaccggcgtgcatctacaaaaggttccacactgtcccatatttcctgaaaaccacgtacctgtcgtacacctctatcgtatgcatggcacaactccccccaaagcgtacgtccgcttctcatccgatactgccagggcacatgatggaaccaaagcaaataaacttcagggcaagttgtcttgtcattgtaaatcagacgaagtgaatcaggatactgagaaacggcattactccctttgctgctacggtcgaaaccgattccctctttgtccgccctatgataataagagggtagccaatccggacgggcaccgcgtacactgcaccacggttcgggaccatagtggtggccccatgcaaactgatgatgcagtcctaatggcatcatatagtctaccaccgcctcccggctctgcaacatcatcgccttgaccgggcagacaaatgccgactgggaagtaaatgtctgctgcaaccactcatcggcaatcctgtctgaagtcaacaacggattccatgccaaacgcccgaaagcataccagttggcctgcgcaaaatggtgtccgcaccaattcgcatccgtaccgatgtttgccacacccgccgcagcttttaacctgtccggacgtacctcgccaaagaactcctcccataaaggagccaaataggccagatgattggaaaagcctaaatactcctgagtaatttgaaactccaccatcatgggagtctgcttcatagccgtgaacaaaggactataaggttcacgaggctggaaatcaatcggtccgttctttatctgtacaattacattctcgcgaaactgtccatccaaaggcataaactccaaataagcctgcttggcacggtcactgtcggtaggactataaacaaacgccctccacatcacgattcctccgtagggtttcaacgcatccgccagcatattcgctccctcggcatgagtacgtccaaaatcacatggtcccggttgcccctccgaattggccttcaccaaaaaaccgccaaagtcggggatcatcgcatagatctcttttactttttgtttccaccatccaatgacttccttgtccaacggatctgccgtatccaacttgcccaaccggataggagatgcaaaattaaccgataaatagacctttatgccataaggccggaagacatcagccaatgctttcactttctccaaactaccagttgtcagcacttgaggtgaggcattgacattatttagtaccgttccattaatacccacagaagcattggcacgggcgtatgcctcataacgtggcgacaaagttccgggaagttcctcccaattccacaaagaacgaccagcgtaaccacgctccaccgtaccatccggattatcccaatgattcagaatacgcaagtcatacgcaggctgttcagtaaccgacagaggtacagtgagctgccccgccgcctgcatacgcagcagactataagcgccataaagcaatccagtttcggtggatgaaagaatacgaacctgatgttctgaagaagtgatggcaaacccatccccacgccctgttttctttttctctaaaagtacaggatctcccttccaagcgtttttcaattcagcaatggcaatggctatggtgggtgacacttttcctttataagtaatttccacctccgcgccttccaccggacgtatcaccggtagccacaagcggctaccatcttcttccaccgggcgaacatggtccggccgtgtacctgcatgcaacattcctgctgccaaccatccgcacattattcctatacaaactgtcaatctcatatttttcattgttcattcagcttatttctccggcaaggagattcgttcataaacagataactatcctcataaccgccataatccaccactatcttttcaaatacgatggcaggctccaccggttttagaaccaatgtataggttccgtccgcacagtcgggcaggctcaacttcacccgggtcttcactacccgacgggccactgtgggatacagtacacgatatacattatccggatgttcgttcaactccgcattgaaacagacagtctgctcctccgctccttcaaaacctaccgtgtagcgatgaccttcccgtctgaggaagggcagtgtggatttcacaatgacatacacatttactgtatctactttttgcggtattttcattttataagagagcgaagccccctccgcagactgtgtataaggcatcaaagccactccgctcagcgtacgtcccatgtgcggtatgactgtccaggcggtcttcggtgcaacggatgatgtaaagtaatgctccgcctccatagaaaccacccctttgtcaccggtaaacaaatatcctcctacagccccttccggttgttctatccggtagacttccggtaaacggtcggccgggaaatcatcattccacgaagtatagcctatatgtttctgcgtcatcatcccattccacttgcctcccgacatttcttcgttgtattccctgcacaattccgcatcacgccggaatgcctgctccactttgtcggcccactcattcgcctgcggattattctccttgtataatttgtgattcatggcttgtgcataatacatttcatacagattggccatcgcctgcacaggaaaaagaatcagttgtcggtaggcatctctgtaagcggtatccagtttcaaatactgccgcaaggcttccgcctccagcttcacatattcatcagccacctgcctccattcccccgaagccaagtgataagtatccttatccagcatctcgggagtcacgcgtccattgtacttgcaatacaggttcaaaatacgcatggcctcatccgcctgttcctcaccgaactgctgcgcacagaacactcgtgtatgctccaacagatcccctgccgcatagcgttccggattccaagccatattcataaaaagagtgataggatactccatcggcttcaaatcccccacattcaatatccaaagcttatccaccccataactgtaagtcaactgaagctgctcccacatattttgtacgggagttacatttaaccatttggaattacggggggcccccacatagtccacatgataatacatcccccagccaccggcacgtttccgttcttttgcatccggcaatcggcgcacatccccccaattgtcatcactcagcaacataatcacatcatcaggcacacggagtcccatatcataatagcgttgcacctctttataaatagcccatacctgcggacgtttctccggcacttttcccgtcacttccttaataatacgacgctggttccggaatatcttctccatcaggcacatgttttcctcatcacgcggcacatatttgtcatcttccccctcctttccacccatcggagtatcaccgtcacctctcataccaatggtaatcaaatcttccgtaccggcggcacgctccataccttcacggaaaaaacggtcaatcacttgctggttggaagcatagtcccatgccccatattcgctgcgctttctcacccattcctgatgattgcgtgccataggttcatggtgtgaggttcccattataatccccatctcatgagcggtcttgctgttctccggatcatccgcataaaaactccaaccccacatggcaggccacataaagttaccacgcagacgcaaaatcagttcgaacacacgagcataaaaacgatgatcaccataattcgtgccataagtgtgcttcacccatccggtcaggcaaggagcctcgtcattcaaaaagataccccgatacttcaccgccggttctcccgccgtataacttccacgcgtcatcgaaagattctgccgggacatcaccggcacatccgcccagtcgtaccacggcgaaacaccaatctgctccgaaagctcataaatcccataaatcgttccgcgtttgtcacttcccgcaatgacgagcgcctcatccactccgttcaagggagcagacaccacggtcatcaggtatttctcattcttgccctccagcaacgaagcatctatctttttcgcttttaccaattctctgatatagcggcttttcaacgtacctaccataatcatgcgctttacgtcgggagtatagcataacccggcagcccggccacttacccgtttaaagtcattctgaagattccttactgctatcatcacaccagcatcctcctgctcgtccaccaatatttcattggccactccgttttccatcagagtgaaacggtcgggagccagctggtcaaaagtaatccctttatgatctatagctcctacattcaggcacaaggtggagaacaagaatatccccacacattttttcagtttcattctattcactttttagttaccgtattcaaaataatctatatccacatatcctcccaaatctttagtagcataattaaaaatagcaaacttgcttcccataaagaatttggtataatcaaaaaccattttacaaggttctcctattcgtttccacgttttcttgtcataactgtaataaaaagtggcttcatcttttttatctgcaaaatcgccctccatacgaagatagaccacctctttctcacaatccatgcgttccttctccagtacttccacagcagtcacccttttttcccggtccgaaagactgacagactgatgtgacatcacccactgctttttcccgttctccatgaccacagccagtaccccggacaacccattgaaagcgcagaagcccgcaacatctccttctttcatcttcgagatatccatagctaccacaccgctgcacttcggtccgctcatacgctgagtcaaggtattgggagccagaaacagattgtccaccacctttccggtcctcaaccgcaggaaacccggacgctccgtcagtgaccagcaatcgtccaacggattgtggttccactgccagttcaaactcaactgatcggtgtcgaaaccatcacttcccatgatacttcctttacactcctctccgtaaacaggcatctccatacattcgggcacacgtccgtccgcatcacccagtatcggccaaccgtcttcccagcggcagggcatcaatgtgggtacacgccctataccgcctctatcctgaaaaataaagccataccagtttccgtcaggagtatcgactatacagccttgtcccacgccaccatatccttgaaattcagtttctaaaatcacctttttctcatacggaccggttatctggtcggcacggtagcacacctcacgacgcaaccgtccgggaatgctccaatccatggaaatcatcatcacataatatctgccgttatgcttgaatgcctgacttccttccagaagtccctgctcgtcggcgtcccgctcgaatatcttttggtctatacctcccggttccacatcgctcaggtcgctcttgagctgacgaagttgcccggtgccataaaacagatagactttgccgtcgtcatcaaaaaacaaagaagcatcatgatgatgaggcggacgggaaagtaatgtccattcgcccgccggatcttcggcggtatagatataaccacgatggggttcatcattgggtgagaaccatacatagaaccgtccgtcatgatagcggaggctggaagcccattgtccgcgaccatataccgtgccttctttcaaatcataacggggcaagtcagtaagccgttgaaacacataactgatcgtttcccaatgcaccaagtcttttgaacgcatcaccggacaacccggcatcaggtgcatagtggtgcttaccagatagtaatagtttcccacccttatcatggaagggtcaggtacatccgcctcaatcaccggattatggaacattccccgttgttgtgcaaacgcccccgacaaaccaatgaagcaggtaataataatgatgatcttcttcatttctttttctactttctattttttaactatagccagtttcacaatcggattctgcgcctacaacactccggcaagcaacagggacaagccactcatcatacatttccggataccggataaatcacattcaagtttcatattcatggtattaaattcacaaggttgtttttattttccgttcttcacggctcaacaagagcaaagataaagacatccgctttattttcgggcggaactatgttacatagtccttttcccatgttacaaactcaccctattatggcgggaagtatagaaattacctcttttttattaggctatatatatttttttgaattatttttgtgcgcctgaatcaatctgagatattatattatgatgaaacatacgcttcttacactattcatgttcctgtctttattatgtcacggacaatcatataaattcttcacaacagacagggaactgtccagcagtctgatcaacaagatatatcaggaccggaacggtatgatctggatcgccaccgaagacggactgaaccgctacgacggagccaaattcgtcatctacaagcatgatccggaaaacgagcactctctctgccacaactacgtacgcgccctgtatgaagacagcaagggacgattgttcgtaggaacctataatggaatacagttatacgatcccgccaccgacagcttcagcacacaggcgcaatgggaagacggaaagacttttgacagcaatatcatgtccattctggagtgtaggaatggagaaatatgggtatcgggaaacaacttgtgtaccataaccatcacacaggggaaactgactgcacacaaactggatttacctatccccacccaaatgacagactacatgatagaggacagacaacacaatctttgggtaacacagggtgagaatggtatctaccgcctctctgcggacaataaaagcaagcactttctgaaacaagagaagggaatgaccattgtggacctctatgaagacaactacggagacatctacctggcaaccataggcaaaggattgctgaaatataaccaaccggcagaagagttcattcctatcctttataaaggaaaacaaaacctgcctatcaaatccatctgccagataagccagaacgagctttgtctgggcacggacgggaaaggcgccaagattttcaacatccccaaacagctcatcacggattacccttttgataataattacctcgactccggtacctccaaagtacactccgtcctgaaagacaatgcaggaaacctatggatagccatttaccagaaaggggttatgatgattcccgcacagcccaacagtttcaagtacataggctacaaatcaataaacaagaatatcatcggctccaactgtatcacctcactctgccgcgaccacgaaggcatattatggataggtactgacaacgacggcatatacggtatcaccacagaactgaagcaaagagtccattatgccccacatgacagcccttcttcggttccttccaccgttttcggcctgtatgaagactctgaacgtaatctgtggttcggatcctataccaacggactaggcagactggataagaaaacaggacagtgcagctatctgcagaatctgacagacaagcatggaaaccgtatccaacgcgtgtatgatctggttgaagaccaggacaaacgactctggatagccaccatgggagccggacttttctattatgacttgaagacaggacagtctgtatatgatcctaaattcaatgctgccaccgaaaaatataaatggataagctgtcttctgtatgccggtgacaaccacctttatgtaggaacgtatgacggaataagatgtatagacctgagcaccgacgacttcaagactgaggaaatcctgtccagacacatcatccactccctttatgaagacccccaaggcaacatctggataggcagttccgacggactggcggaatggaatccccaaacccggcaactaaagacctacaccaccgcccacggactatccagtaacgccgtatatgccatcaaaggagacgggcaggacaacttatggataagcaccaatgccggaatgtcacgttttaatctgaatacccacacgttcagcaatttctatgcagacgacggcctgcaaggaaatgaattcagcaaaaacgcctcttttgccgaccacaacggcatactctggtttggaggtacaaatggaattacctatttcaatcctcaagagattacgaatcccgcaaaaaaatggaacgtacgcatcatcgacttctatctgcacgaccagcccataaggaaaggaatgttgtcgggcggaaaagaaatcataaacacctccgtctttgaggcccgggatttccacttgtcacataacgacaacgctttcagcatcgagttctctacccgcgaactaaataattccgaacgtatcacgtatctatataccataaacaacaccccctgggtcaagcttcccaaaggagtcaaccgagtgtcattcagcgaccttccccccggcgattatcatttccggatcaaagccgaagattatctgctggaatctgacaccgatgaaatcaccattcacatcgcaccggcatggtgggcatcgggctgggccatgctgatctatgccttattggcagtagcagccgtctatggcatcatcctgcaagtgagacaccgttaccgcataaggcaggaaatgatgcaacatatccatgctgaacagataaacgaagccaagctacagtttttcatcaacatctcccacgagatacgtactccgatgtcgctcatcatcagtcctttgcaaaaactgatgacaaacgatacagaccacgaacggcaaaagaactaccgcatcatctggcgcaattccgaaagaatccttcggcttgtaaaccaattgatggatatacgcaagatagacaaagggcagatgtcactcgttttccgtgaaaccgaaatgaccggattcattaatgatttgtgtgaaacctttacagaacaagcgaacaaaaaacaaattactttgcagttccaccacgagggcgccgaccacttaaagttgtgggtggacccggtgaacttcgacaaaattatcctgaacatcctgtccaatgccttcaaattcacccccgaaggaggcagtgtggacatacggctacgcaccggtaaggactccaccctgccgaaaccattacaacagtatgccgaaattaccgtgaccgacagcggaataggaatcgcccccaaagaaacagaacacatattcgaacgcttttaccagatacggaatagccaaaacaactcaaacataggtaccggtatcgggctgcacctcacccgctcactggtggaacttcatcacggagacatccgtgtagaaaataatccggacggacaaccgggatgcagctttatcatccgtatgcctctgggatgcgcccatctgcgcaaagaagaaatggaagccgacaaagctcctctcttccacactccggctccggtccttcctgttccttatgaaaccgaggaagaagaaaacggaaaaacacgaaccaaaacgaaatacaaagtactggtggtagaagacgatgaagatatacgccgctatatctgccgtgaactggcaagcgattaccataccctggaaagctgcaacggcaaggaggcactggaaagcatcttcaataaaaccccggacctggtaataagtgatgtcatgatgcccgaaatggacggacttaccttatgccgcaaaataaagcaaaatgtgaacctgaaccacatcccggtaatactgctcaccgccaagacacgggaggaagacaatctggaaggtctggaaacaggagccgacgcctacatgaccaaacctttccatatggagatattgaggaaaacggccgccaacctgatccgcagtcgtgaacggctacgcaatacctataccggacaacagacccaaggggataaggtacaaccaatagaagtacagtcccccgatgacaaactgatggaacgaatcatgcgggtcatcaacgaaaacctgagcaacccgaaccttaccgtggagatgattaccaccgaggtaggcatcagccgcgtgcacttgcaccgtaaactgaaagaactgaccaaccagaccacacgggattttatccggaacatccgactgaaacaagcggcagaactgttgtcgaagaaacggtacaccatagccgaagtggcggacttgaccggattcaccaatcccaacaatttctcgaccgctttcaaggatctgtacggaatgcctcccagcatatacatggaacaacatttgaaacaggataagaataaggaagagaactgaaaataatttccggttctcttttccaccaagtacagacccagtttccgccgaatgcaaactttgcggatacaatggtatgaacaaatacacttttcctacaaaacactcttacatatacctatttcacgaacctttcttcagtccattcagccggcataactcactattacacaatgcataaggctgacagtagtcctttcagtctgctatcagtcctttcagccgatggaaaaatatttcccaagctctttctttacttcaaaacatatccgacaggaacagacagaccccatatccaccaatcgcaaactacaagcagcaacaagctgtacaagtatcctttaccagcctgatgaataccctaattcctcttgataaatttatcgtttcactgaggtgatgaaattgcatcaccttagtaaagaatcctcatcacttaagtgataaaacttacccacctaagtgaaacagtaaatttattagaaggaagccacatactcatcaaactgaaaacatatattctatgggaagatgataacctacccagcagtccataccataaaaagaccgccgcttcttccatcagaaacagaaagaaacggcgggtactcttaaaaaacaaaaaatcaatctctgtatcccggattctgataagcgtctttttcctcctctgtcatttccatgccatccaactgtccttgtgggataggacggagataatggaacgcttcgatggtacggctgtaagtctgcggattgtgatcacccttgcctccacaaatcacgtaactgtcagcatattcgttccatttctgagtacgaaccaagtcgaaccaacgataaccttcgccatagaactcgcggctgcgttcatccagaatatagttgatgtcaatggttgccggagtggcggctgtcatttcagcactgaaatcacgatccacttccttgtactcggcattgctgtaagtccagcgaccggcacgggcacgaagcacgttcaccaggtcacgggcagacttgccggcttgtgtggcagctccttctacggcagcttcggcagcaaccagataaagttcggagaatttggcgatgttatacggacgggtacttcccgcattgggctgtcctgctccggagccgttgtctgtacgatacgggccgagtttccaaagaccgggatatacatagcggcctaccgcatccagtcccaatacccagtcggcacgaccgggcaacgtacctgctcccagattgcttttagaaccttctcctgcatagtctatcttatccatatcctggaatacgaaagagaatataggttcacgttctttcactttcattccgttggcattggtcaccgattcccagttctgtccggctgtagaccagttgccgcgataaacagtagtaaaagtaccgtcgtaacgggagtcgttcaccttgtcggcaaacgtcttggtaaacacacccaacggaggagccatacgggtccaagggcggccataacattgctcggcaatacggttgatgacagcctgattatcagccgaacgcgcgtcggtatagttccagttcatcatccatccggcaaagttatcgggagcaccaccgccaccgtagctcaggctgccaccattataatactcgtcttcctgcgtatggtctgcatagagcaggatttccatgttacggtcattgggtccggcattcaccatccagaagctttcctgcaagccgaaaggaccggggttctcgatagcagtaaccgccacatcgtatgcctgctggaagtaccatgccgcatcgtgtccgtcggggtccgtacgctggcactcgggataagtaggaatgttattcggattcttcagccaccaggcataagccaggtaagcctttgccaagtacaggcgggcaacggtcttggtcactccacccgtcacacgaggattagcgggcaagttctcgatagcggtcagcaagtcggggaagatggccttggtgtacacttcgggcacggtattgcgcacggaggtacgtgaaggagtgatattgaacttcagttcgccggaacctaggtccagaggcactccgccgaaggtctgcaccaacaggaaataatcgaacgcacggaagaagcgggcttcggaaaccaatgattcattgactcctacttcggcaccgttctctatcactccgttagcggtgttgatgttcgagaaagcggttccccacaaggcgtcggaacggcaagtcgtggcagtcaggttgcctactccggacaggtcggcatccttgaagttaccatcggcactccatccccaggttgcctcatcggttcccgtcagacaggaattataataataagcttgtccgtaaatatagcgcaagtgtgcatacatggaggtcacaccgccttccactcccttttctgtcttaaagaaagtaggatcataactgctgcgcggctgctcgtccagaatgtctgaacaggatgctgtcaggaacaaagccagtgcggctgttcccaaaactcttatttttgaaaatataggtttcatagtcatgctttcatttagaatgttaagttaataccgaataaatagttacgggtggacggtgagttagtacctactgtcaggaatcgtttctgaataccttctgtcacagctacattctcgttaccgtaagagttggtttcgggatccagtccggtttctttatggaaaggagaacagatgatgaacggattctgtacggacaggtaagcacgcaggctctgtacgcccatgcgggtcagccaagcctgcttctcgaagttgtagcccaacgtgatgttgcgcactttccagtaagaagagtcaaaataacccaatgtgcttccgtatttcggattgtcaccactctggataccacccggtttcgggtacttggcacccttgttctccggtgtccagtagtctacatccacttgtccgcgacgaccggtcagcatattcaggtaaccgttgctgtggtgcagcgtactgatcagcttgcctccgcaacggaaggcggtgataacgttcaagtcgaagcctttataggccacgcgagtgctgaaacctccttggaatttaggttccaagctgataatctgacggtcttcgggaccaatggcgcgagtcggcttgccgctggcatcacgatcaccggtatatttcactttgatcataccttcattgccacccggctccagaatgtccaagtattggaaatcgggatcatcactgttccataagcctactttttcatagtcgtagatacagtcgatgggatgtcctacaaaccagttgttcgctttatcatctttggagcccgaagccagttcggtcagtttgttacggttggcagacaggttgaggcttgcctcccatgtccatccgttatggttgtccagaatcgttccgttcaaggtaaattcaaaacctttgttttccgtctttcccacattagccatatagctgcttactcccgaagtggaaggaaggcttacgctttgcagtaagtcggtggttttctgaatgtaatactcaaatgtaccggacaggcgtcctctcagcaaggtgaagtccaggccgaagttccatgtagaagaatattcccaccccaattcggcattaggcagttcggatacatagtaaccggtgacatagccggtaggaccgaagttataaggacgggttgccaagcgtccccaggtcttgtaaggatcaacagcctggttggaggtctgtccgtaacctacacgcagtttcaggatatctatccagtccacctcgtccataaactcttcctgacgaatgttccatcctgccgatacggcgggataagtgtgccattggtgtccctttgccaaacgtgaagaagcgtcggcacgtacagtcgccatcaacatatagcgattgtcgtaagtgtacatcacacggcccatccaagacatcagaccgctcttctgatagttccagttgtcggggttcaccgtaatggtgccttccgcacgcccgatgttgtagaattggaaatattcggcaggaatatcccgtccggcaacgtccgaacgtgtatagacagtctgttcggcagagtacataccgacaacgttcagctggtgttttccgaaagtacggtcgtaagtcagcaggttctccacagtccagttggttgtttccgagtggttcagcgaagcggtagacggagtgtcggccgtagtgctgttgatgccttcgccggtgaacgatccacctttagtagaacgatagttcaaacccaggttgacacggtatttcaaaccttccacccacgggcatttcacttcggcaaacaggttgttgtacgtaccgaagccttcggtcttgctcagccaactgtcttccaattcttccacaacgcctctggtcaatacaaatgactcatcctgactgttgtatttcacggtacgtttcaatgtgccgtccgcattataggggttagcgataggagacatggcaagcacaccatacagtccgatattggaacctttggtgacgttatagttggtattgttcaccagtccgaagcggaaatattttcccacaccctgatcgaaagaaccacgcagagagtaacgggtatagttctgagtaggaatgacaccctgatccttatagtaagccgcgccaaagctgtagcctccaccgttggtaccaccggacacgctgacatcgtggctgtttacataaccgtctcggaacatcaagtcctgccagtcagtatccacatcgtccgactcgtccaccgaattctcgaacttgcctgccagtttacgcatttcggcaaacttgctgccgttcatcatgggatatttggagaatactttcttcatacctgcatacccattgtaagtaaaccgggcgggactaccctgtgcacctttgtgtgtagtgatcaggataacaccattggcaccgcgcgaaccgtagatagcagtagaggatgcatccttcaagatatccatgctcttgatatctccgggattgatatcggacaaattacccataaaggggattccgtctaatactaccaacgggtcgttactggcgttcaacgaacgggtaccacgaatacgaatctgcatggaagcgcccggtgcggaagaagtctgagccatatccacacctgccacgcggttctgcaaagcgtatgtaatattggtggcaggcatctcacgcagcttctctccgcctaccgatgcaatagatccggtcacgtcactcttgcgggcgctaccgtaaccaatcaccaccacttcttccaaagctttggaatcttccttcaatgtaatctttaaagaactctttcccgctaccgggatttcctcgttcttgtaaccgacaaaactcaccaccaacacggcgtttttcgatacattcaatgcaaagttaccatcaaaatcggtaatcgtaccgttggtagtgcctttttccaagacactggctccgataatggcttcaccacttgtgtcctttactacaccttttaccatcacgctctgtgcaaatgcccacagaggaatgagacagaacagaagcatcagccccaccggcctaaaattcatagcatttttcattaatacattaatttaagttatacaaaaaatcaaatagtcatttattttaaggtggcatacatgcctatcgttgttccggtaaagcctccggcagtggccgttgacagatacccggcgtccacgttcctgcacaacacgttccacacagcttcctggcgagcatagtagaaatcataatgtgttccgcgcgaaaccaccttcaggtcggtaagcactcctccgtcgtccaagcgaacggaagccagcatcttactttccccatcgcctatctgcctgagggaaatacattcaccttggtcatccctgcctacagccaggaaatattgatgcttttcgtccttgaacaacaatatgcccgcttgctccgccttgctctgcggacagaacaacatacgcgtgctgcattcgaacttatgatgctgcaaccggcggcatataaaagccggcaccttcttttcggaagcactgactgaatcacatttcaaagtgagataacccggagtctgggaaagcgagtaaagtccggtagcaggagcacgcaaagtcatccattccatacccaatgtttgtccgtcgaaaccgtcattcatttcaaagtttccgaaggtggcagattcgtcacgcttcactccttcgcggcggacaatgactggcaccagatcatccccctgcgtcatataggggaaaccatcctcactccacttgacgggcatcataaaagtctcacgtcctaaattctcgaacgtgttgtttatgggacggcaagccagaaagactgcccaccaatccccttcccgggtttgaaccaagtcggcatgtccggcgcacgtcaccggattgggacgctccgcatccagctgacgctgggtcagaatagggttgttcttccacggtatgaatttgcccgtcggagaatcaccacggaaaattacttccgaatgccatccggctgttccaccctcggcagacatcaggaagtagttcccgtttattttataaaggtgcggaccttcaatccagatgggcttgtcctccggacgagctcccttgttcaccagaatctttcgcggccccaccgtcttgtccgcattcacatcaaattcctgcacacggatggtacgatgtccactgtattcgggcttgttgtccggcgcgtcatcattattgacaaggtaggccttcccatcttcatcgaaaaagaaagagggatcaatgcctgtcacttcgggcaacataataggatcagaccattcgccaaaaggatcttgtgtcttcacaaagaagtttccggcccctacattggtagtaaccatataataagtcttgttatgcgggttgtaggatatggccggagcaaaaattcctccgcttacgtgttgcccctccatgttgactaattgagaaggacgattcaagatatgtcctacctgcttccagttcaccaagtctttgctgtggaaaagaggcacacccggataataagtaaaggtggaaacagccagaaaataatcgccttcgccattggtgcaaatgctgggatcggaataccatcccggcagaatgggattataaaaataatcatctcccggaagcggattggaaatatagacatcatcctcacctttataattaaagtaatcgaaaagagcgacagactttcctacaactggcaaatcatttcctttcttgatcgaactacatgaggtaaaggaggagcccaacacccctaaagcgatcagcacgcccgaccatcttttcagcttttgtttttgtttcattgtctttctagtattataattgaccaattcctttacggatttcagacgcaaatatagaaagtgtcgccgaatataaattctctgcatgatacacgcatctttcgtagagttacatcttgcttcaaacgtgttacatgaatctttatttgcgttacaatacatacataacatactatattacaacaaattataattacgccaccagatactgtaattgaagaacacggatataaaaagaccgtttgtaagtcccggacgacgaacggaatctctgcaaacggtctgtttggacaatacccggcaaagcaaccggtccaatctgtccggatgatgtatcactgatttatttttagacagattctatggtctttattttcccttccgcatcgtactccaattcgcacaccttcaggctgcgcaaccaagtggttccccccgaagggacacaatcgtggtgaaacagataccattttcctttgtattctacaatggcatgatgagtagtccaacctaccacaggctgcaaaataaccccttgataagtgaacggaccatacggattatctcctgtggcatagcaaagcagatgagtgtctcccgtagaataagaaaaataatatttcccgttatacttgtgcatccatgaagcctcgaaaaagcggcgcgcattgtcaccggcagtcaacggatgtccgtgttcatccagaataaccaaaggccgcggctcttcggcaaactgaagcatatcgtccgaaagtttcaccacacgtgaaggcaaagccggttcaccatcagccggaaaagccgcacactccaatgccttgttgttgcgataacgctgaagctgcccgccccataaaccgccgaaatacatataatagttcccattaccatcatcaaataccgccggatctatactgtagcttccacgcatgggatcgggctggggaatgaacggcccttcggggcaatcgctcaccgccacgccgatacggaagatgtcgttccggtctttcaatggaaaatacatataatagttcccgtttttacgagccacatcacaatcccacaactgacgcccggcccaagggatatccgaaactttcagtacgactccgtgatcggtcactgttccgttcatcacatcttctgtagaaaagacatgatagtcacacatgtcaaaatgatcaccattgtcattctcctccactccgctctcgcggtcatgagaaggataaatgtaaagctttccgtcaaaaacatgtacggcaggatctgccatatagtctccaggcaccaagtatctgaatttcttttccatatcgttacgttattaaatgttctgttttccaatcagttcttccacaaaaggtttcggccggcaatcacggtcgaacaataaaggataatccacacgtccgggcacagggaaattattcttccatgagtcaccgtccgtcaccccccacgccgtcacacgggtaatgatattcgaatgtttcaggaaaagaccgaaaaattccttcatccggttattccatgccacagacacagagtcgggcaaaccgtcgggatagggattcagggattgtttataagacaccgtgtccgaaatattggctcccatccgtgccgtgggcaatgcactcatatcccattcggttaccatcacctttactccggtagctgcaaatgccagtatactggcttcaaattcggacactgacggataatccattcccatgtgtccctgcatacctaccgcgtcgatgcgcagtccacggtctttcagcatctttaccaattcgactactttgtcacgcttagccttcccgtccatgccataatcattatagtaaagttcggcttccggatctgcctcatgagcatactgaaaaataagcgggatgtactcttcgcctaatatctcgtaaaaaggagatttacgccaggagccgtccgattcaatggcttcattcaacacatcccagccctttatacgccctttatagtgcgtcacaatagtctggatatgtttttttatacgctccttcaagatgtcggcacttactgtttttccttgttcgtccacacagaaccaaggtgccagctgtgaatgccagataaggcaatgcccgataacagccatatcgttctcctcgccaaaacgaaccaaccggtccgcttccgtaaaatcaaaatggtcttcctccggatgaatcacttcgcatttcatgcaattctcggccacaatagaattaaaatgacgttttaccactttcgaggcgcaagtatcctgacctgctgcctgacgtacattcaacgctacccccatcagaaacttgcccgaagctgcttccttcagcgaaggatccggctgcataccggccttccggtcattgccgcaagcggccattaatccggcaatggcagccaataatgttacatatcttattttcatattacaaagtttttaaggtaaataacttgttctttttcattaataaccggccttactgcgacggtcagcaagttccgcctgcatctgttcgttgtatttttttgtaataggatagaagcataaggcagctactcccattccaaatatcatagccggaatcagactggaggaaagtacaatcccccttatagccgtaccgctttgctctgccccgataccggacacatacccaaatcctgaaagcagaaaccccaagatggccccaccgatacccagcccggccttcaaggcaaaaactacaccagcaaacacaaagcctgtggcgcgacggtaatttttatattctgaatagtcggctacatccgcaatcatcgcccacaacaaaggtacagtcggcgcgtatgccaaactcttcaggaaattcagtacaaacatcgtttccacatccgcttttcccgggaaatagaacaaagctgtaaaaatggccgtaagtgagaggcaaacgataaaaacgcgtttcttaccataacgatttgccaaaaagccggacaagagaatcaccccaaagaactggacaagtgctcccaacatattaaacactccaaatcctacctcgtatgccttatcggaagaattgactaccagcccgaaagcattcaacacagcataccccgcgctgccatccgtttccattgccaccagtcccagacggtcaagaaaggcatacaatgctccggcatccacataattctcaaaataatagttcatggcactaccccacatggcaagcgtaataaaaatgaaaagcgtaagtatgaacatagcccgccaaggaacgcttccaaacacatcctttatatcctgacgcgtatctgtcttttgactggcaggcggctctatgcgctcacgagttgaaaagaaagtaatgaccagaaaaacgaacccgatacaagcgaacaaagagatggtacataaccaaccatgcgctttgtctccaccatccgaaaacttgcttaccaaagggagcgtaagtccctgcaccacaaactgggcaatggtagccgccacaaaacgaatggaagtgatactggtacgttcctttatatcaccggacatcactccgcccaaagaagcatacggcgtattgttaaaagaataaaggctcatcagcaaggtataagacagcgtagcatacaatgctaccagccctttatcttcaatgcccggattatagaaagccaacacatagaaaaccatgaaaggcaacgcagtccaaagcacccacggacgatattttccgaaacgtgtcttggtgcggtcactcaataaccccactgtaggatcgacaaaggcatccgtgatacgcgccaccaacatcaccgtaccggcaatggcaccttccagaccgaatatgtccgtataaaactttgtctgataaatcatcatcatctggaagaccagattagccgagcaatcccccaggctgtaaccgattttctcggccatcgaaactttttgactttgtgtattcatggttattacattaaaatatcttccataaaaagtaattccatccattggctggaattactttatgcctattgaaaacaaaaatgagctaaacaaaatgttgtccctgctccaatctttagaatcttattccagacgaaacaaaagtacacaaagctttatgattcctgtaatcacaatgatacacgcatctttacaggcagaacagacgtgctccgcctgtaacatttttctttgatgatgttacatccaggcctatttaccttataattaaacagaacggggggctgttcaacattgaacagccccccgtttcccgacaaacagcatttagcgtttctcgtaatacttcacccagtccacccacatttccacaggtaattctttcgggtccacagcgccaacccatgaaccgcccaactgcatatctatcaataaatagtaaggttgatagaaagggaactgcccttccttgtccgtatcaatgcgcggataagtataggtatgacgatgattgacagcaaacaccaggctatccggataaatatctaccgaatagatattgtattcctcaggatttatcttattaatacctccgtgaggcggattatcctttatacctaagacatgtgtatagtaagaatgggtagtctgataagcaatacgatcatgattcaaccgttccataatatcaatctcacctcctttgggccactccgctttttcgggaagcatccatatagccggccatgcccccttagcggcttgcaatttagcacgtatctccactcttccccctgtaaacaatttctttcctttggtatagacacctcccgtcagataaggagccgtatcatttttttgagtatgattggctattccacgaagtatcagattcccatcctgcatagcataacatgaatcataataagacatatagttgttccaatcggatgttccgcgaggtatcttagtccataccgattcgtcaaaactgtttttttgatcaaaattctccacccataccagcttccattctttacttttaaccgatgtcttacaagcactcaccaaacaaaccagccccatacaggcccaaacaaataaaaggctttttctcatagtatttatttctatctgataaaaaaacaatgccgtatcaaacgaaatataatctcattcaatacggctaatttatctattaataatgtatttatttcgccaagctataaaccacatccattatcttctggcctatttcatctgccgcttccatggttgcagcctcagaataaacacggataataggttcagtattactcttacgcaaatgtacccacttgtctgggaaatcgattttcacaccgtctatgtcgtttatctcttcatccttatacagttcctttattttggccaaaatagcgtccacatccgtttccggagtcagatcaatgcgattcttggcaatgaaataaggaggataagtagcacgcagttcactgactttcttcccttcgtgtgccaaatggctcaggaataaagcaattcccaccaatgcatcacgtccgtaatggctttcaggatagattactccaccatttccttcacctccaatcactgcatgagtcgctttcatcttggtaaccacattcacttcccctacagccgaagcattgtattcgcaaccatatttacgggttacatcgcgcaaagcacgggtagaactcaagttagaaacggtatttccgggagtatgtttcaatacatagtctgccacggtcaccaatgtatattcttcgccatacatttttccatcctcacagatcatagccagacggtcaacatccgggtctacaacaaaagccacgtcacaaccgcctttggccatcaaccccataatatcccccaggttcttttccaagggttccggattatgctgaaaatcaccggtcgcttcacaatagagcttttctacatgcttcactcccaatcgttccaacaattcaggaagaataataccgccaactgaattaacgcaatctatagctacacggaaattggccttacggatagcatccacgtctaccaatttcaaagccaaaacactatctatatgtttctgattgtaggtattgtcttcgcgataacttccgatgtggtcgatatcggcaaattcaaacgcttccgcttctgctatacgcagcacttcatttccttcttctttattcagaaattctccatgctcattcagcaactttaaagcattccattgtctgggattgtggctggcagtcaaaataataccaccacacgctccttccatggttacagccaattctgtagtcggtgtagatgccagtccgatattcaccacatcaaaccccattcccattaaagtaccgcataccacgttcttcaccatttcgccggagatacgtgcgtcacgtcctactacaattttattgctctttactgtagttgttttacgtatcagcgttgcataagctgatgtaaatttcactatatccagcgggttcaaaccttcccccacgtgtcctccaatggttccacgaattccggatattgatttaattaatgtcatcgtgctaattgataagttatttcatagtaacaaggatagacagaagcagaagcgtcagattgtccttcactgtgaggtacaatcagtctgaccttagaacgaccggaaatctccctgccgacctttatgtaattgaatggaatcaaccatcctgaaggtacataaggtgtaccccaaactgtatacattataccggaggtgaatgtagcagaaaaagattttccactttttgtcagcatcatagcatccggataaaccattcgagaatccccatagtctgtattccaagacaaagaatctattccatccgaagtaatctgttcctccacataccggaccagaatctcataacgaccgtctttcaaacgctctccgtttccctcttccacaatctgcatataaacacctgtttccgagaaaaggacaaactggttttcatccacattggtcgtagaatcctgttcctggaactgttcaaagctgatcacattgatatcttcccgttcaataaatcgcttgatagcttctctctcttcttctttcatttcagcataggtctttccattattgcaagactggaagaccagccctaaaagaaacacagatgcgaacaatatacctaatttcttcattctaagttctgttattttcgggcaaaattaataaataagcccctaacttttatattgtttgtatgcaattatactaaaataactatttttttaccagaagcaactcctcgtacttcaccaaagcctgtttaaacaggtcgatggcttcatccattgttccataaaactccccaccggatgcattcagatgaccacctccattaaaaaattcggcagccactttattacaagggaaagcacctacagaacgcagagatacctttatcatattcttttccgtatcctcacgcaagaatacggagaaaataatattctttatggaaagtggaatattcacaaacccttccgtatctccttttacatactggaatttactttgttcctcttttgtcagccaaatcaatgccgaattgaactgagggaatacttgcatcttgtcgtacagcacatatcccatcaggcgtaaacgtccctcagaatatgtattataaactttacgataaatctcatccttatcaatgccttttgaaagcagttcactaataatgaaataaatttcacggtcattagaattataagtaaagccacctgtatcggtcatcatccccgtataaatacattcagcaccttctttggtgatatcctcaaaataccccagacggcatatcaaccggaaaaccaattccgatgtagaagatatttcaggatgagaaataatgattttacaaaaggcttccggattaagatgatggtcaatcatcattttacgtgccggcgactgagccacagcatccgccatcgcatcaatacgagacaaagcattgaaatccagacaacagatcacatctgcctcattcagcagcttattggcaaattcagtatatttatcgtaccggattatatccttggctcccggcatccatctcaaaaaatccggaaaagcattgggaacaatgacattcaccgttttttcctgtgattctaaaaaatgccataatcctaatgaggagccaatggcatcaccatccggtgacacatgggtaacaataactattttatcagctctttcaaaccatttttcggcatggtctatattagcctgtgcaattacttttgataacatattcaatctttttcttttgaaatggcaaatttacaaattaattctttattcacagaagaatacggtaagaacctttcggagatatatcaatataatccaatcccaaacctctacactcgtcctttaacaaattcaatctatacccaccgagcgaagcatccagtatgaccttcctaattttaaatattttttgtaatggggcaatttttcctttaaaacctttacacaagtacatataatcaatatccaacaaacaatcaaccgatctgctccgccagcggttatcaaccaaaacacatatattcagacctttataatgataaatgctatcctgttgccaaacatctttttgaggacaaacttttacttgcgaatgagccaggattaactgaaaagactcctctttcatataatatagacaacctgaaaatcctataaaaaaattgattccacacaaaacagtaatcaacaatttccgtgaaggagataacagataagataataacacaaataataatacataaagaataccaacctgaaacaaagacaaatgtatatcgccggaatgtgatataggcaaatcccccacccattgcatactgttattcagcaaccacaacaccccgttcaatccttttaccacccatatatgcaataccgtaaaaggagacaacacaaaacttgctaccgatccataaattataacaaatactaaaggtgccactatcaaattggccggtaaaaaacaaacaggaaaataagcgaatttataaataaccacaggagctgtccctaactgtgccgccagcgaaaccgccactatcccccaaatataacgaggtacagggtgatgcacccgccagcaccgaaaaatgacaggataaataaacaaaattgaaaatacagccagaaatgatagctggaacccggtatcaaaaagataaaaaggattataaagcagcataaagaatgccgctatagccaaagtattcaatgacaaagtccgttctcctgccgcacgtgccactgtcattaacatacacattaccaccgcccgtataaccgagggaggcaagcccactaaaaaagcaaatgtccataacaacaacacaataatgccacactttacccatcgcagcaggcaacttctatccagcggacgcaatatccaacacaataatccccacaaaacagctatatgcattcctgacaaagccaagatatggctcactcccgccacttgataagtttcacgtaaatcctcactcagttcctccttatagccaacagtcaaagccgacaatacggcaaattcatctcccgagaatccccacttccgataactgttcagtattttctctctccatacacctgtccgctgtttccatgtcaatgccgatttcttgcctgtccattgccaataccccggaaagattacggccgttccgctaatttgctgtctgaaaagataagccgcataatcaaattctcccggaatcacctctctttcaggagtcgagatacgtgtataaaagttcaaatggtctccacatcgtaaatttacagaaagactatctttcataatatagactagtatcatacgattaacaggaactatccccctctcagacatttctttatctatccgcaatttacagagatatgtttttgccttttcttgtggaacatccactatcaccccttgatacatattcttccctgatgaccattcatagtccacccgttgccatttttgctgtagcaacaatgcccctacacaaaatagaaacataaaaaccatgcctccaaataaccatcgggaaaggtagccttgccatttcaccaatacaatcaaaccaatcaagcaccccaatattcccatgccaaaaacaagcacaggcaaggcaccttgaaaaaaatgatcggatacaaaaattccggcgactagaggtatagtcaaccggaacatggaacaaggctttacagccgctatatttcgcactttggttttaagttcaaagagatttcaaccgatgtatcatgtctgacatatcaggagctttgaacacagcatttcctgccaccagcacgtctgcaccagcctctacaagctgtctgccagtttccaggttcacccccccgtcaacctctatcaaagcccgtgaacctgtatgcgttatcaattcacgtaattccctcaccttatccaaagtatgtacaataaatttctgaccaccaaaaccgggattcacactcatcagcaacaccatatccacgtcacggataatatcgaccaacatagccacaggagtagacggattcaatgtgacagccgctttcattccggcatcctttatttgttgcaccactctatgcaaatgtacacaagcttcataatgcacattcatcatcattgttcccaaatctttcacttctttaatgaatttctcgggattaacaatcatcaaatgtacatccaaaggtttttcacacaactcggctacatatttcaatacaggaaaaccaaaagaaatattcggtacaaacacaccatccattatatcaatatgcaaccagtcggcatcactacgatttatttgttctatgtctgcctgtagattagcaaaattggcagacaataaagaaggggatatcagaggtctattcatggttcactgttcttattctttttatacagaacaaagataaccatattttatataagaacagtgaaaaaattcattttatttcggcaaagtaaaccgcacacccaactgtatattaaaattaaaaggatgttctttgcgaatcgtatttacattactgccgtcatcaaagtaataaacaactcccggctccgcataaatacccaatttctctgtaatcttaaactgcgcacctgccgctgcggacaaagaccattgcaaaggtttcactttgacatcttcttcccctcccgaaaattgttcatcttttcctgcatttgatgtagaaacactgccgataatgcttcgctttccagatacacatttttctaccgctccacctgccgaagcatacacttcaaaccgcttgttactccatatattccggttcactttcaaaggaatacccacataatgcagtttctcttcccagccataattgtttttttgagttcccgaacgtgtttcggatgaaagctgggtataagtcaccccagtttctacagcccaatcatcacttaaatcaaaacgaagggaagctccaaaagtaacaggcatacgatattttatatcagactgcgcattctgtccttccgacaagttattgaactgaaccagcttatcaatttcagcccttgtttccactccataagcactattcattgttgcgttccttgcaccattaggcaaaggcaaatatccatccatactagtcgaggatgaaaaggttccattaccggtagaaagtcctatcgaccagtttctgtccttctttctatgaggagccacataagcgtaattcgttttggcagccgaataggaagatctgccggcctgtttctgttgtttttgttccactataacagattcctctttttgctcttcaatataattttcctctatctgtatctcttctacctctttatttagcaaaacctcctgttcggcggctaacgcctttgccgtaacagaccgaacaacttttacatgtttcttttcctcagaacgggcagcaggaactactaaggccataggttgctcaggagtgattgatcccggcactaactcatcgggttcgtgcattacattcaactctgccgattgttgctccaaatagtttgctgaaggtgactgccaaaaccatacagtcaatgaagacacaaccactaacaaagcaacagctgctgcagcctgccagcggcgccacatcggaattactttcggaaccgtatccagctccttttccaactgttcccaaagatcagcaggagccggttccgaatagccttccatccgagtgcggaaattttttatccatttatctttttctttcattcctatatcctctttctataatcatttatttttttcattaataaggttttggctctatataattgagacgatgaagtatgttctgtaattcctagcatttcagcaatctccttatgtcccttttcttctaatacatataaattaaagaccgttctatatccatccggaagttctttaatgaattgcattaaaacagattggggtatttgctcaaaatcatcctcatctccatctatcacatcgggtaactcttcgactatcacttcctgattggtagaagctttcttgcgaagatagcccaatgcttcatttaccataatacgtgccagccatgctttcaatgacccctctcctttataagtaaattgactgaatgaacgaaatatattcaaaaatccatcatgtaagacatcctgtgccacttccctatcacctgtataacgaacacaaatggccatcaattgcccggcataacgctcatacaattgcttgcgtgcaaggttatcgcccttgccgcaacgttccaccaattctgtttcattcattgtttgtgacacttctttattgaataaatgataagactgcaaaaatactgcatccggaagaataaaatttttgcttaagcagatttaacatttttacaagcagtaaacttactatcttcgcatttaagcgatagaaacaattctagaaacagaaaatatgagaaaatataaagcgacagttcttgtaataattatggtaatgctgattccatttactcagtcttgcctgaatgactatgatgatgacatctacgacatacaagcagaaatgccttttaacgccgctttagcaaccgtagtaactcccagtgaagtacccggtgaagcagtgatagaaagcgataatgatggaatcgcatacgtagtgaatcccgataaattaacacgttttgaaacaaataatccgggacaacgtattttttatacctatataaatgcagccaatccgaccggagatgcaagtaagaaaggaccttttatttctatagattacttgcagaagatcttaaccaaaccaatggatacactaaaagaaaacgatgaagatatttacggacatgatggaatcaacctcatcactcccattatgggtaagacacacctgacccttatgttccaaatattaggtttcaactctaatatcaaacatcggatcagccttgtagccacagaaggaaccgttcctgacgcaaacggatatatggccgtagaattacgccacaatgccgaaggtgacagacaggaatatccgagtcctggttatgtatccttccctttattggatgttcccggatataaagagggtaagctacaaggatttaaaataaaaatgaataccattaacaatggcgaagaaaccgttacagtaagttataataaaagtaaatctacaaactttccgttcatacagaaagatatatccaacacaaaaattaaatgattcttaacaactccttgtctgtcttattgtaacgaaaaggctgtatccgaaaatctttcgatacagcctttatcatttataccgacttatagtgtactaagattataccgttaatacatcagcaacacacatactaacgtatcatttattccaccttattattatccgaagttctgtagcctctcaaaaaatcagccacattcatacgtttctttcctgccagctgcaaaataagcacattaataaaaccatcttttacagccacctgaaaataagtcttcatatccgtacggatatcgcctatattcatctcatgggaaacaaaaactttctccgtttcatatattttcaaaacctgacgtgttccatcagccacacaaagctcggtccatgcagccggataaggagatagcccacgaataaagtcataaatctgcttcacacctttattccagtctatacggcaggtctctttaaatattttcggcgccgggcgcaattccgtttcctgccggatcaaattttcctgaggaacaggtttcacacttccatccaaaatagcatccacggtttccaaaaccaaatctccccccaaatacatcagcttatcatgtactatttccacattatccgtatcagcaataggaacacgcacctgctggataatctcaccggtatctatctcatgtttcaagaagaaagtcgtaataccagtttccgtatctccgtttatcaccgcccaattaataggagcagctcctctatattgaggtaataaagatgcatgcaagttaaatgtgcccaaacgcggcatattccatactatttcgggaagcatacggaaagcaactacaatttgtaaatcggcttgtaaagaccggagttcctctacaaaagcctcatccttcaatttctccggctgaagtaccctcagaccttgagaaacagcatattctttcaccggactaggttgtagcacactgccatgtcgtcccatcggtttgtcgggcatagttatcacacctactacattgtagcctccttcaaccaatcttttcaggctctccaccgcaaaatcgggagtacccatatatacgatccgcaaatctttcttttccatatacttacattatttaatcttcagagaaatcaaccaatacctgccggtacgaattaaatattttcgacttggaaacaaaccctttgtattttccctcttcatcaatcacaggcaggttccaggcctttgtatcatcaaacttcttcatcacttcttccattgaatcagtaacattgatccgtgccggaggagaaatcataaatttttctaccttgaaacgatggtataattcctgacggaacataatattacggatatcatccaataccacaatgcccaaaagttctccattgacatccactaccggaaacaaattgcgtttagcctgcgaaatgactttaaccatttcacctaaatccatatcaggacgcactttctcaaaatcagtttcaaccacactgtcaatattcatcaaagtcaatacggccttgtctttatgatgtgttatcaattcacctttcttagccaaacgcatagaataaatactatgtggctcgaatatcataatggtaagataagaactgacagataccatcatcagcggaaggaacaaatcatacccaccagtcaattctgcaatcagaaaaatacctgtcagcggagcatgcattactcccgacatcaatcccgccattcccaacaaagcaaaatttttctccggaatataaggacctatatgcagttcattacaaaaatgagcgaagatgaacccggtgatacaccccaagaacaaactgggagcaaaaatacccccacaaccaccaccgccattcgttgcactggaagcaaagactttgaaaagtacaatcatggccaaatagactagtaacaaattatcgaacccataaaagatagagttattcattactgtattccagtcatgattggttacgccattcagcaataaattaatagtatcatacccttcaccatataatggaggaaataagaaaatcaatatgctcagcattgcaccgcctatagccagcttgatatacggattattatatcgacgaaatatattctccacagaattcatagcccgcgtaaaatacaaagaaaccaatccgcacgcaatgcctaacagaattgccgaaggaatgcgctccatcaaaaacggttcatccatatggaacttgaacatggcatcgggaccggtaagaatataagaaacagtagctgccgtgacacaggaaacaagaagaggcaacaatgatgccatcgtcaaatcaatcatcaagacttccaaagtaaaaaccaagcctgcaataggagccttaaaaataccggccacagcacctgccgcaccacaccccaccaacagcatcagagttttatgctccatcttgaatacacttcccaaattagaaccgatagccgatccggtcaacacaatcggagcctctgcacctacggaaccaccaaaaccgatagtaatggcactagctatcacagacgaccatgtattatgccgcttgatgcggctttgacgacgggatatggcatataatattttcgtcaccccatgactgatgtcatctttcacaatgtaacgaatgaacaatccggtaagaaagattccaaaaaccggatacaccaaatacaaccagttgactcctgtagaatcaaaattttcagtcagaaattccttgatccattctactagaaacttcaaaaaccacgcggccaatgccgtaaaaataccagcaagaaaacttaatataagaataaagtgtttctctcttatcttcttttcgcgccataagataaagcgctgtaaccaacttttcttattttcatctataattgcgtccattcctttttttactctctaataatcttcacttctccccctttacccagtttgataatgctggatggtttgggatgccccacttcatcttgtctatactccacaatatagtctacagcttgttttacttcttcactgatttcactgaagttggcaggtgaaggctgaccgctgatattggcagaagtcgacacaatagctttacgaaatcggaaacaaagttgtttggagaattcctcagccgtaacacgaataccaacactgccatcctcagccagcaaattctctgccagattacgtgccccatcataaataatagtcaatggttttgtggcaaactcaatcaaatcccaagctaccgcaggtacatcactaacataaaaatttacttttaccgtactgtccaccaatacaagcatcgctttactatcagcacgcttctttatatcataaactcgttttaccgccttcggattagttgcatcacaacctattccccaaatagtatcagtaggataaagaatcactcctcccttctgcatcacttcacaggctttcttcaaatcctctctaaaatcttcgttcatatcgttttttattatttggttctcatttcaacaagttgcaaatgtagcaaatcctcttgataatgacgagttaaacttgaaaaaaagaaaactctccaatattctctgctatagccaatataaaaaagtactattcccaaaacagaaacagtacttttctattttagcctagcaggcttcatttaagtccccataataatctaattatcattgtaacttttccccttgcctatcttatttgcctatcctaaaccaatccacatcagtccaaccgccatcattcgtttgaatagacggacgagtacaaaataaacctgttttagcaccaatccatctaccttctttcactcggaacggaatacctaacgatctataagtcattccatccatactataactaaatttacacatcaccaccaaatcatatcctccttcattaccagcattttttctgtccattgtggagaatgttgatttcagataaaccgtattcccttccaaagaaacggatgcattggttttttccagactaccccggtcagcctcatcacacacagactgagacagtaccagcccatctttagtattctccacgaacaatcctgcataatccaatcccattacaactaatcctgtacgctcacctgtatatttcttagtgggtttaaaagttaatttagtcgttgctgtaaaattaggagcagaaatcttttgtaacaacaaatttgggacatcccataaattcctataactatctgtaacaggataagaataaagacgtatatatccattttgtccattacaaaacatccatttttcgttgatattagcattccactgccattgtggagacaaattctgactattaaactcatcactttcctgaggagtacaaacagagtactttttaccaacatctggtttcttatagaataataccggttctccgcaaccatcttcatctttatctattcctatgacaggccagtcatccacccatttcataggctgaagatgaagcaaacgaccatgtgcacctacatcttgaaaatgtaaaaaccagtcttctcctgtagtagtgtccacccacgccccttgatgaggcccgtttatctttgtttctccttgagtcaatacagttttccactcataaggtccatagatatttttcgaacgtaacactacctgccacccagtagccacaccaccagccggatggaaaatataataatatccattacgtttataaaatttgggtccttcacaagtttcatgagcttcatgcccgtcaaaaatgatacgagactgggtaatagcttgagttgcttcagcatttaattcacaaatggctatgacactttttaaaccggcacgactacctgcataagcatgtaccatgtacactcgcccatcatcatcccaaagaggcgttgtatcaatgattcctttacctgattttactaaaaccggctcgctccaaggaccttccgctcttgaggatttcaccatataaactccttgatcgggatctccccaaaaaatataaaattccccgttatgatagcggatgctaggagcccatacacgatttccatgctggggagaattatcgtttatgggaggtacggcataaggtaatgccgcaccaatgatactccaattcaccaaatccttggaatgtaatatttgcaaaccgggtaaacaaccgaaactcgatgaagtcaaataataatcatctccaaccctacatgcgtcaggatcagaataatccgcataaagtactggatttttataagttccatcaccttggtctgacacccatacttttgaaacatagtcttgagcagaaactaatcctccgctcattcccaccaagtaaaaagctataatatatttcttcattatttataacctgtattttgagtaaattccgttttattttcaatagcgtccaagaatgtctgagggaatggacgtacccaatgatgttcatccacatttgcagcatcaggattacacttttttattctttttacaaactgttctttaccaaatcgtttcaaatcaaaccaacgcaactgctctccagccaactcccgtgcacgttcatccagtataaaatcaatatcttgtatttgtgacaattcaacacgcatcgcatcttcatatccggatatggcacgagtcatacgcaatttattcatataatccaaagcatccgctttatttgctttagctcccgcctctgctgcaataagatacatttcagcaatacgaatcatgaagccgtcacgagtacttctatcttcatcttttgacgcacgagtaggatctgcaaatttactcaactccaaatattgcttcatattctttgtcgaaccatctgcattatacacatcatttctatcaaaaagctgataacgattttctgcccatgcccgttgagctttagttgcctcccctttaattatataaatagcagtatcagtcattgcagtatatttaccttttcccttctcattattcataatccataaattacgaaaactaccagcataacgctggtctttttcctcatcaaacaaatccaccaaataacgagttggcatatatcggttaaatggacgaccatattctgctgtacgtgtcatacccggttgatcatcatacttcatacaaaaaagcaaatgtgcattattccctccgtttctgataacaggtttatcatccaattcagaattatacaactgatttgtcgaataatctacataccatatcacttctttattagagtttccatcactattcttcatgtcccatattgaagcaaaatcttcagctaattcaaacggaccattttctatcacatctttagccaaatcgtatgcctgtccatacatgtccacatcgttcttttcacttgctctagttaataaaagtctagcttttaaagctttcgcagtccagatggtaacccgtccaccatcattttgcaaagttgacaacttgcttttgatagcccaatccaaatcatcaaacatatattggtagatattatctgtagaagtttttaccgggttcattactatactggtagaaggctggtccgtataataggtatctccaaatgtttcagtcaatatccaataatagaatgtacgtaaaactcttgcttccgcctcacgcttattcaaagttgttgccaatatctcatcattggatggattcggcactgtttgtgcatgaaatattgctgtattacaccaatttatcgctgcataaaaacggtcaaaataaaaagtacaggcagaatttgttccatccaaagactgggtatatgccgccatattattatccacgcatcccgaaccagccgcaataatatcagttccagtctcacttagcccaatcgcatcctcttttcccgcccaaaagcgtaaaggagtataacaagcattaactacagcattcaatcctgcttccgtgtcataataacctccttctgaagtcacatcactataattcgtttcatccaagaaactatcacaaccacatcctagagttagcatcaaagatgtcaatacaaatatatttttcttcataattactttcttttaatattatacactctatcaaaaatccaagttcacaccaaaaacaagctgtttggtcatcggaaatgaaattcctccccctcgttctggatcgtaattatcaatgctgctgaaggtaaagaaattttttgcagttgcatagatacgtgcacgtcccaaacctaaactagccaatacttttgaagggatattataggccagggttacatccctcaccttaacaaacgaccctttttcatatttcaaagttgaggaatatctagtttttccaaacccataaaaccgattgggacgtgggaaattattagttggattttccggagtccagtaatccacattagaactattttccaatccatccggtttatatcctctattgaactcgtaatcaatccattgacctaaacgactataaataaagaacgaaaattcaaagtcatgaatggtaaatgagttatttataccaaaagtaactttaggacgtttactataaatcacacggtcttcgggagttatttcaccattaccatccgtatcctgaatcttaatatctccaggtttctgtccatttttagcagcttcatccgcttcatccagttgccagattcctatctttttataatcataaaagacctgaaacgcttcacctacaaaccatgagtttgcctcatctctcagtgctcctgaagccaattccttaattttctctttattgtgagaaagagtaaaatctgtagtccaagtaaaattcttcttttgaatgtttacagagttcaacgccacatcaataccaaaattttctgttttaccaatattttccataacttcggtatacccattggttgatggaatcttacgattcatcaatacatttctagtatatgatttatatacatctacagaacctgaaagacggttattaaagaaaccgaaatccacacctagatcaaacacagaagttgtttcccaagtcagatttttattcgacatcgttttaggatacagcccactagccaaatcattgttaaatgaataagtggacgaacctaaaagcccgacagtctgataaggatcaatagccgattgccctgactctccccaactcaaacgaagttttaaatttgacagttcgtcaaaacctttcaaaaaactttcttcattcattctccatgccaccgctacagatgggaaatacccccatttatgtccatcggctaataatgaagaaccgtccgcacgtaatgacgctgtaagaatataacgatccataaacttatagtttacgcgcccgaaaaaagaagctaatttttcctcatttaaatagctgtcaatcatgacttccttggtattcgatgccaaattatgatagatatttcctccatatgtctgtcctttacctgaagccaaagtgtactccttacttttataaatagtacttgtaccacccattatctgaaaatcatgttcacctaaaattttagaataagtcagaacattttcccaagttatacccgattctatagtatgctcttttaatgatttactatccttaccttctccatccaaagaatttgcagaacaataatatccccttctcttatttcttacatccacacctaaagttgttctaaaaagcaaatcttttgtgatattccaattcgcatatagactaccgaaaaaacgggttgcttttgtattatcttttacagctccatctacatcatccactaacggattagtttgagaattatatcccggagcaggaaatcttactacttctccattttcatcataaggttttgacaaaggcacaatcttattacacatattcaaaggatcacgacgcgtgttttgatctttgtatgtataagtaatattagtaccaatcttcaagttttctaatagtttatgatctaatgccactctagcattcaagcgtttataattatcatttttaaaaagtccattttcgcctctgtatcctaaagaaatagaatgttgtgttttctctgtacctcctgttatagacaattcataattctgattaaatccattactcatcattaaatctctataatctgtagaaactccttctcgtacatactctaattcctgtgctaccgtaaagacttgctcatctggtaaatattcattagttgtctggtcacgatatgcttcacgctttaactgagcatattcagctccgttcataatagagggataagacgaaatcatattaatggaagcaaaagcgttcaaagaaacctttgattttccagctttaccttttttagttgtaacgataataataccattagcaccacgtgttccataaatagcagtcgaagaagcatctttcaatacctcaatagattctatatcagaaggattaatatccaaagttgtaccataatctataccatcaactaaaatcagaggtgcattactagccttcaaagatctttcaccacgaatagtaaaactcaaatctgctccagctttaccagaagaagctgttaaatccaatcctgctacttttccttgcaaagcctctaaagcatttgtagtaggaatagcagtaatatcccgagactttacagaagatactgcacctgaaagatctcttttcttttgtacaccataaccaacaacaacgacctcatccaaagcttgagtgtcctctttcaatgtaattatgaaagatgtttgttttcccacagagacagactgagtgagatacccaatgtaagaaacaaccaaaacatctttttccttcacatttggtatggtaaatttaccatccaaatccgttatagaaccatttcctgttcctttcacagaaacattaacaccaataaccggttctcctgacatatcttttaccataccggaaatctgacgggtctgtgcaaaagataacagatacataacactgaatatcaaagacataaacattctttgaatacaaactttttgattcataaactagtgtttttataattagtaaataaggtaatttttcaacattcttttaatttaaaaaaccacggtaacaggttcacctgctttcaacgctatttcctgtttatctataccttgtaactggattttcacagtctgatttattttggacaacaaagttgcttttacttctttttcgtgccatactaattcttgtaacaggattcctcctcttaaagctatcccttttatagtaccattcttccattgaacaggcttacaaggtaaaagagagattacaccaggttcagaataaaccatcatcttcatcactaatgacggatatcccccacaaatgtccaaattgaatgttttcttagggtcatgagttgaaactaaattgttgttccaataactatttccaagccagaccaacatatcataagccatttctgtctctcctaaagcacatgccgcaaatgccaactgaaccatcccaaacgccatgatacctccgttatcctgtcgccgtatttccattctgcgattgatagcgcgtttacacccctctatcaaatcttgattgcccataatcaacggatcatgaaaatcatacaatccgaataaatgagaagcatgacggtgtttatgattatcctgcaaatctttccacatccactctctgatttccccattttcattcaacatataagaaggcattttttcctgcatcgctttccatactggaatcttatcttgatttacccctaaaatctggctggcttctataacagaacgcaataacccattagcagccattacatccatagtagcattgacacatgcctgacttgaactattagccggattattctctggagaatatgaagggttaaaaatatactttccatcattaccttcttttaagaaatcctcataaaacaaagcagcctgctccataaacggaagcgcacgctctcttaaaaaatctttatccaaggtgtacatataataatcataatagaacaatgaataccatgcggctcctgctaaccaaaacgtcatcggccatgtagcatcaaaatgattattcagaccatgggaactaaaacgtgaagggacatgaataccctgacaattaaaaagttcacgcgcattcactttaaaatcctccatatatgcttccagcctgtcgaacaaaggcaacatcaactccggggtattagcctgaagataatgggaaacgacaaccggaagattaccattggtcgtataatcaccagaccacggaggagtcatagtagccccccaaataccttgaagattaggaggattaatacccgtcgcactaattacattataacgtgccgcatcaaaaagtttttctacaagagccggattagagcctcctaacttcaacaattcttcagaagatttcatccggtcctcttctgatgcatccaaatcaatagaaacacgttcaaacaattctttatgaattttcttatgtaccgccagcaattcatcataagttccatcatatgattttaatgcattactcatttcaagaacccgagactcctccatattatcagaaggctcaatccgagcaacaattaacacatcagtggcatccctgaggatcaatcggtcggaatccatttctatctttccatccgaacgtagaacctgtaccactccttcgtaacctttaaaactttttctagattcaaactcccaaggtctttcataccatgctttaaaataaagcccattatccattgttccggattcgaccttctttatacaaaagttatcatccagattaaacttcttgatacggcccacatcatgccttattatcttcgaaaggctcaatgttgtattaatagacgctccttcatctgatgacaatttcaaaacaacaagattatcaggtcttgaaacaaataatttacgggtgaaaacaccattattatcttcccaatttactattacctcacccgaagtaaaatctactgatctctcatattgttttacagtagaagtatctcctaaaagattgaattgaaaagcgggaataaaaagatctgttgcatgtttccctttgtacccttctgagtttgccaaatccacaacaaaccgagaagcctccatatatttgtcctccaacaacatttgctgaattttacctaaatattttccctgacctaccggtttccttgcagaatgaataggcaaataaagcaaagcatgatttaaaacaatggattcctgatatggatctcctatcaccatagcccccattataccatttccactaactagtgactcctcccaaattttagccggtctgtcactataaaatccccttttcggtgttgcaccagtatgtatttctgatttacagctccaaaaagaaaaggcaatcacacaatagattaaaattttcttcatagtactttatattaaatagtctattatataagattccatttggcaacctaaaattatttcattgcaaacatagcaaagaggtaaaaagggaacgtgcattatttatgccgttccgtgtattttttaaactacttgatagaaaagtatattatttatgctattctgtgtactttttatgccaaaccataaaaaagcctttgatttatcaatcaaaggcttttgttttatactcactcggagtacaatttttcaactccttaaataccctactaaaatattggggagaagaaaaaccactcatataggctacttgagatatattataattccccgaatccaataattgtatggcccgcttcacccgcatatcctttactaaatcaataggggtcactcccaatatagactttaccttccgataaaaaacagtacgtcccattttcatcgtatcagccagatcctcaattttaaagtcctgttcctggagtttggattccacaacctgaatcactctctgaataaatacctcatcaaaagaagttatttgaggtattgaaggagagaaactatccaaagaaacactcgaagctaccaaattctcctgttcaaaagacctgaatgcttgtttcataaaataatcatgtaacatttcgcgttgcctcaacaaagaagaaatacgggcacgtaaatatccggaactaaatggtttagttatataatcatccgcaccatattccaatcctctgatacgatcatccaacgcagattttgccgataacaaaacaaaaggtatatgactggtatcatgattctttttcacttcttccaataattcaataccatccatacaaggcatcatcacgtcactaagtaccaagtccggtaattctaaccttattatttcaagtcccttttttccattctccgcttctattatatgatactccttacgaagaatacttacaataaaatgtcttagttcttcattatcatccactaccaagactgttatatcttttataaattcttctttttgttctacttgtgtctcaattgaaggcattgtcttgctgtcattcaaaatgaattccacattcttgtctgattggaaaacttcatagcttcttgacaaagaaacagagaacacacttccctgtcctaatttactatccaccatgatagaaccatgtagcatatcaaccaattcttttaccaaggaaaggccaatcccgcttgaaaaattagggtctgtatatcccaaagtttcaaaacgtttaaataacatatctattttttgcagttcaataccattaccttcatctctgactttgaaaaagaaaacatcattttgaggttcaagaataaaatcgatattcttgccgtcgggagtatacttaaatgcatttgacaatagattaaacactattttttcaaatttatcaatatcagtataaagcacataactatcacaggaacaaataaactgaaaattaatattccgctgatgtgccaaagcggtaaaagtttcaaagatttttttagacaaggatactatatctgtttcttcaatatacaatttcattttgttattctgtattttcctaaaatcaagtaattggttgataaggcgtaacatacggtctgtattcttttttgctatcaacatattctcccgaccttcctcactcaacttctcatgatcgatcacctcttcaatgggactggcaattaaagttaacggagtacgtaattcatgagatatatctgtaaaaaaacgaagtttcaagtttgttatctgttgctcaaagtccacttttcgtcttaaattaaaaatataagctaaagttacagaaacagcgacaattatcaatagaattaatatgacatataataaccatgcccacccagtttcccaaaaagtcggttttacatgaataaataaccgggccatattatcaacccataatccatctccattagtagattttacttccaacacaaaatcccctgccggaagattaaccaaactggcagaatgaccataacctatacaattccattccttatctatatttttcagacgatatgcatattgtaaattacccgaagcggcaaaatccaatgctgcaaaagtaatcgaaacattcctctcatttttttctaaagtcaaagtctgatctacaataggagaagaatctcccattttgttatttttaccagtactggcatttgtaaagacaatatgtggtataaaactacttttattcaacttatctaaatgcaagtataaaacatctctgtttaaagccacatacatgccatttttgtcatccctgaccaacggtatttcagaaactaataaatgagaatgaaaataaaaacgattataagactctatactacctctatcaggattatacctacaaatctgatcttcaaaactaatccatagctcatttctgtttccttctatcattgtataggccatatccgaaggcaaaccattctgtttattcaaatgcacaaactctatattgtcgcacaacaaatttttagacgttaccagattcaatccactgctatgggttataatatagatttctcctttcttactttcaaaagtataaattacgtcattattactaagactattggcacgcttagtttcacagtgattcaaattaaattgtattttcctatattcatcagttttagctgaaaaagataacagtccatcagttgtccccaccaacataattcctgttgaagtacagtatatgctcctcacttttctacattcatctttaggataaagatctaatccattatcagaatgaataaaatgcaaatcaggaaaaatcccgtcaacaacgtttaatcctccaccataagtaccaatccagatatgtccattcatatctttgccaaaagcataaatagcatccgaactgagact

SEQ ID NO: 14509 - DNA, 1262 bp, Unknown
  gut microbiota DNA sequence
attggccttggttcgtggcatgcattctgttatgcatggcaggagcctggctttatttgcgttacaccccgccggtatacaacatctcggcgtccatcatcatcaaagacaatgacaaaaacagcaaagcaagcagcggcatggccgacttggaagacttgggattttattcttccatcaacaattttgacaatgaggtagaaatcctgcaatcgcgcacgcttatcaagaaagtagtggaagaactggatctttacatcagctatgcggcaaaaagtagttttcatgatatagaactttacaaaagttcccctgtcaaagtatggattacccctgaagaagctcagaaactccctgctccggcatatatcaacctgactttgcaaccgggcaataaactgaatgtgaagatcacaataggagaacaggaatacagcaagcaattcgacaaactgcctgccttgctgaccactccgtcggggactttcagcttcaccccggctgattcgacaatcgcaaaaagcgagcaaaaaatcatggctaccgtttcttccccccgcagtgtggccggcagctaccggggagcattgagcatagagcctacttccaaatccaccactatcgcacagatctctgtaaagagcacgcatacgcaacgtggtatggattttatcaacaaactggtggaaatctacaaccgggatgccaacgacgataaaaacgaagtggctaccaagactgcagaatttattgatgaacgtattaatattatcaacggcgaactgggaaccacggaacaagaactggaaaccttcaagcgcgatgccgggttgaccgacttgaaaagcgacgcccaactggcattgagtgaaaactcggaatacgaaaaaaaacgtgctgaaaacagcacccagctccggctggtacaattcctggccagctatgccaacaatccggatcatgcctacgaagtacttcctgtcaatgtaggcctgacagataccggactgaccgaactgatcaaccgctacaatgagatgctgctggaacgcaagcgcctgctccgctcctctcaggaaaacaacccggtggtagtcaatctggatgccagcatccgcgccatgcgcagcaatgtgctgaccaccatcaacagcgtgcaaagaggcttggccatcacccaggcggatctggaacgccaggcaggcaaatatgccggacgcatcaccaatgctccgggacaggaacgccagctagtcagcatc

SEQ ID NO: 14510 - DNA, 26701 bp, Unknown
  gut microbiota DNA sequence
tttatttgcagattaaaaataaagcactacctttgcatccgcaattcggggtgtagctcagcccggttagagtacgcgtctgggggtaatgaaatgagcaaagattaggaagattgcaatataatataaatcaaggagttaagtaaatacttaactccttattttttacctgcgaataaaattcgattaaagttttcgggaaacttattgcatactaatgcaaaataagagcaaaatgtgcttttggatttatttgtacgagagaaaagaaccagacaaattatttatgcattttttgagccagctctacaatctgagccaaatcagcctcatcaattttgtctaaatccatgagtttatacatcgcttcgcccaatgcacccaattttatatttccaacctcttctcccaatcgaaaaggtgctactttgtccgtcaaatcaaagcgcacaatttccttaagtccatgatatatatccaagcctttaatgtcattcgtgttatttagtacctgtttccagctatctgcattgagagtaccttgtcgctttagatattttattatgcaaagatgaaaatatgtaagctgatttactattttttgaatgctcagcgcacttgagtaatctacttctggacaaaatgctaaattgccaatgaaataaccataaaagacagctttcttttgttcggtatcattcatagaactttttaatacactttctaatatatcttctgccttagaataattcaagccattatatataaatagaccatcagttcgaaacgaaattccattagctatattttcgttgacctttgagactgcagctcgatatgaagctcccaaccttgcacattcccttttggtaatacttttactaaaaatatcacttaaaatagattcaaacgccttttgtactaaaggttgcattcctgctgaaaaaaggatagattcaggagttcctccactaatgagaggaatgattgcagttgataaagaactagcaacctcagatgttattttaatagtgctcataaaatcgaattaatattagtggagcaaatatattggttttattcgatattcattataaatagacatttttatttgtatcatttattctatatatagaacgaaggactataagaaaataaatagagggttaattttctccaaccctctatttattgataattcagtgttcatttatgatgctatctcattaagaacttcctccgcctccttacatccaagttcagcagcttcttgataaaatttataggctacgtccaaatctacggtttcaccatataaacctttatggtaaatctcccctgttaaatacaacgcatacggactccttttttccctcaaatcagataatacactcaaggcagaccgcacacacaatggttttcttgattccccaccataaagaaatagattaaaagcttcccacagtgcatcttcgtcaacgaatgcaagttccttaaatccatctttagaaaataatgccgcacacctaaaaaactcggcagcctccaaagggtctttctctaaatcgggagctccatacttataaagatacgcaaatgtaatgtctgctttaccatgccctaaattccttgcttggtttaaataaaacattgctttatgtgtattttgctccacgttttgccctttcaaatacatcattcctaacttgaaggctgcttccgggtctgtatccgtattcttaatgagattaaacaaaccgctcttacaatgaccaattgtaaagccataagcttttgatgtttctattatcataattttatatttttagatttatactttttaactcaccactacatatctcgtttaaaacgaaacataaacattaaggcaaaggaattggtccgtcacgtattaaatgattgttactaaataattttatttttctcatgctttcaatattctattcagtcgtataacgaagaaattgaaaaccacttctgttaatttatggttaataaatacgtattggaagttaataaatatcaataccgaaaactgaaaacaatcttaaaatcaaatgaattgttataggaagtttgcaatttaaagaatcttttgcctctctattagaaacaaacccaatataacaaacagggtaggacaactattgccctacccctatcttatacgctccgttagaagcctcattgttgttatctacttgtatattgaatatacctcaataggaactgtatctactataccatgttttacatagcttaaagaaacaagtttttcatctacagttttccaatacaaagaatactttccttttttcacaatgttatcctcaactatctttcttatttctttaggtgcttctatttgattggaatcattccacaaagaacttctatatggatatttaaaatacaaataagaattttcttttttatcataaagcacagaacattcatgctcttttatttttaacttgggatgaaatgtcatactaaagaacactttactattaacaactttcgcagtcttcccacttgtgcttgacggttcgtattctattttaccatgtaattgctcattttgcagctttgcattcaatacgacttcatccttttgaatgactgtaatttgtttattagtgtcaataacagcaatataagtatggaaagaatgggactgtaaattaaatgatttaacctcaccagcattgtcgaagaactccttaacaacttgttgttttagactgtcttgtaggtattgaactccatacggataaagttcttcgagtttatttcgggctgcattttctgctttctgtttagcaactttttcctctatccttttacgtctttcaagggtatcttttattggatagacagataaactccccgagccacttatatgtagttcaattagcttatccttttcaaacgtttcactttgcatctgcccatagttatcaaggaaacgacttagttttgtagaagtcattacaatggcttccgccatgtttccaatttcaaagcctgtataaacatatcttccattatccatgcctttataactgaggcttaacgaatattttacatagccatatctaaactccattccataggagtttttcttttctgaataactaatttcaagtgtgttaccaccgtatatcggtttacccgtatagggattagggcacagataatcgggatattcaaaagccttaatagaagtggatttttgagcataagcagaaagaaccattattacgctcatcagaaacagcaaagttcttttcataatactgtgatttgctttccacagccccgacaggaaaggtttatataaaaagatagcgtgaggctgttagaattatctgttttagaggctctggtaaacccgtggcacaagataaaacgacaccccacgccaagccatatatatcactgatatatacaagattagcatgagcgtttgtatcgtctatccccgtaccacatgaaattttaccagaatttctaaaacgggataaagctaaacgcttcctttaattaatatgtcaccaacaggtttttaacctgttagcgggacaaatatagctaaaatccagcgttctacaaacgtttttagggatgtcgtggaacaaatttactcatttattgatagttcacaagattttagggagagaactccgatgaggcgtttgcacattgggacatctaaactttgacagacacccttaaacagcctcatcatcgtagctataatcccaaacgcactttgcttattgattatattccactcatttttaggtactgcatgacatttttgccccccacattgcaagccctctatgacgtaataccctgtcattacataagtttatcatcatacagtgaagatttaagagtgttgcatcccctttacttacaacctgtattcattctatcgaccgagcataaccacctcatcacataaaattatataagctcgtattagagcgtttaagccattattacaccccaccgaatacttttattgtgtttgataagtttttggctgtgcacgaccaatagacacctcatttaaaagataaggcttgataatcacccgaagagtaaacttaggaagtggaaattatattcttcgatgactatcaagccccattatatcaggagagagttaacaggcagtactaaatatccgatgttcctctgcaatactcataccgtctgccgactgttctaacaaccaaacgagatacttttctattttacctgttagttcttccattaggctggaggttttaaaatgttctttttgccacttcatcgcctcttggattcttttttggaattgagtatgcagaatcctatctttgggcagacgattttttcgattcttaaataggatatatttcatataataagacaagttttgtccctcgtttgcaatacaaatacaccatttatcaaagtctttggcactctttaaagtgtcaaactctacatcccagcaatcatcaggtagcttatctatatcttcgtaatatccaaaccactctgctaccaacttccaaaatacatatttatcccatagttcattagccgtaataccttttccaaacagctcaaacaattcatctattccaagtgtcatttcataccttaacaagtagttcgacaggctatttctgcccactttgggtaactctctcttctttttagcctccgacatcttatcataaaactttatccgtgtaccctcatagtcaaaatatgcagttccacttctctcaccactccactggttaggaataaatttctttattccgcttaacttcctcaaataagatataggaggttgagacatttcaaaattatgggcaaactccaaagactccacctctgcattatacattggtacgcccagttcttcgctcaacatcataatacatcgttctgcatccttcaatgacatagtacgtgtattatgcccccataagcatttaggaagactgccctcaaatgatacatacgtttcagtggctataactttacgtccacgccattttccactaccacctgtatcatcacccctatattgagataatgctaaacgagccacaacatcctgccacctataattagatggcagtgcccatgcgcatagctttaatttgattttatcatacatggctatgaattaaaatgtatttagaatgttatacaaaattgagcttattaactatttacgaagacgggcagtaaatcccaactccatactttcaatgaattcttgcttagtttcttgccttttagccatcatccacgctattatttcatcacgcctaaatcttagtattcgcccactttccgcacgataacaaggtatctccttatgacttgtcaacttataaattgtatgtttggactgcccaatcaactcactacaaatatcaatgccgaatacctccggataatcttccatcagttttagaggtctattgttcttctgtttttcgcctttaccctctgacggcactgttcccagcatcgtacaaattatttcccgtaacgaccttatttgagccaaaacataatattcccactcatttcttaaaaactccatatcgttatataaccatgcgctttccacagaatcacgatgatgttcattaatgaaaccgtactttgctattgcaccatacaggaaatcttttgctaaaataatttttccctctttctgtaagtaggcttcttcattatagatatcatccaactcttgactactcatttttaattctccctgaactacagactttacctttacttcataagtagaaataaaatatttgcttttccacataataatagctgcatcaactacttttaatgcctgtcggagttttcctttatccccatccgtcaaccgcttcacataaacaaccaaccaactttcacggactgctgcttcccctctgagcgacttgtttatcaagtcgcccaaaggcattccataatgaataaacatacctataatatttttacgactttatccaaaacacttgtagagaaactggcaagatatgtagccgttgtcgtaaggttactatgtcccaaggcttggcttattatttcacggggaatatcattgccttgcaaagtcatggccattgtgtgtcgtgctgtgtaagttgtcaagttcaatgaaattcctaaagtcttacccatttttttcaaattggcattaatacgtttgtatcggcaacgcacatgctcatacagttgttcgccatcatactctttagtaataataggaagtaaatacttgcctgtttgaggtgtgtttgccttaaaccattccaataaatcctctatggcaggagtaacgaatatttttatcggctttacattcttggcattttttgtcttttgccttttatacacgatatgcgttcctgttgccaacacttcaagattgtctgttgtcaggtttgccatatcaacaaaactcatacctaaacaataataagaaaataggtatatccgacgggcacgctccaatacaaaattttgttgaggcgaattctttatcaactccaattctgttggcagtaaatagcgttttgccgtttcctccgccagcttgttgatttcaaaaccacctttgccaaacggataagtgttgtttgaggctgctttttctttaatggctttattgattactgcacgcaatgtttttaaagtgtgcatacgggtgtttccacgacaaccattcttttccatagccatatttaagcgattgatgtatttcacgtctatttctgaaaacaaacgttcttttgccttagagtcatatttgcaaaacaggtgcaagtcacattcataagcctttccattaccgatatgacctgtagactttaaatcctccacctgcttcacccaataatcatagatttttccttgtctcgaaattcccaaaaattcttcttcaaattggtttagcgtccaatccacctgtgctttcataaacttattcaccacttcatttttacgttcctcgcaactaatcaaccagttgttatacgactcatagttggggttcactcgtttgtcccttttaaatcggtccgcatttgtatcccactcattttcaaaggcggacaattttaaatcaatgtattttagtttacctcttttagtgatgcgtaaacaaacagggttactcccatcttttcttttgttactcgtgtggagtacaatacgaaactttgccataatcttctttctttttttaattaataatacagttctctatgagtgcaacgtaaaaattcaatccacgattaaatttttgacgagtaaaattaatctattaagatttattaacaatgaacacacggaaagtttctttcaatatacgtcaaccccatactaataatgagaaatgtagtagcaagatatattcctattttgtatctatcttcgattaaagtttgattaaagttttagggtaaaataatccaattccatacaaaagacgatagactaaatacaaatagccgaacagaacaaaagccttaagcaattaaagtattgtttagaaacaattctaaatagcagtaagtaaagccatcataaaacactaataataaagaccatacaaaacacaccatagaatacaacaaataaaaagcaatcaatttatttgcagattaaaaataaagcactacctttgcatccgcaattcggggtgtagctcagcccggttagagtacgcgtctggggggcgtgtggtcgctggttcgaatccagtcaccccgactggaagaaagcattgataatctgatgattgtcaatgctttttgctttttagacaattctcgtaactatggcagtttggcgggatggttgaaaacggctcagtttctttttaagatgcatccttcatgaccaataaagaaggaagcgctttaaagactttttcattggcagcaatccccacacaagtatcatagcttaaaataagcaatccatgaattatcggcaataccaaatcctctatttcaaccaaaggatacagatgtaccctatttgcatactgcttatttatcttatatatttgtcctacatattcttcacttccactgctgaaataatataaatgaataaaactccctccatcttccaataaacgacgcacataagtgaaaagaaaactatccatacttccatttatcaatacagccacttcatctccattacgatagtcacgatttacaaagatagcaacaggacaagaagcatgctctaacacatcatccacttttttacgaaacaaaccaaaaaaagaagtcatcgacttttcaccgtcagtcataaagcgaggccctgcgcctaacaacaaaatatccggtgactccgcttctacagtggaaatcatatcagataccaaattatcagttactctataacgcttctctatatgtatattcaagtgctctgcctgtttatcaacaggaataaaactttcttcaaaaaattgctcaacactagtaggattcacatcggtacccgttgtataatgagctgcaattacctgatgataagaaagttgttttccaaagagtaatttgtataccgataatagcttaccacctgtttcgggacgtccaaagaacaaaagcaattttcgttgcaaaaccgttttttgttctcttactgcaaagccccattcgactaaatttaataaaggtgtcgtcataaaagtcgtaaccaaagccattatgataagaataacaaagatagatggaggaagtacccccaactcataaccgatattcaatgccaccaattccatcaatccacgggtattcatcaaagtacctatggtgaaactatctttccaagactcacccaccaaacgagaggccacagcacatccaccaaattttccgacaaccgctacagtaatcaataacaggcatacacaccataattccggcgtattaattaatcctatctgtgtgcgtaatcctgtaaaagcaaaaaataacggtagaaaaaaaaccaatgctatatcctcaaccttctccatcattaccttacggaaaccaaaattagaaggcatgactacacccgccataaaagcaccaaacaaagcatgaatccccaaaatttccgtaatagccgccgatacaatcaaaaccaaaaatataaaactgacaaaggtcttgtttataacttctttattggaataaagtgtaccgattttctttaaaaacggacgaacaacaacaaacatcacagctatatagacaaatgtaagaagaactgtatacaaagcacctcccaacgttcctgcttttgtaatagcaatgacaaccgccaacaaacaccaagctgtcacatcatcattggctgcagatgctatcgtaagaattcctacaggtttccgtgtcatattccgttcttgaataatacgggccaaaaccggaaaagcggtaatactcatagatataccaataaataaagcaaatggaagaaatgctgtttgctgggaagcatattcctcatatacccagtaagaagccaacattcccaagaagaaaggtaccaaaattcctgcatgactaataactaatgtttcatttatcttatttttcaatactccgaaatcaacctccattccaataacaaacataaatagtaccaaccctaactgactgataagttccagattagtcaaagaatccggttgaaacaaaaagccgaaaaactcaggataaagagatcccagcagggaaggccccaagacaattcctgccactatctcacctatcactcccggttgccctatatagcggaatgcagacgcaaaaatacgaaccgcaatcaatacaactataatttgaatgagtaaaatggaaaaaggatgctccagattatcaagtaatatagttttaaacatagtaaaagcatcatcacctgctgtcgctggctttatagatgacaaatgcaaaaaacgctcaccacctgctatagcggtataaatcaaccctccgaatatcaatagcatcatcaagtaaataaagtagtttttacgtgcctttctcatactcgttatacagaaataatattaatgaaaatataacaaataaagctgttaaagagttcatcaaccaaaaacctttttcatacctttgctctacaaatttcatgaagatgtccgaacgcaaaataatacatatcgatatggatgcattctacgcatcggtagaacaacgtgacaaccccgaattatgtggaaaaccgcttgctgtgggacacgctgaagaacgaggtgtggtagctgctgccagttacgaagcccgccgttacggagtacgttccgccatgtcatcacaaaaagccaaaagactttgcccagaactgatttttgttccggggcgaatgaatgtatataaaactgtatcccagcagatacatgatatttttcatacctatacagatatcatagagcctctgtcactagacgaagcttttctggatgtaactgaaaataaagcaggcttttcacttgctatagatatagccaaagatattaaaaagcgtattcgcaaagaattgggattgatagcttcagccggggtctcttataacaagtttctagccaaaatagcatcggattaccgcaaacccgacggattatgtacaatacatcccaaccaagcattggatttcatcgcccaccttcccatcgaatctttttggggagtaggtccggtaacagcccaaaaaatgcacacattagggattcataatggtacccaattacaagcctgcactttagaaatgcttacccggcagtttggtaaagcaggtaatctgtattacgatttcgcacgaggcattgacctccgtcctgtagaacccataagaatccgtaagtccgtaggatgcgaacatacattggaaaaagacatttctcttcattcttccgccatcattgaactatatcatgtagttaccgaattgctagaaagactgaaacgcactaatttcagcggtaacacacttactttaaaaataaagttccatgactttagccaaataacccgcagcatcactcaaaacagtgaactgacaagtatggataaaattcttccgttagcaaaaaaattactgaaagaaattgattatgaaagccaccccatccgccttatcggactatccatatctaatccaaaagaagaaaaagaagaaataaaaaaacaatgggaacaactttcattggaatttaaagagtgggattaaggtactggataaatgaatcaatataagattccattgtttcaaaccccttcactccattctttaattctaatccataatatattcccgccagcaaacctgtcaatgctcctaccgcatcacttgacttacctgagtttatagccgaaaatacgcactccttataactatttcctgccataaaccaattgaccactgattccaccgtatctacaacaaagcttccattacaaagattttgcctgttaacctccacatcacatctctgctcagcctgctgtaatgcctgttctttatcttcatattccaacaggcaacgaatgaactcaataaaaaaccaagtatacttaaagctataacgactattatgagtgatcttaataaaagaaaaaatctcctctttagataaaggagaaaaagccaaaacacaacaccccatcaaactgcggttgccactattagaatccgaagacactcccctgaaatttttcatgattgctttttgggtcacctgatcaatatcaaactcaatgttttctcctgtatactttctattgaaataccagtttcttaaattctgctgataaagttccaaattgcaacgactgtccaaagcacataataacatcgaggtattccctgaacatttatctccccgaagataagattttgtccatataggtttaaatgtcccttttccttttcccctgtaaggcattcccaaccaatctcctaatataaatcccgttagtcctgttttaattcttttcatggcatgtgttaattacaaagcacaaaaataataaaaagagaaacaaatccttgccttccattgttaaattcataattaatgggtattgataagtatgtatgctacaactaattttgttgccaacagaaaatgtattaccgggtaataaagaaaggagaacaaatgaaaagaatcgtattactccgccatggagaaagtacttggaacaaagacaaccgttttacaggatggacagatgtagatttaaccgaaaaaggtatcgctgatgccaaccaagcaggtacactcttaaaagaaaaaggatttcattttgataaagcttacacttcttttttaaagcgtgcagtcaaaacattaaactgtgtgctagataaaatggatcaagattggatacctgtagagaaaagttggcgtctaaacgagaaacattatggcgtattgcaaggattaaacaaaagcgaaacagcttctaaatatggagaagaacaagtattgatatggcgtcgtagctttaacgtagcccccaaagccctatcggaagacgatccgcgcaatccgaaaacagatacccgttataaagaagttcctgacaaagatcttccacgtactgaatctctgaaagaaacagtagaacgtatattaccttattggaaatgcatcattttccccaatctagctacagcaaacgaactgctggtagtggctcatggaaacagcctcagaggaattattaaatatttgaaacacataccggatgaggaaattgtaggccttaatctacctaccgctattccgtatgtgttcgagtttgatgatgacctgaatttgaagaaagactactttttgggagatccggaagaaataaaaaaactaatggaagcagtagccgatcaaggaaagaccacccccgacggcaggaaataattttcctgcgctgtccgaaacctccatcacagaatggagaatacatcaaaatagtgttttcaataatgcattcaagcgcaatcatacgcctttatactagaaagaaaacattatggataaagaattattaatcaataaaagaaaaaaatagtatgagtaaaataacaaatttattgggtgaccaagcagcattttatttagagcacacctgtagaactatagataaatcattaatccatatcccttctccaaacaccattgatgatacttggatatcatcagaccgcaatattcgtaccctaagcagtcttcaagccctgttaggacacgggcgacttgcaaatacagggtatgtatctattcttcctgtagatcaaggcatagaacatacagcaggagcctcatttgctcccaatccactttactttgatccggaaaatattgtaaaactcgctattgaggggggctgtaatggcgtagcctctactttcggagtattaggttccgttgctcgcaaatacgcccacaagattccttttattgtcaaactaaatcacaatgaattattgacttatcccaattcttacgaccaagtgatgtttggcactgtaaaagaagcctggaatatgggggctgtagcagtaggcgccactatctatttcggttctgaacagagccgcagacaactggttgaaatagcggaagcttttgaatatgcccacgaactaggcatggctactattttatggtgttacttacgtaataatgcttttaaaaaagacggcgtagattatcatgcagcagccgatttgaccggacaagccaatcatttgggagttactatcaaagcggatattgtaaaacaaaaattaccggtcaataacggtggttttacagccattaaatttggaaagacaaatgataaagtttataccgatctgacttcagaacatcctatcgacctctgccgctatcaagtagccaatggatacatgggacgtgtaggattaatcaactctggaggtgaatctcatggcagttctgatctaaaagacgcgataataacagcaatcgttaataaacgtgccggaggcatgggtctcataagtggacgtaaagcctttcaaaaaccgatgaaagacggaattgaattgttaaataccattcaagatgtttatttggattcaagcatcactatagcttaactttcactatatgtccaagccgggaacaaaacagccacctttccatgttctcggcttttttatactctcggcttccttttttaagtagcaaccttcaagtattaagataatattcctacctttgcaatccgatacacattattatattatataaggtatgatgcaaataaaagtaacggcacccgctcaaatatatacaacgatccagctcccctcttccaagagtatcagcaaccgtgcattgattatcaacgcactgggaaatagaacattccaacttgagaacctatctgactgcgatgatacccaagtaatgattcacgccttaaatgacggcaaaaataccatagacattatggcagccggaacagccatgcgctttcttaccgcttatttgtccgtcactccgggaacacggatcatcactggtacacaacgtatgcaacaacgtcccatccaggtgttggtcaatgctttacgtgagttaggagcagaaatagaatacataatcaatgacggatatcctcctctgcgtatcaccggacacaaactgcagaaagataccatcagcctgccgggcaatatcagttctcaatatatctcagccttattgatgattgctcctatactaagtaacgggctggcccttacactgacaggagaaattatatcccgcccttatatcaatcttaccctacagttgatgaatgactttggagccaaagccaaatggctcaatgaatatcaactaaaagttgagccacaaccctaccaatccatacctttctacgtggaaagtgattggagcgcagcttcatattggtatcagatagccgctctttccaacaaagcggaaatcattttaccgggattattcgaaacaagctatcaaggggacagtaaagtggctgaaattttccagttactaggaatcgaaagtatttatggaaataaaatggtaacattgaaaaagaccgataaaatagccgaacgtctggattatgatttcatcaaccaaccagatttggcacaaacatttgttgtcacttgtgcgttaatgaatattcccttccgcttctcaggcttacaaagtttgaagattaaagaaacagaccgtataacagccttgataaaagaaatgggaaagctaggatatatacttcatgaaatagacgatcgtattctgtcttgggaaggtgaacgatgtgaaatgaccgctgatgccgccattgacacttatgaggaccaccgtatggctatggcgttcgctccggtttgtgtagtgatgcccgaaatccggattaacaacccacaggtcgtttcaaaatcctatccttactattgggaagatttaaagaaagctggttttataatagaggagatataaagttatgctcatacttattattggtctgattattttggcaggtatcgccatggcagtgggagttttacacaaccgccagatacaaaaaaagatagaaagcggagaattgaagaccgctcccgaaatagtggaagcagacgctgaatgttgtggacaacatgaaatttgtgaaaaagaaagcctgcttgccgctgtcagcaaaaaaatagaatattatgatgatgaagaactggaccgctttcgcggccgtccctcaaatggttataatgaagaagaagtggaagaatttcgagaaatcatgtacacttgtaaagaagatgaggtagccggatggagccgtagcctgcaattacgtggagtagaactgccagacgagttgaaagacgaacttttcctgattgtaggtgaacgaagattcaaataatccgccctacatcaaacaaagcctccatttgaataaaaaccactgaaaaaagaatacagtatggatatattagaacttttgcattatactttcttccaacatgccttgctaggaagcttgtttgccagcattgcctgtggcattatcggcacatacattgtgacgcgccgtttggtatttatcagtggaggaattacccatgcctcttttggaggtatcggtctaggattatacgcagacatctctcctctattatctgctgcaatcttctccgtactctcttcctttggggtagaatggttaagcaaacggaaagatatgcgcgaagactctgctatcgctgtgttttggacttttggtatggcagtaggtattatatttagctttttagctccaggattcactcccgatttatccgcctttctgttcggtaacattctgaccattacgcccacagatattttgttacttgccattctttccatactgttgatactatttttcactttatttctaaatcctatcatttgcatcgctttcgaccgggaattcgcatgttctcaacgtataccggtagctttatttgaatatattctaatgatgttcattgcactgaccatcgtatcatgtctccgcatggtaggtatagtacttgccatttctctgctgaccttaccacaaatgaccgctaatttgtttacccatagtttcaagaaaattatttggtggtctgtcatcattggttatgcaggttgtttaggtggactgttcatttcttataaattacaagttccttcgggtgcagcgataatctttttttcaatcctcatctatactttttgtaaaatggggaaaagcatgtacctttacaaacaaaagaaactcaatcaaaccaatgaatatggaaattaaaatcaattctttaaactctatccacgaagctgccaaacaattcatcgcagccatgggtgacaataccgtttttgctttctacggaaagatgggggccggtaaaacaacatttatcaaagctgtatgcgaagagctgggggtaacagatgtcattaactcaccaacttttgccattgtcaatgaataccgttcggatgaaaccggcgaacttatttaccattttgatttctatcgtatcaagaaactggacgaagtatacgacatgggatatgaggattatttctatagcggtgccctctgcttcatcgaatggccggaactggtagaagaactcttgcctggcaatgctgtaaaagtcgagattgaagaatctgaagatggaagccgcatcatgcgctttgaagctgaataaaagaaaatatccactgtagggacgaacataatctgcccctacagccaaattcattaaattatgggaatgcattatctgatccaagccatattcgtattggtaggactactgtctgttctggcagccttatttaattgggagtggttctttaccgcacacaacacacagttcattgtcagtaatgcagggcgccagcgtgcacgacttttctatgctatattagggctattaatgatagctacaggaatctatttctttttgaatgtacaaggcatcgtataaacacatagtaaacaaaatctgtgaatattaaatttccctatccaccagacataaaacacttttttcaggaaagagcgggattttcacccgccctgttataaccaaattccaaatcaatctataatttcagccaacagccctctagtttcatcaagatcaaattctgtaggatcaaaattataccccaaccattctttatattcacgcgcagctttggagcgaggtttttctaaagctttcagcatttccctatacccccatatgccattacaatcttccggcggacaagcattttcaccatccaacaaggcaataaccggaatttcctctttcttataagactgacaggattctaatataatttcatgtatccaactatccccgaaatcatattcatacttaatctttgatcccttgcgacttaataattcacctaaagaaagcataccggaatcaaactgtttgagtgcaccttcaaaaaaacaatcacctgtccgatctttgggaggaagataataagtgtcccccttaataaaacgatgcaaatgataaccatcccatcccattgccacttctaccacctcagaaaatctttccaagcaaatattcgaagggacctccaatatgcgccaaactaacggttcagaatctttcaactctatttttattctaagttttttagcaggctgatcttctatgtaaagcggatcatcgtaaatttcctcatcctcgtcctcatcagtagcagcctcaaaaacttcagctaaataatcttctacccgctccatttccaacccatgcatttccgcataaggcatttttttctttagttcattaatacttggaataccataaggtttaatatgataagtccgataaatcttttgcaaaataggtaaagtttctacccctcgaatatccatcatgcaagctgtaacatgatcaagcagcaaagtggaacaaatatcattcttctgatctttcagtatatcaaaataataacccaacaaattaccaaaccaatccatcacttcctctcttctggcaggatgagttatcacaatatgagcaaccgcttcaatcactctatatttagacataggaagcaatccaggctctttcataaagtccatcaaaacatctaattgattctgtcccaattgataggttatagcagacaacattgcttcatacaaataaccgaaataaaaatcatagaaatccaagtcttgccgcaatacttccaaaacaatatccaaacaacgttccatacgaaaatgctccatcattcctaatgcataccacattctatatgaataacatttttcgggcattttccgatatacgacaaagatgttaaaaataaaattacggagatctcgttccaatgtttcttgtggaataacagcacaagaagagtagatttcagccggtgacagactactcatatcatccatcgtccacaaaggcatcaaataagatgcgactggctgtgcaatcaatctataatcgggacactgatgatgataataaatatgagacagttcttcatctacctgattggctccatcattaaacaattcaaatgcaatttcttgttcttccggagtcaataaagacatgatatcctccaaaaaaccaggtaggaattgggaatttttctttttagccattaagcaatgtttttatagttaaaatgagcatgagcgtttttacaaaggtattctattattttcttttacaaaagaaataagagagctaatagtagatattaccttgttttcaaatataaaaaatgcgtatccctagctggagatacgcatcttttattttattatgagactatcttcttaatctacctgtcccaatgaattcccatattccatttccccctggactacaaagaatacatcattggggtcataaggccccattccgtctttcttggcttccttgactatgtaattcacaatttcatcttgatcaatattaatgtatccctcttcatcaggttgtacatcaaggcatccgctggaggtatagtaatccacaatcacatcaaggatataatacaaatcatcctccgtgaatttatctttcaaatcctgaggcagataatttttgataaactctatcgttttttgatcatcctcatcttccaataagaaatcgtcttccattcccatagtcgtatatattaaagggtgaatattctttttattacagtaaagctttaattttttcttccagctgggccttggtcactgcacctacagtcttatctttcacttcaccatccttgataaaaagaacggtaggaatgttacgtacaccaaatttaccggtcagttcgtcgttatcatccacgtcgcactttccaattattacctgatccttatattcttctgccaaagcttcaacatccggagctatttttttacaaggaccacaccatgttgcccaaaagtccactactacaggcttgcccgatgccagcaattcttcaaaattgctatctttaatttctagtgccataattattatacttagttatttaaaatgttagcgcaaatatactaattaattttgtaagagagctgtggttggctctttaaataagtcatgatctctttttgaaccgaaatcttcatagtacgtgacatcagattgacatacatttgcccatcctcatccattacatgaaaataaagctctgcattaccgggatttgccttgattaaggctgaaaactccgttatcagctcttcatccaatgcagacaaaggagctgaaactgtaagtttctcaataatcttttcctttacttctggtaataattcaatagtacttatcttcacctcccattcttcctgccgccattgttttggctgacatttccctcgcataaataaaaacataccagtcataaaaaagttcttcttctctacccattcattaccgaagaaagcaaattccgctgagcccgaataatcttccactttagcaataccgtatggttttcccgtcttggtatatccctcacgcactgcactcacaattccccccatggttaagtctctgttctgcaaaggggttaaatcggcaagttccgccatgtggacattacatacattctctaatataacagcatactcatccaacggatgggcagaaagatagatacctaccaaatcacgttctttattcaaacgttccaaatccccccatgcaggagacggaatgatttcgggagtagcaatatccacttgattctcacctccaaacaaagaatttgcagctgcggctttatccatctgatacttatttccataacgtaccaaaacttcggtaaaggtttcatccttagcgttctttacaaagaagtcttcacgctttattcccgtgaaactatcaaaagcacctgccaaagccaagttttctatattcttacgattacaagccgaaagatttacacgctgtacaaaatcgaaaatatctttatattctccatttctctcacgttcttcaaggatagactgcacagcactttcccccactcccttaatggctcccagcccaaaacggatatcccctttacggttcacagaaaacttcagataactttcattcacatcgggtcccttggtcatgatgccagtcgccttactctcatccatcaatttagtaatttccgtgatattcgaaatattccggctcatcgtagctgccatatattccgcgggatagtttgctttcagaaaagcagtctgataagccacccatgaataacaagtagcatgagatttattgaatgcataagaagcaaacttttcccagtccgtccaaatcttctcaagtactttgggatcatgaccgttctttcgtccgccttcaataaacttaggcttcatatggtctagtttatctcttagttttttacccattgctttacgcaaggcatcggattcgccacgagtgaaatccgccaacaaacgtgataaaagcatgacctgctcctgatataccgtaataccatatgtatctttcaaatatttctccataataggaatatcatactcaataggcttacggccatgcttacggtcgataaagtccggaatataatccataggccccggacgataaagagcattcatcgcaatcaaatcctcaaaagtactaggttccaattcccgcaaatatttctgcataccggcagattcgaactggaatgtaccaatcgtccgtccttcactataaagagcataagtaggaggatccgaaatgtcaacctcgtcaatgtccaagataatccccttactatgcttaatattttcaatcgcctctttgataatagaaagagtcttcagacccaaaaagtccatcttgatcaatccagtatcttcaataactgaaccttcatactgagtcaccagcattttttcaccggtttccttatcatctgccgtacttacaggcacccagtccgttatatcatctcgacatataatagtaccgcacgcatgcacacctgtattacggacattcccctccaacatctttgcatactttatcgtatcacgcaaaataggatcaggtgagacttccgctgcctgtagttcaggaacataagctatggcattagtcaaattcatttttttatcaggaatcttatccggaaccagcttacacaaacggtcagactccgataaaggtaatttctgtacacgggctacatccttgatcgctagcttggttgccatcgtaccatatgtaatgatatgcgccaccttttcctgaccatatttttcagttacccaattcagtactcgtccacgaccatcatcatcaaaatccacatcaatatcaggcaaagaaatacggtcgggattcaggaaacgttcgaacagcaaatcgtatgcaatagggtcaattttagtgatacccaaacaatatgctacggcagaacctgccgccgatccacgtcccggccctacagacacgtccaattcttcacgcgcggcacgaataaaatcctgcacaatcaagaagtaacccggaaaacccatcgtcttcataatatgaagttcgaatttgatccgttcctgcacttcctcattcaagacttctccataacgcttgtgcgcaccttccaacgctaatttcttcagataatcagcttccagtttaatacgatagagtttgtcataaccacccagtttctctattttggctttggcggcctcctcactcattaccacgttaccgttttcatcttgagtgaactcatcaaacaagtccttttctgtatatttcttccgatacccctcttctgtcccaaaatcttcaggaatagcaaaagtaggcataatcggtgcatgatctatactataaaattccacctgatcacaaatatccaccgtatttgaaagagcctcggggacatcagcgaaaacttcattcatctcggcacgtgtcttcatccactcttgctttgaatagagcatacggttaggatcatccaaatccttacccgtactcagacagatcagcctgtcgtgtgcttcagcattctcttcatctacaaagtgaacgtcattagtacaaaccagcttgacattgaattttctagaatactctatcaacttttcgttagcaatttgctgcaatttataagcttcatgattcgcacgaggaaccgtcgctttatgacgttgcaattccaaatagaaatcatctccgaatacacgtttataccattggatagcctcctctgcctcttcatattttccagctattatatttctaggcacttctccggcaatacacgctgtacaaacaatcagcccttcatggtatttttccaattccacacgatcagtacgcggacgcatatagaacccttccgtccatgcctttgacactaattttatgaggttgtggtatcctttttcatttttagcaagcactaccaagtgataaccactttgatcgggttttccttctttgttaaataaacgacggcgtgccacatacatctcacaaccgaaaatcggtttaaacaatttcctctttgccgcctccaacttctccttgcacgccacaagttccgcctcgggattatcacattccaccgtacctttttccagtccggctattcttttcttcaaatcctttatctcaccgttagtactgctattcttcttattcacataattgaagaattccttgataccgaacatatcaccatggtctgttacggctatacctttcattccatcagccatagccttgtctaccaaacgtggaatagacgcctggccatcaaggatggaatactgggtatggacatgtaaatggacaaaatcctgcataatcgttactctcctaaaaaattgtctaaagatactccgctttcataaaacctgcaaaaagataaagaagaagttatcaacattcgctttttttatcttaaatgaagtcgaaataggcatttctaacaacttttatttgcagggttttcaaaataagtttatttttgcacgataattggttttatacaatcatgaaccgactgaagaaattaaagaaaataagactacatagagaaggaacaagcatcttaattgtcagtgccatcctattaattggtatcaatgccctgttgttttggggaattgagtgcaaaattccattctatatatttgccgccgcaagtatcgttgtttacctgttaatggttaactttttccgttgtcccattcgattattcgagcacgacaccgaaaaaatcgtagtagccccggcagacggaaggatagtagttatagaagaagtagacgaacatgaatattttcatgaccgccggttaatgatttctatttttatgagcattgtcaatgtacatgccaattggtatcccgtagacggagtagtgaaacatgtagaccatcataacggtaaatttatgaaagcatggctgcctaaggccagtacggaaaatgaacgttctatggtcgttattgaaactcccgaaggacataccgtcatggcgcgccaaatagcaggagcaatagcccgtcgaatcgtgacctatgccgaagtaggagaagattgctacattgatgaacacatgggttttattaaattcggttcgcgtgtagatgtttatcttcccttaggaaccgaagtctgtgtcaagatgggacaagcgactgtaggtaacgaaaccgtcattgctaaactaaaataaaaaaatcaccaatggcaaactgtatcacacgccacattcctaacgcagtaacttgctgtaatctattctccggttgtattgccagtgtcatggcatttaatgaagactataccttggccatctcttttattatactaggtgctgtatttgatttctttgatggcatgttggcacgtttgttcaaagtatcaggtcctttaggaaaagaattagactcgttggccgatgacatcacttttggattcgctccttccgccattgtcttttccttatttaaagaggtacactatcctgattttctattgcctgttgccgattatatgccttataccgcattccttatttccgtattttcagctttgcgtttaggcaagttcaatatagacccacgtcagagcagtagttttattggtatgcccactccggctaatgctttattttggggatcattgactgtaggagcacattctttccttatatccgattcttttaatgcggcatatcttttcattttggtagttattatgtcattattgctggtggcagaaatcccaatgttctcattaaaattcaagagtcttgcctggaaacagaacaaagtcagctatattttcctcattgtatgcatccccctgttgattttttttaaaatcagcagttttgcagctatcatcctgtggtatatcattctatctcttttaactaaaaaaagagcgtaaacaataaacgtggcacgcttgttgtacgtgatatataaaaaaagaaattactatgtttggatttttaggctttctacttattatttttctgctgattgtttttatcggcttcactatattaggtaacattttgcgtgtattgttcgggatcggcaaacgtcccccctatcaaaatcgaacttccacccaccagaaacaaaatacatatactcagaatcaagcgaatgacgagaatgagaattttgcagaatcctcttcttcaaatagacgttctcattcgtcgggaaacagaaaaaaaatctttgatgaggatgagggagagtatgtagattatgaagaggtgaaataagaatcatcgttttttcttaaagaaatctttcatcaatcgggcacattcatcggcaagtattcctttcaccacgatcgtctttgggtgcaaggcatcgggagcatatttttgatatcccctctttggatcttcagcaccaaagacaagttttcctgtctgtgcccaagctatagcaccggcacacatcacacacggttccactgtgacatacaaagtacattcattcaggtattttccccccaatgtattagccgcagcagtaacagcctgcatttcggcatgagctgtaacatcattcaatgtttctgtcagattatggccacggccaatgatgcggtcacgacagactaccaccgcccccaccggaacttctccctgttcagctgcttttacagcctccatcaaggcttgtttcatataataggtatcatctgccatcttatcttctcatatcatgttcattaaacaacgtaggataatcctcttccatcttctgatggataaaagtcaatactgtttcgcgtaaccaacgcgccttattggttatcttatattttttaagataacaatccacaatccgtacctcctcttcactcatcagacataccatacgctgcttgcgtttaggggttgatgccggtacttttaccctcttttttacgttgtttgccatattctctgcaaaattagctttacttctgtaaatacaaagcataaaaaagagtatttttg

SEQ ID NO: 14511 - DNA, 466 bp, Unknown
  gut microbiota DNA sequence
gcatctgttcaaagaaatactggtacggattattaaaagtacgtccggatttatccgaggcaccccgtggatcagtcaaatgaaacaatgcattacccggatcagccaacaaagcctcgtagtattttttagctattgagtacaagtcttgccagtcagaacgacgtccataagtagctccattattttctttccctttggtttcaaatgtcatgctttccccttttccgttcacacgtttgatatcgccacgacgagtctgatatccagctgcatccaaacacattcttccaatcaaagcctgcacataggttttagaaaaataatttttattagcagcagcaatgccgggaatggaaccgatggtgtacatcaaaggctccactttctgcaaatcttcaatgcatacatcataaatagaatcacgggaaaccaaacctttaggcacaacaccataaacgccaac

SEQ ID NO: 14512 - DNA, 20002 bp, Unknown
  gut microbiota DNA sequence
agataaattcagatataccataattaatgtacacaatggacaagacaaaattataaacacagcactgtataaatgagagggaagatataaataaagtccaataggaactaaagaagaacaaaaagagacctttaatatcggctttattacatttatcaagtagtcatgtttattcatctttatcattggacatactacccacactctcacaaattgagctattatttctatcaataaatgtacaataaacactgttctaggcagcattcctaatttcaaacataaatatgcaacaggaaatatcaacagcaacacccctccctctaacatttgaaacctctttattttacctgttgcatgaactgaaacaatcataggattagacaatgcattacacaaagtgataattaacattatccgaacaaaaggaattgtataatcaggtacaactccaagccatatagatagtataaatctactctctaaaaaaacaggaaaggacagcaaaaagagtaaataaaacgaataacgtgaactcgcaaagaccaattcatgcatataactataatcccctattgcataagattttgttatttgaggattcaaagccatttgaaaattgcgacaaaaatttgatacagctaattgaacttgcactgcaagacctctcgcagcattcactaccggattaaaaaacatattcaaaagaagattcaagccttgagtatagcccataacagctaaattgccattcattgtccaaccagcaaataatagcattctagaaaacagctttttatctcttgtccatacaaaatgagactctcgaaaatgtttcttacaatatgtactatacaccaggcaaacaaatatttgaataataaaagtgagtactacatataatttcaatttatcataatggaacacaacaagtacatatacgataataagtttcaaaataacttccaaaacagaaatatatgcaaaagcgcccattttttcgtgagctataatcactgcattataaggtacactcataatcattacaaccgctgtcaaaacagcaaattgaaaaacccaaaatgcggcatccatccgttctattggaataatcattttatgataaaagaaccaaagacctattgtttctgctaaaagaattataaccaacgaaataatgccatgtattataacactcatactaaacacttttgataattctttttcttctcctctacctaaagcaaaagttataaaacgttgggtgcttcccgtcattgcactgtttataaaactaaacatagttactgccccacccacaacattataaataccataatcctccacaccgagcgtaaccaaaatcacacggctggtataaagatttacagccatcataaaaagcatacgaaaataaagtaatagagtatttttagctattcttttattattttgctgagataaagcagacattttcaattataaaaaagcacattaaaatattatgtctataatagacaagtcccgtaatatgtatcctaattctattaatatattcaaatcacttgaaagatatatatcttccacctgcaacattactaagcttacagcccacacattagtaacgtgtcaccccacatgttactaaccttccggcatacacgttactaacccttaaaagatcctattcttttccgaaaagaacaaggtctttaaaaaaaagaacaggacgttttcattgaaagaacaagagcttttaaaaatttgacctgttgtttttcccataacggtatctacatgccgaaacgccttacttttccttcagatctttcagccactccgcaaacaccctgcctgtcggcattccggctgaaggatatgcattgtgaaatgtttcagccggaaaatatccttcaggaaaaacgattccctaagaatcggagaaagatcagttcggctgaaacattccaacccctagctgaaggattcctgaacccaatccttcagccggaatgcccacgggtagggcgtttgcgagcaggctgaagcttttgaaggatttttcagggtattccctatatagcatgatcaataaccatattccactgaaaaaagtaagatatcttcgtgagcaaagtaatatatgtccgcagacaaagtaacaccacttacttggctcacgaagtccgcatacttttctttacaacaaaacagacctcacagccatctcatgccaatgacgataatcccccatcggcaaaacatgctccgaccacactttccggtaaattccatcgtgcaaaatgatgtactcacccaaacagccctccgcctcatcggcaggaacagaaaccatcaccacatattccacacaatccgggacacgaaacaaagtcagctcacttttagaaaacaaaccgctcaacctacaggcggaacgctcgaaagccacccaatacgcgccaatgtcatacagatgaatgaatttatcattattcttttccctggctaaaatttccttatactgattctgaatcagctgctggagccggatgcctgacggcatgaatgtggttctacacattattatacataagatttatattatcagatcgtttacttccccattaatcaaggaataagcatgtttaacgtagcaaatgaagtcatctcttcttcggctcttctatcacttctatcaagtccggcgaaagcgtcgccatggccatggctatcaccccttgcagactgataaccacacgacggtctctcgcacctttcacctttacaaacaccccctcgtagccctcgaagtcaccacctgtgatgcggactttcgtaccgcgccgtaagttcacctcatcgggactgaagaagataagatgctcgtcatacgttccagccacagcgataaactgcctcatctgatcatcgggcacaatgattttctgcccgttgcggatatcaatcatatattgaaaatacggaagtttaaacttcaccttctgaagttcggactggacggcatgaacaaatatcagatcactgataacgggaaccagctcacgcctcttgcgcccgttccctatacgaacttcgtaacgcatggggatgaaattgttgattccttctttatccaacaaagccttgatctgcatcccccggcgataagtggcacgcatggcaaaccattgcattttttcacttgagaacatagttatggagctttgaattacagatatctatctgtaattcaatcaattacgagaagtttcgtaaaatacaagaggaatcggcctcttgtgattaagctggccggagaaaagctatttcaacaaatggaggatgggaatccgcacaatgtagatgcagcctgtcgggtcaaccaatgaccttccgcagattcccgaaccggacggttcttatgtgttaaatcagaattgtaatacctatatataaaaaagcgcgggaatctgtacctgttactcgtcccgccctacaaggccttcgcattgcccaatccagtctgaacgagcaacgcagaagcccacgccgatatgtataatgacacttgaatgcacctttgaccggcaaaggcgcaccaaggatataaacataccccgcagacacctactgttgctttgttttggctggattttagaatttgcgaagttctgtagagccaagaacaaaacgtcaagtaaacgtcttttctatatatgtatatttcccacctccctaacttccttgcggaagtaccggcgtggaaaacgtggcaaagatagcaatttaataaataggacgaaaatatattccgctatttttagtgatgtttctttaaatgtcaactgatgtcggaactgaaaaacggaaagctggtgcaataacaatatggcattatttatcttctggtcattttattcttcaatccattctacaatttcttgtgaaaacggactagtagtagagccgattgaggcaacccatctaccattttcatcaatcagaaacttatgaaagttccaccctatcttagcatccgaaaccccgttttcacttttatgcgtaagccattgataaaggggagctatatctttcccctttacagatattttagccatcataggaaaagtcactccataattcaacgtacaaaactccttgatttcttcattcgttccgggttcctgatgcaggaaattattggcaggaaatccgataacgacaaaatcatcttttccatatttctcatacaactcctccaacttggcgtactggggagtaaaaccgcatttagatgccacattgactaccaatactttcttacccttgaatgtggaaagtggcaagtccttcccgtcaatagtcttgaccgtaaagtcataaaaacttttttgctgtgcaccagctaccgatgtgatcatggttacaattatgcttaatataaatgtcttcatttgaaatgctattttataatagaacaattcatgaacttgaaaagttttctctgaaagaaaagattgacgagagaaaattgttatctttgttcttctgaaaaagaacagaagatatttatgagcaaacaaggaaccatcatagtagtagatgataacaaaggagtgctgtcggcagtaaagctattgctgaaaaatcatttcgaacatatcgtcacattgccctcacccatcacactgcccgctgcgttacgtgaaggaaatgcgcaagtggtgctgctggatatgaatttcagcagcggactgaataccgggaatgaaggtctgtactggttacacgagataaagaaaatacacccctccctgcccgtagtacttttcacagcctatgctgacatagacctggcagtgcgcggcatcaaggaaggagcaacagacttcatcgtcaagccttgggacaatgcccggctgatagaaaccttgctgtctgcctgccgcaattcctccaagaacaagaagagagcggaaatccctaaaaccgtatcttctatgtattggggagaaagcaatgccatgaagcaactgcggacgctgatagagaaagtggcgcaaacggatgccaatattctgattacaggagagaacggcacaggaaaagaaatgctggcgcgggaaatacatgccttgtccaaccgataccggcgggatatgataacagtggacatgggtgccatcaccgaatccctgttcgaaagcgaactgttcggtcataaaaaaggctcgtttacagatgcccataccgaccgtgctggtaaatttgaagccgcccatgaagggactttgtttctggacgaaataggcaacctgccctatcacctgcaatccaaactactcaccgccattcagagccggagcgtggtgcgagtaggaagcaacgaaccgatacctgtcaacatacgtttgatttgcgccaccaattgtgatttggaagagatggtggccaaaggcaaattccgcgaagatttgctttaccgcatcaataccatccacatcgagattccccctctgcgggaacgcaaagaagatattatccctttggccgaacgctttatagaccggttctgcaaacaatatgacaaaggaaatatccttctttctaccgatgcgcaagaaaagttacggacatatccgtggtatggaaacatacgcgaattggaacatgccgtagagaaagcggtcattatcaatgaagatggtatattgagtgaggaacattttcatttcccccgaaaagtagcggctcctgcgacagaaacaagtgtctcaactctggaggagatggaattgcaaatgattcagaaggcgatagagaaatgcaacggaaacctctcagctgtagcggcacagttgggaattacccgtcagacgctttataacaagatgaaaaaattcggattatgaccattttctcatgtccttcctcactacaatcaaattttaaacagactctaaagaagcatcaacgaaacaataaataatcaagctgtgaaacaattcttcttccgttttttcactgtactgttcctaggtattgcctgcatcttactaatccagcagcgcaattggctgtggctatgcatagccgtaccttcattccttgtttccataggctggttttaccgcctgtacacttttaatacccggaagatagcctttctgctcgacgccatcgaaaacgacgaccccgctgttcgtttttatgaacatgcctcccctggcgattcttccatggtcaatgtcatgctgaaccgcatcgcacgtattttgtacaatgtaaaacaggaaacggcacaacgagagaaatattatgagctcatcatggactttgtagaaaccggcattgtggtgctgaacagcaaaggctccgtttatcaaaagaataaagaggccatgaatctgttggggctggatgttttgactcatgtcaaacaactctcccgcatctcggatgaactgatgattgctttggaaaaagcagttccgggtgacaagctgcaaattcagttcaacacagaacggggaacagtacatcttgccttacgggtgtccggcatccgtatcaaagacgaggaactccgcattattgccttgagtgatatcaatcgggagctggatgaacgggaaatagattcatggatacgcctcacccgcgtactgactcatgaaataatgaattcactcactccggtgacttccctcagcgaaacactactggctcttcccggagcagaaaatgaagaaatgaaacaagggctggaaacgattcactctacaggtaaaggattgataaattttgtcatgtcttatcgcaaactgacacgactgccatcacctgaaccatcgctgttctatgtccgtcctttcctggaacggatgatccgactggcacagcaccagcatccatgccccaacatcactctttccatcctcgaagcccgggaagacctgatagtctttgccgacgagaacctgatagcccaagtggttacgaatctgctgaaaaatgcgattcaagccataggtaatgctcccgacggaaagatcaccttgaaagcttattgtgatccgcaagaaagtatccgtatagagatagccaacaacggtcccgctattcctcccgatgcagccggacaaatttttgtacctttcttcacgaccaaagaggaaggaagcggcatcggactgagtctaagcaaacaaatcatgaggctgagcggtggcacactgaccctgctgccttacaaggaaaagggacaggccactgtttttgtactggtttttaattaaaaataaaaatgtgctaatgtgtcagccaattaccatccggtacacagcgcagccattagcaaattagcaaattatttaaaatgaaacattctcctgaattattagtttataaagcctctgccggttcgggaaaaacattcacactggccgtggaatatataaagctgctgatacagaacccacgggaataccgtaatatactggctgtgacttttaccaacaaggccactaccgaaatgaaagagcggattctgagccagctatacggaatatggataaaggataaggattctgatccctatttacagaaaatcacagaagaactggaaatgcccccagaagacataaggacagccgccggtacggcactgcactacatgatacacgattacagccgcttccgggtggaaaccattgactcattcttccagtcggtgatgcgcaatttggcacgggagctggaattgggtgccaatctgaatatcgaactgaacaatatggaggtactgagtgatgccgtggactccatgatagaaaagctggaccgacaatctcccgtactctattggctgttggaatacatagaagaaagaattgccgatgacaagaggtggaatgtttccggtgagataaagaatttcggacgaaacatcttcgatgaaggatatatagaaaaaggaaatgggctacgggaaaaattacgggacaaagactgtatcaagaattaccgcaagacgctgcaagccattttggaagaggtgcaagaacaaatgaaaggatttgccgaccaattcttcggaatattggatacaaacggggtgaaagtagaagatttgaaaaacggttcccgaggtatagccggctattttaataaactacaatcgggcaaactggatgacagcgtccgcaatgtaacagtggaaaaatgtctggactgccccgacgaatgggtgaaaaaaacctcccccatacgcaacgctatcctaggtctggcagaaaaagaactgattcccctgctgaatgaatcggaaaaatatagaagccggaacaatatgctggccaattcctgccaactctccctgcgccacgtaaacaatatccgtctgctggccaatatagacgaagaggtacgcgaattgaaccatgagaacaatcgcttcctgctgtcggataccaacgcgttgcttcataacctggtaaaagaaggagattcctcgtttgtattcgaaaagataggaacaaccatacgcaacgtaatgattgatgaatttcaggatacttcgcgtatgcaatgggacaatttccgtctgttgctgctcgaaggtttgtctcagggagcagacagcttgattgtaggagacgtgaaacaatccatctaccgctggagaaacggtgactggggcatactgaacggactgaaaacaaacatcgaagcctttcccgtcaaagtaaagacactgaccaccaaccgccggagcgctgcaaacatcattcacttcaacaacgaagtgtttacagccgcctgcgaggtgttgaacaacatttataaggaagaacaaaaaaaggaatgcaaggaactgaaggaagcctacaacgacgtgtgtcaggaaacatacaaagatcccggaaaagggtatgtcaaagtggaatttctatcggatacggaagacatgacctatatggaaaacaccctgtaccacctaggagaagaagtggagctgcttgtggcgcagggcgtgcaactgaaagatattgccatcctggtgcgcaagaacagaagcattcctttaatagccgattacttcgacaagaacacctcttacaaaatcgtatccgatgaggcattccgactggatgcctcactggcggtatgtatgataatggatggcctgcgctacttgtcacaacccggaaaccggattgccaaagcgcaactggctgctgcttatcagaatgaagttttacataaaggaatagatctcaacactctattgctgaacgaaatagatgattatctgccattcgatttcataaaagaagcggaacagcttcgcctcatgccactgtatgaactgatggaaaaacttttcaatctgtttcagatgtcctgcatcaaacaacaggatgcctatctgtgcgccttctttgatgccgtgacggaatatttgcaaagcaattcttccgaattatccgcttttatcacctactgggaagaaaaactaggcagcaagaccatcccttccggcgaggtggaaggaattcgcattctctccatccacaagtccaaaggcttggaataccataccgtactgctacccttctgcgactggaaaatggagaatgagacttacaaccatctggtatggtgtgctccccggcaagctccgtttagcgatcttgacattgttcccatcaactattccacagccatgcagcaatccatttatcgggaagagttcctgaatgaacgcttgcaattatgggtggataatctgaacctgctttatgtggcatttacccgtgccaaaaagaacttgattatatatggaaaggcggaacagaaaggaacggtatccgaattgttaggaaatgccttatccgacatgaccggaaagagctatgccaccggagaagaaatatacgaactgggaacgctctatctctcatctcacgaagaggaaaaacaagtgtccggcaacaagctgctgactgtagcccgacgtttgcctatccatctggaaacgctggaaaccaacatcgaattcaaacagtccaaccgttctgccgaatttatccggggagaagaggaaacggaagacaaatacatccggcaaggacagttgttgcataatctattctccgtaatccgtaccacggacgatgtgcctcccgccatagaacgcctgcgtttcgaaggaatcatagagtcggcacaacaagaggaacaaatacgaaaactcaccgaatgggctttgaggcatccgctggtcaaagaatggtattcgggccgctgggaactatacaatgagtgtgccattatttatcgggaaaaaggagtcctgcaaacccgccgtccggaccgcgtgatgatgaaagacggggaggtgattgtggtggactttaaattcggtaaaaagcggaaggcttacaacaagcaggtgaaagaatatatggatttattatcagacatgggatatgagcatatccgtggctatttatggtatgtatttaacaacgaactggaggaaatagaataatggaaagctttttgaaactggtagcagccgatttatataaacatacggaaggaaacctggcacatacagccgtggtttttcctaacaaacgtgccggacttttctttaatgagtatctcgcccaagagtcggactcacctatttggtcgcccgcatacgtcagcatcagcgaattgttccgtagtctttctccatgggaagtgggtgatccggtaaaactggtatgcgaactttataagatattccgacgggaaactcaaagtacggaaacactggatgatttctatttttggggagaaatgctgatcagtgattttgacgatgccgacaaaaatagagtggataccgacaaactgttttccaatttacaagatctgcgcaacataatggacgactacaccttcattgatgatgagcaggaagaagctatccggcagttcttccagaacttctccatcgaacggagaacagcgctgaaagaacggtttatctctttatggaacgtattggggaacatctacaaagggttccgtgaatccttagcttctcaaaacattgcctacgaaggaatgatgtaccgtcacgtcatagagcatctggatgtggacaaacttccatacgagaaatatatttttgtaggatttaatgtgctgaacaaagtggaacatacgttgttcacccaattgaaagatgccggaaaagctgttttttattgggattacgacgaattttatatgaaggaaaacagacaagccgtcacccatgaagccggagagtttatccgccggaacttacgcgactttccttctcctttgtccggtgagttattcaaaaatctctcgaaacctaaagaggtacactacatcgcatcttccactgaaaatgcacaagcccgttacctgcctcaatggatacgaaacaatctgactacaccggaaaaggaaaccgcagtcgtattgtgtaacgaagcattgcttcaaccggtcctccattcattgccggcagaagtaaaacatgtcaatatcaccatgggatttccgttatcgcaaactcctgtatatagtttcctcatcaccttactggagttgcatacccacggatttaatttcaaaagcggccgctacacgtttcaatcagttgttacactgttaaaacacccctatacccgccaactcaccggtcaagccgaattgttggagaaagaactgacccgaaacaaccgtttctatccgttacccggcgaattgggcaaagatgaattcctgacccggcttttcactccgctttccggaaacctgaatctgtgcatacgcctgtccgaaactttgcagcaagtggcaagcatttaccaggcaaacacttccggtaccgaggacacagatgcattcaaccaactttaccgggagtcgcttttcaaagcctataccaccatcaaccggttccgcacactgatagaagaagatgaattaaccgtacagagcgaaacattccggcgattgctggtcaaggtcttgtcagcgaccaatattccattccatggcgaaccggccattggtatgcaggtcatgggggtattggaaacacgtaacctggatttccgccacttggtattactatcggtcaacgaagggcagcttcccaaatcgggaggagactcttcctttattccttacaacctgcgcaaagctttcggaatgactactatagagcataagattgccgtatatgcatactatttctatcgtctgctgcaacgggcagaaaggattaccttaatttacaataccagttcggacggactgaaccgcggcgaatggagccgtttcatgctgcaattccttattgaatggcctcaccccatcacacgtcagtttctggaggccggacagtccccccaaggcacctcgtctatcactgtagaaaagaccccggatgtcatgcgccggatgcaaagcctgtttgatgtccgtgccaatcccaaagcaaaattttctccatcagccttgaattattacctggattgtcctttaaaattttattataggtatgtagccggcctctccgcccccgatgaagtgagtgcagaaatagattctgccacattcggaagtattttccattatgcagccgaacatatttataaagacctgaccactcatggcaaagtcattaataaggaagcattggaaacgttgctacgcaatgaagtgaagctgcaagattatgtggatacagcattcaagaaattattctttaatgttccgcaaaacgagaaaccggaatataacggcgtacaacttatcaactctgccgttattgcaagatatttaaaacaacttttacaaaatgatttacgttacgctcccttcacttttattgcatcggaaatggaagtggatgaacccatcgacatacaaacacccaaaggagtcataaaatcacgtatcgggggaattattgaccgtatggacagcaaggatggcacactccgtattgtggactacaagacaggcggtgatgcagacaccccaccccatgtggaatctctgtttattccggacaagaaacgttccaactatgtatttcagacgttcctgtatgccgccatcatgtgccgcaagcaaccaacgatgaagatagctccggcccttctctatattcatcgggccgctacagaaacctattctcccgttatacaaatgggcgagccacgaaagcccaaagaggctgtggaagatttcagtaaatatgaaaaagaatatcgtgaacgacttcaaggattattagaagagatatttaatccggaaaaatcatttacccaaacagaaatcatagaaaaatgtacctattgtgatttcaaggcactatgtaaaagatagactatagtggttagtggttaatacctgcggcatgacagcgcagtccactaatcactaaccactgatctgccacactattccaacgctctctgtctgcaaaagcatccacagaatttatcttccacattctctatcggtgctttgaaaataccatagacggaagaccccgagccactcatggcggcatacactgcccccaaatcatacaattcatcttttatagcagcaatctcagggaactttttgaagacactatcttcaaaatcattcttcatactgtttttccatgtttccataggttgctttacaatttctttcaaagaaacagccggacgcacaggctttatttcggcaaacgcatcccgggtggacacaaagatatcaggtttaatcaaaattatgtggtatccctttaatgacaattccacaggctcgaacagattccctattccggtagcgaaaacaggtttgttccgaatgaaaaaagcacagtctgcccctagttttaccgcatattcctccatccgttccgtactgagtcccaatgaaaatttatcattcagaagctttatcatacaagcggcatctgatgatccgccacctaatccggcacccgccggtatatgcttgtacatgtgtatatctaccggcaacagtccgggatagtctttttttaataacttgtaggcttttactaccagattatcttcgggttcaccctccaaaggagctccacttatgtgtaaagtgtattctttgtcattgttttcccgccgcgttacttccagagcgtcttgcaggtttatcggataaaatatggtttccagattgtggtatccatccgggcgcttttctataatattaagtcccaaattaatctttgcattaggaaatgtaatcatattctgttctttaaatagttatttttagtgtgtttcgttagattgttgcccgttctacaaagatgcacgccaccttttatccggacagagcgccaaatatagaacaaacttttcattttaccatataaaaaaaccatttactgtccagattgttcatttctctgtagattcaggttcatatttcttttattatttttgggaatggacgagtgcccaactcagcaaaaagttctatctttgccctactttaaacagatgacaatggcagaaacgagaaaaatgacacgtactcccaaaacttcgaaagcaaagcctgttgacgaatacggacatttacagccccaggcacctgagctggaggaagctgtattgggagctttaatgatagaaaaagatgcttactcattagtaagtgagattcttcgtcccgaatctttttatgaacgccgtcaccagcttatttattcggctattacctcattggctttacgccagcaacctgtcgatatcttgactgtggccgaacaattacgcagcaccggtgaactggaagatgcaggcggtcctttttatataacacaactgagcggcaaggtagcctcttccgcacacatagaatatcacgcacgtatcatcgcgcagaagtttcttgcacgcgaactgattacctttaccagcaacatccagacaaaggctttcgacgagacccaagacgtggacgacctgatgcaggaggcggaaggaaaactgttcgaaatctcgcagcagaacatgaagaaggattatacgcaaatcaaccctgtcatccaggaagcgtatgagatgcttcaaaaagcggcggcacgaacggacgggctgagtggtctggaaagcggtttccatgcattggacaaaatgacctcgggctggcaaaattccgacctggtgattattgccgcccgtcccgctatgggtaaaacggcttttgtgctttccatggcaaagaacatggcggtaaatgcgaaaatccctgtggctttgttctctcttgaaatgtccaacgtacagttggtcaaccgtatgattgtcaacgtgtgcgaaattccgggtgagaaaatcaagagtggccagttggctccgtatgaatggggacaactggattataaaataaaagaattatacgatgcaccgatgtatgtggatgacacaccatccttgtccgtctttgaattacgcaccaaagcacgacggcttgtacgcgaacatggagtaaaaattattatcattgactaccttcagttaatgaatgccagcggaatgtcattcggcagccgtcaggaagaggtcagtaccatttcacgttcactgaaggggttagccaaagaactgaacatccccatcatcgcactgagccagctgaaccgtggtgtggaaagtcgtgagggtattgacggaaaacgtccccagctcagtgacctccgtgaatccggagctattgagcaggatgccgatatggtatgctttatccaccgcccggaatactataaaatctactcggatgaaaaagggaacgacctgcacggtatggcagaaatcattatcgccaagcaccgtaacggtgccgtaggtgatgtactgctgcgtttccgtggcgaattcgcccgcttccagaatccggacgatgatgttatcgtgcctatgccgggtgaggcgccgggtattatccgttccaaaatgaacggtggcggcaacaatgtacctcccccatctcctgatgccgcacctgccgacaataatccgttcggaacccctattcccgaaggacctttaccgttctgacatttatttatccctcacagaattaacacggattatttccctcaaagaaaaatctgtgttaatctgagtaatctgtgatggataaataacaggataaaagaaaataattactaaatttgcaggtcattttgaaatacataaaaaatatcatatatgaatatctcttataattggctgaaagaatacgtcaacttcgatttgacaccggatgaagtggccgaagcgctgacttccatcggtttggaaaccggaggcgtagaagaagtccaaacaattaaaggtggtctggaaggtattgtcatcggcgaagtgctgacttgcgaacctcatcccaattcagaccacatgcatgttactactgtgaatttgggacaaggcgaaccggtacagattgtctgtggagctgctaacgtagctgccggacagaaagtggtggttgccacattgggcaccaaactatacgatggcgaagaatgttttaccatcaagaaatcaaagctccgcggaattgaatctatgggtatgatctgtgccgaagacgaaatcggtatcggaaacagccacgaaggtattatcgtattgccgacggatgctgttccgggtactcccgctaaagattatttcaatatcaaaagcgaatacgtactggaagtggatatcaccccgaaccgtgcggacgcctgctcacattacggcgtggcccgagatctgtatgcctacctgattcaaaacggcaaacaagccactttaaaacgtccgtctgtagaagcgtttaaagtggataaccatgatatggacatcgccattgaagtagagaatacagaagcatgtccgcgttatgccggagtttccataaaaggggtaactgtaaaagagagtcccgaatggctgcaaaacaaattacgtctgattggagtacgtcctatcaataatatcgtggatatcaccaactacatccttcacgcatacggccagcccctgcactgttttgatgcagataagattaaaggtggtaagattgtagtgaagactgttgccgaaggtactacattcgttactttggacgaagtggaacgcaaattatccgacaaggacctgatgatatgcaacacagaagaaccgatgtgcattgccggcgtattcggtggtctggattcgggaacaaccgagcagacagtagatgtatttttggaaagcgcttatttcaacccgacttgggtacgtaaaacagcccgtcgccatggattgagtacagactcttctttccgtttcgaacgtggtattgaccccaacggaactatttatgcattgaaagaagcggctttactggttcaagaactggcaggaggtactatttcttctgaaattaaagacaactaccctgccccgatagccgattttacagtagagctgaattatgagaaagtccactcactgataggaaaaaccataccggtggaaaccataaagagcattgtcaccagtcttgaaatgaagattgtaaacgaaacacccgaaggcttgactttacaagttcccccctatcgtgtggatgtgcaacgtgattgcgatgtagtagaagacattctccgtatctacggatataataatgtggagattcctactaccttgaaatccagcctgaccaccaaaggtgaagtggattactcccagaaattacaaaatctgatttcagagcaactggtaggttgtggtttcaatgaaatactgaacaattcactgaccgccgcttcctattacgaaggattggaaacatacaagaacgaaaatttggtttacttgatgaacccattgagtaacgatttgaacgtgatgcgtcaaactttattattcggtggtttggaaagcatccagcacaatgccaatcgcaagaacgccgatttgaaattctttgaattcggtaactgctatttttataacgcagaaaagaaaaacccggaaaaagtgcttgcggcttatgctgaagaatatcatttaggattgtgggtaaccggcaaacgcgtcagcaattcatgggtccatcccgatgaaaacagcagtgtttacgaattaaaagcatacgtgctgaacatctttacccgtttggggttgaatttcggcaacgtggtattcggtaacctgaccaacgatatctattcaacagccatcagcgtacacacacgtggcggcaagttattggccaccttcggcatcatcagcaagaagattcaaaaagcattcgatatagacaatgaggtatattatgcagaaatcaactggaaagaactgatgaaagccatcaagtcggctaaagtcaactttaaagaactttccaagttcccggctgtgaaacgtgacttggctttgttgattgacaagaacatacagtttgcagaaatcgaaaaaatagcctatgagactgaaaagaaactgctgaaagaagtagaattgtttgatgtttatgaaggcaagaatctggaaccggataaaaaaagttatgcagtgagcttcttgttacaggatgaaagcgcaacactgaacgacaaacagattgacaagatcatgtccaaactgattgctaacctggaaaacaaactaggtgcaaaactaagataataataaaaataaccattataaaactacaatccaatgggaagagcatttgaatatagaaaagctacaaagctgaaaagatggggccacatggccaaaacatttacaagactgggtaaacaaatcgctatagctgtaaaagcaggtggtccggaacccgaaaataacccgaccctacgtggtgtgatcgctacttgtaagcgtgaaaacatgccgaaggataacattgaacgcgccattaagaatgcaatgggtaaagataccagtgactacaaaggtatgacttacgaaggatatggtcctcacggagtagctgtatttgttgatacattgacagacaacactactcgtaccgtagcagatgtgcgttcagtattcaacaaattcggtggaaacttgggtactaccggttccttagctttcttgttcgaccataaatgtgtatttactttcaagaagaaagagggaatggatatggaagaactgatcctggatttgattgactataatgtagaggatgagttcgacgaagatgaagaagaaggaactatcaccatctatggtgatccgaagagctacgcagcaattcagaaacacttggaagaatgtggtttcgaagaagtgggtggtgatttcacatatattcccaatgacttaaaagatgtgactcctgaacaacgtgaaactctagacaagatggtagagcgtctggaagaatttgatgatgttcagaccgtttatacaaacatgaaacctgcatctgaagaggaagaataaaatgaaaataacctataagacgcaaggcacttgcagcagccacatcgaagtggaagtagaagatgacgttattcaacaagttttcttttggggcggatgcaatggaaacttacaaggtatcagccgattggtgaaaggaatgaaagtggaagaggtcttacagaaactggaaggtgtaagatgcggaaaccgttctacttcctgtccggatcaattatgtaaggcgttgcgtgaaatgaaacaataaaaaagaggctgtcttatcttgtaattcaagtttgagacagcttctctttttttcaatatattatcttacttccggatcattgttccgtttcattttctgttctcttcaaggcccttcaaaggttgatggtctttaccttacccggaatgatggtcagatgcaccgttccatccttttctatctccaccttctgatatctggcctccac

SEQ ID NO: 14513 - DNA, 314 bp, Unknown
  gut microbiota DNA sequence
cacgcattcgtcgtcgaactgatccgcaagcaggcgcaggaggcaggcatcctgttgcgacgcagatacaacgattatacacatacaacggatttcaccgtactgaatcccattgaggggcaggaatgggcggccggagataatatacaggtttctttgacggtgaaagtgcccgcctgcaggtggcacaagaaaggggtgccttacctcgacacgttctacagcctccatctgacggacggtaacctggaactgagaaatacggagggcgacacgagcatagccacctgccggagcacggaagggtgtgcaaa

SEQ ID NO: 14514 - DNA, 1527 bp, Unknown
  gut microbiota DNA sequence
gccagcagctgtgccttcgtgatccgtttgtaagttttcatcgcatgccgggaaacatcccttgtcttcaggcaggtcagaagatcttccagcgtaaccatatacgccctgtatccgtttttcaccgcctcatggacaagcctggcggcgatataggtctttcctgttccggatctcctccctgagacaggcgagcagaaactccggataggtcagctgcttttcctgggcctgatgcagcagttcctccagatgttcggccagattgcccagcttgagcatacgtgcacattccatgagttccttcttatgtcttgtcatattccctaagtatttcgttataagactgtatcaagccgccttgtcggggcaggcaatcctccagtccgtatgtttccgttccattgtccttccccctgcacacatattcacacaggcttttaaccgagtccccgttatagatgcctttgtcaaggcatatgcgtatggcctctatcagcgtgttcttgtcatatccgggaattatgcgcaggatcacctccggattatccctgtagtaacgttttttcctccttttcagattatccatccacatggctacctccctgttgtcggacacatgaaaaaggatgcgttcggctattttcactccggcgtttctcggtttcctgtgggagtcgtcataaacggtccttcccttccgggtacagagcacatgccggcagatgagcttccccgtatccttgttgtacagctccacattcccttccgtctcctgcagccagacagttgtctgcccgctccggtaagttccgcatggcaggctgtaatgattccccctgtactgcactgtattgtccttgcggacatggtattccctcatctcctcctgcggtggctgtggcgtcccatgatagggtatgagaaaacttttctccacggcaaactcttcccgtgggacaagacgggcggtcccgtgcactttcccgttccccgtcctttcgagccattcgagggcctccctgttcagactgtcgatatcacggaacacacgtgccaccagaaagttctccttcacatatttcactacgttctcgaccttgccttttgactcggggtcggccttatggcagaacaccggctggaaatgctgctccctgacaaacgtctggaacttccttgtcagcatcaggtctcccaggttctcccgggaaatcagcaccctgtcctggtcataaaggatcttttccggtttccctccgaaatactcaaaagcgcgctcgtgtgcatagatggcgcgctccgtgtcgaaagggcgacggctgaaacaggtgaacttgtagcgtgaacgtgccaggacgatcgcaaaaaaatagactttcgtgcttctgccgttttccgcggacatccatttctccccgaaatctgcctgcgcatactccccatagggggtatccggcagtttctcatagtccctgcgtatcctggcctccgacttctttccgatgccatatttgcagcgcacct

SEQ ID NO: 14515 - DNA, 33880 bp, Unknown
  gut microbiota DNA sequence
gatctgcctgcgcatacttcccatagggggtatccggcagtttctcatagtccctgcgtatcctggcctccgacttctttccgatgccatatttgcagcgcaccttttctacaaaattgaatacggtcttgtcgcacactttcgggaaatccggatagcattctctaagccagtcatgcatccgtgcggccgatatgtacggatattcctccagggtcccccgcacatactcctcgtatcctgccagtttcagcgtgtatttgcgatgcgaattccgcctccttacaaaatcttcccgggacatctgcagatatctccgcacggtgcttctgtccactcccaggtgcttcccgatctgtgtcttgtttaatcctttcgactgaagctctctaaccttgtaccacatatactgtttctctttaaaaaatcggctcgttgttatcataatgatgtctgtctttttgagccggcaaagatagacatccccggaaaagtgcggtattcgcattttccattttcctgctgataaagttacaaattacatacagaaaggaaaaatatacgaggtgcagtacagcatcccggaaggctatcccgaaaaactcctcccggtgaaggtgaagataacctccaaccacagcgtgcccagccaccgaaagaccactttgtggccttataccaatgagtttcgacatcgtgcgcaacggagaagcccaaaaagtcaatccgccctatgggttcaagtacctctacacgatggataactatgattcttccgatggaggctcttccttactattatgatttgggctataggtttacacagaaatattggggcaaaggatatgccacagaagcttctgccgctttgatggattatgctttcaataaactgaagattccgtgtgtctatgccctcattgaagccgacaatttgaaatcaaggcgtgttttagagaaagtaggattccacgaagataagcctatgacgattgacggtgtacctcatgtacaattcaaagcaataaagccaatgtgaggacgtaaaccatatctgtatgggacatcatgataaggaatacgtttatttgtttatgtgttatcgtgataggaatgttagttttaccttttgcggcactctcctcgcattagaatataacggtatgacattgtatgatattattcttagtcctcaatccagtgttctcaatcgtattgggaacttttttcataaaaccgctgaaagaaagaataatatttttcatcggttttatttagaaagaataaagttgttcgtatatttgcgaacataaaaataagaagactatggaatccaagaaatatacattggaacaagagcagatagcccgctttgccaaagcgatggggcatccggcaagaatggctattcttgaattcttagccaagcaggattgctgttttttcggagatattcacgaagaactccccatcgcgaaagcgacggtttcacaacatctgaaagagttgaaagaagcaggtttgatacaaggagagatagaaacgccgaaagtgaaatattgtatcaatcgagagaattggaaaatagcttcgatgcttttttctaaattcttcggacaatgtgtatgcaaaaaggagagttgttgtgaatagggacaatttttttaggattattgttcgttgttttgcgaataacaaacacaaataacaaccaataaaaacaaaagcgtatgaacagattgattttagtcttgattatcagctgcggattgactgcttgcagtaacaatgggacaaagaagagtgcttctactgatgtggagcaaacccagccacaaaaacagaaagaccgtgtggaggtgttgtattttcatagcaaatagcgatgcgctacctgcatggcaatagaaaagaacgccaaagaagcggtagaggcagaatttgctgacgaactgaaaaacggaacactcgttttcagaactatcgacatttccgaaccgaagaacgaagttatcgccgagaaatatgaggttacatggtcttcgcttttcatcagcaaatggaaagccggcaaagaaacgtatgaaaatctgaccgaatatgcttttgccaacgccagaactgctcccgccactttcaagaacggagtagctgaaaaagtccgtaccttattgaaataaagttctatggagtggttacagacattattggacagcagcacggctcctgcacttatggcttttcttttgggattgcttacggcgatttcgccctgcccattggctacgagtatcgctgctatcggatttataggtaaggacattgaaacccgccgtcggatattcctcaatggcttactataacgctcggtcgtgtaattatctatacattgctgggtatcgtattgatactaatactcaaagagggttcaagtcttttcggtattcagaagtttatcggcaaatacggagaactcgtacttggccctgccttgttattgataggttttattcatactgttcggaggcaaactgaaattaccctctttcggttttaagggaaatggcgagggcttagcccgtaaaggaggatggggagcgtttttgctcagcgtgttgttcgctatggcattttgtcccaccagcggagttttctatttcggcatattgattccgatgtcggcaacgactgttgcaggctatctgctgcccgtccttttgccatagctactgcgttgccggttttgattgtcgcttggatattggcattcagtgtacaacatatcggcagtttttacggtaaaatgcagactgtacagaaatggctgaaccggattgtcgggagcatatttgcgattatcggtttgtattattgtgtgattatgtatttataaaaaacaaaaacatggaaatcaaagtattgggaacgggttgcgccaaatgcaagacaacctatcagacaatcgagaaagtaattagcgagaacaatctcgaagacgtgaaacttacgaaagtagaggatattgtggaaatactcaattccggcattatggccacacctgccgttgtggtggatggagccgttaaagtcaagggacacgtcccgtccgaaaaagaggtaaaacaaatactcggtatttaaggtacagttatggatactaaaaaagagttgaaaatcctcttttggatgattgtggtttatgcagccgtatttttcatgccactcggcaatgagaggttcatgacggctgtcgatgcaaccctcgaccttgctaaatggtatgcgcaggaacacgttatgttatgtctgcttcccacctttttcatcgcaggtgtgattgccgttttcgtcagtcagggttcggttctcaaatatttcggagcaaatgccaagaagtggttatcctatacggcagctgctgtttcgggtagtatattggcagtctgttcctgcacgattctgccgttgtttacgagtatttacaaacggggcgcagggttaggccctgccatagcctttctctattccggcccagccatcagtattttatccatcattttgacagcccgtattttgggtgtagagatgggtgttgcacgaacggttggagctatcggattctccgtagtgatagccttgctatggcatttattttccgtaaggaagagaaagccaaacaagaggaacagatgattattgttccactgctggaaagacgcccgatgtggcaaacctcgtttcacttttttacattggtactgattctcgtctttgtaaattggggtgcgccctttgctttagacaaaggtttgtggactttcatcttcacctataaatggtatattacgggagttcttgctctgatgctctgttggtcgcttgtccgaatattgaaattgcgtccattatgggtatgtgccggagtcgtgataacgattgtttctgttttccttgcagacgcccttattgctaaagccaaattagtaccgctcgttccgatggttgtgggtatggcttcactttccatcatcttgctgtttgataaacgaaacgaggaaaatagagaatgggcattatcatcatagggattcgccaagcagatattacccttgttggccgtcggcgtagtgacagccggatttcttctgggttcgacacatgataacacgtcgattgccagagttatttttaacgagtggattgaatgggctgtcggtggaaattcgctgctatccaacttcttcgcaagtttcacgggagtgttcatgtattttgccgccctgaccgaagtgccgattattcaagggttgttggcttcaggcatgggaaaaggccctgcgcttgcgttactgctggccggcccgtcgctgtcgctaccgaatatgttggttattcaaggtgttatggggacaaagaaaaccattgtttatgtagctttggttatcatcatggcaacaatatcgggttttgtattcggaaatttcttttaagtttcccgtttatattgttaaacagacacgaacaaaaattattgctcgtgtctgttttgtgtattcaaataattgctttatatttgtattcagaaagagttatttgacagcatagcaatgcaaaatgttgaaattcgtacagttgctaaatcgttacctctatttctcaaataattcgctaaaagtttattccccaattggttaagttaaatcgagaaaaatctaaaataaaatgttttattttcataattgttggttttatggtaccagcaaaatgggtttacatgcaatcctttttctatcagataggtattacgtctcgtgatgagacaggtttgtcctttggactttgttatccgatggtgatgtcgcccgacaccgttgccttgtgtttcccagccctgaatggttacaccgctgacgctgataccgtttttattgatattcagttctatgactaattgcttgtcaccttccaaacgcttgatatcctgtccttcggatgtggtctgtgggagtttggaaaggttgtagtccttcgtttcattgcctatcttgatttgttcttctgaattgagagaaaacaagaatagcatgtaatttcccattcaaaaagcggacggagagtgtcggtttatcggtactctccgtttgcttttttatgctatcttcattgtccgtatataggcatttttcaggttacaaattatgctgcctatacacggtctgtgtctatcggctaaaagaagactcattaaaaataggtatatttcccgcctgaatcgcagcgattatgtaaaatttatacctaaaaaaaggtattgcagatatttttgatgaaaattaattttgcagtcgtttttaataaataaatgaaagaatgaatcaggtcaaaatggtattaatttttgccatattattatttttatcttgtgtgaatgtaagtgcccaagtaataaagggaagagtaaccgatagtaccacaaacgaagcgttaagttatgccgccgtggaaatacgttctttcgaggatgatgtttatataggaggaagctccaccaatgaaaaaggagagtttgagtttcatctgaaagggaggtatcccaaaattcgtatcacagtttctttcttgggatataagacaatacaaaaagtatatgcccccgctacggagtacagttacctcaaattcgagatgcaggaggactcgcagaccttgaacgaggtcgtggtgaaaggattgagtcctgcggaaaaagtgcagcggttggcctataatgtatcattggtggaaacggccaagttgaaaagcacgacgatggacctgtccaatgtcattgacaaaatcagcggggtgaaaatccgttccacgggaggcgtgggttccgaagccaacgtcactttgaacggcttttccggtcggcatgtgaaaatcttcatcgacggtgtaccgatggacggtatgagttccgctttcgggctgaacaatattccggtaggtctcgccaaacgtgtggaggtgtacaaaggtgtcgtacctatcgaactgggcggtgacgcactcggcggggctatcaatatcgttacggacaacagccggtgtacccgtgtgaacgcctcctattcgttcggttcgtttaacacccacaaaaccaatgtctatgcggaacataccacaaagaaaggtttttatgtttctctgaatgcctatcagaactactcggataacgattataaagtcaatatcgacagttacacgaagttcaacgaggatggcagtaaccaggaggttaaagaaaatctcacggtgcgccgctttcatgccaagtatcacaacgaggtagccattctgaagattgggatagtggacaaaacgtttgccgatcgtctgttgttaggcttcatgggaggttacgagtataaacagacccagaatgcctccactatggactgggtgtatggtgcacgctacaccacggccaatacgctgatgccgcaactgacttacgaaaagagattcaaagtgttgaaggggctgcacgtgtcgctgaacggtaactacaacttcggcaagtcctattctgccgatacggccagttgtaactacaactggctgggtcagagtcaaccgaaaggcgtaccgggcgagttgtcgtacatgaagtaccgttaccgggaccataatggggcggccaacttccgcatggcactctttcccgcagacgggcagtccgtgtcgctgagcagtacgctcaccaccttctcccgctccggcaaggacgaaacggcctacaaacccacctatgagcatccatcgcagagtatgaaaatcgttaccggattgagttataagtatgactacaagggcaagtggaacacatctgcctttgtgaagcactatatgaaccatctggaggcctacctcgatccggaaggcggaatcaattatcaggatttcagcaacaccacttcctattggggaggaggttgggccagtacctacttttgggggcggcacacacaactgcggttgtcgtatgaatacgccctgcgtctgcctaccagccgtgagttgttcggttctggcgacgacattgagcgaggcaactccaatctgaaaccggaatcaagcaataacgtcaatatcagtgtcacagccaatgctgtggatttgaccgaccaccggctgaccatcgatgcagcttttcaatacagagaaatcaaggactatattcgccgcacgaccaacaacgacagtgggcgtgccagttcacagaacgatggtcgtgtacgcaatttgggtacggacttgagcatccgctacacttttaaggatgccttcttcgtgggcggcaacttcagctacatcgacatgcggagcttgaccaggtacgtgacgggcacacagcaggagagcaagaactacaaagaacgcgtacctgctatcccctatatgtatggtaacggagaagccgggcttaccctgcgcgatgtgtttgtgaagggaacagtgctggacatacattatatgatgaactatgtccagaagttcagttacgagtggaatgtgtaccagaatgcggaacttgatatacctacccaattctctcacgacctcttcgtcagctacaacttcggaaaaaaatcggagtttaccgtatcggccgagtgtaccaacatcttcaatgcccgcctgtacgacaatttcaagatgcagaagccgggacgcgccttcgctatcaagttcggctatagctttatgaagtgaccattatataacaattaaaaacgataaagtaaaaatgaaagacagatttaaattattcagcatggctctatgcgcatgtgcatttgcagcttgtaatgacaatgaaggagttgatggacccggtgacggtgacaaatcccccgtgcaatatgtagtgatgagtgccacatcggacggaacggccaactatttgcagttggccagcgaccccaccaaaggtacgattgacccgactgaagcgaacgggcgtatatctttcgatgcaagcaacccagattttgtcaactacaacaacgaactgctgattggcatgaactatccctcacagggaggtacaggtggctactcctatgcttggaagctcattgacgggcaactagttcaacatggcaatggtataatgctggatggcgacgtgaaagcacgcggctttttcaatgactacttgctcggtctgtctgaccaagccgaggacaacaatcactatacacgcgtgaaatacgtcaaggtgactgagttcagcagtgtggtcgtagatggaaaaataaactgtcaggaccacagcaaagaaccggccagccagatgggcaatgaggcatggggggttggtgacatagcccagtacggcgactacgtgctgctggcctataccaccaaacatctggtgcaggatggtaactacacctcaaaagcagcaagcacccgtgcgaaggcttcctatggtacagacttggacaacaacttctatttgggtgtttacaagttcgacccgacagatgcggataaagaatatttgaaataccaaagcatgattgtccgcaagagcgaagaccatccgggaaaagaagccggacagatcaaaggcaattctaggtcgcgcacggaaacgggtatcgaagtcgttggtgataaaatctacctgttctgccaaggcggcaagaacttccaaacgaacagcctaagagtgccttctgctgtgctgcgcatcagcggtagcaatattcagagtggcaagcccgtagatatcgacagtgattactacgtagacttaaacgataagacaggcgaccgctatttgtggagatgttactatctgggtgacaacaagttctgcctgcaactcttcaccaaccccggaatggatgggtacacggaaggcacacacaagacattcggcatcttcgacgtagaaacgcaaaattacacgcctgtgaccggtatgcctgaagccggcgacatcaatgacattgcgcttgcttatgcttctgacacggacaagggtacagtgactttcgaattgatgactacgtcgggtgcagtcctgtacaccatcaaccgcaatggcgtggccacgcctggcacgaaagtggaagctgaagtcatcaagggagcaagtctgttgaaacaaaaataggcctttgtatgaataaagtattccgaaaaatacatttatggctgtctgtccccgtcgggttgataatcacggttatctgccttacgggggcggcccttgttttcgagcgggacataacggaaagcctcaatcctaaaatttataaggtcgcatatacggaaggggacactcctctgccgccgtccgaactggtcgcctctatccgccagcaggttccggattcgttggaattgctctccctgcaactgtcgggtgaacgggacgtcgcctgcatggcaacattcaaaggtgcgggaaagcgttcgttaagcgtgaatccatacactggagaggtgaacggttggaccaagagttaccctttcttccagaccatgcgtaaactgcatcggtggctgatggacccgcctgcctataagggggcaaaatctgccggcaaggttatcgtgggtattactacctttgtaatggttgttatcctcgtttccggtattgtgatatggataccgcgtacccgtaaggcgctgagaaaccgtcttgtcgtatcgtgtacgaaaggttggtggcgtttttggtacgacagtcatgtctcgctgggcatatatgttaccctgtttttgctggtcatggctctgacagggcttacatggtcgttccaatggtaccgcacggcagcctatggactgttcggtgtatcgacagcccgtcccgccatgtccgctccgcagcagcaaaataaggatgaaaagaaagaaaaggcagagttcgattatgggatatgggataatgtggtttccgaactgcaggccctttatccttcgtatgcctccatttcgctgacggccggaaaagcacagataagcaagcccggtaacatgcgaagcagtgacacggcggcgtttgatacccaaacaggagaaatcacgaccgttacggcttatagcgatgttcccagagcacagaagatgaaagggtggttctatgctttccacaccgggtcatggggcggaatgacgacaaaggtcctttattttctggccgctttcatcggaggaatcttgcctttgagcggttattatctgtggttgaaaaagaaacgtttatcaaagaaaaaagtctttagaactatctttgaaacaaaatgtatataaaaatcctaacaaatgtcagtcagatttttttatgaataatttctttccaaaatctaggaggaaggaaagtagaaatagcgtgtaattcctgtcgtgaaaagaaaacggggagtggcggtttatcggcactctccgtttgttggtattgcctgacggatgcaagtcccgagtgaatcctaatagcaggaatcgcataaccaatggcaagggtgtctatcgtgagatggcttctgaaagaagttggcagcaaacatttggcttgacggacaaaaacttcatacaaggtatttaatcgtggacaaggttaccaaacagaccaaagcctcatagctattcagaacggttggtgcaaataaaataagtataagatgaaaagacaagatctttatccaaggaggtcacacaaacatgaaggtcagttttttacgagtcatgtaaagtttgctgcaagaaattagtagagaccatagtactcgaggcattttacaagtcttttgtagctagatgtccgaaaagaactctctatccacacaatagggtggaatctgaaaataagatagaagtgatgccatttattaaaaggatggctgaaaataacttgtccaacttggatacaccaggttacggacagtatataatttccgtatttcaactacactttgtttaccgttcgtaacgtccaatctactggcaatatattttcagaagtctccgcaaacagtgattcttattatttttcgatgcaaaattttgtgttccaactcactcgaaccttattacaaatacttatatcatgatatattgattattagagtattattagtttgaattctccaaaaacaagctatatacaaaccgaagctatttacttcgtattaattgcatcaaatcaaaatacaaaaatggaacgaatagaaaagcaaaattttcttatgctgcaataggagttttattattaggattggtatcctatgacagtaagaatagtggtctgaataattaatatcattgataggatggtggtatgaagaagcatatatctttattaattgcgttaactggcattatctcgttaaatgcgcaagatttcagatttggaataacgggcggaatgaacttgaattctatcacaaatgagaggaacaaggtagattataatttaaaggcgaatatttcttcaaagaagataaagggttttatcttgatatgggagttatgctgaccaataaaaattgggaaacaccgtattatgcccatatcggagataaagacaaattgggaaacatgtggagtgcaaatcttcattatcttaatatacctattcacatagggtatatgatgcctgtatcaaaaaagatttcgctattcatgaatgccggaccatattggggagtaggattgtttggtaaatatacgatgacatcgggtgataaggataccactattgctgaaaatatctttaaagattatctcaaaagatttgattgtggtataggatggaataggtattgaatgtgcaagatgtatcaaaggttgtcaaagtaaagtcctgtgaggaaagccaaaagatatattgtggtcaaccttatattatggtcaccaccgggagcaggatgtttaaaagaacttgtggaaagaacagaagaaggtcctgcgaaaatccgtgtgtagagagaaaaaaatgtgtgggtaatggcctttaacttagaaaataacaagcatggacatttaagccatactagacggaataggactgttacctgaagaaaaaatagtatccaaaacagactcacagttccaatcgcgactaaaagtttgtcctgtttccgggtttccctaacgatggcgcttgacgcgtaggtatacagctttactgcgaataggaaatccgggaagaaacctttggaatgtaggtgcaaatgagaatactcttgaggaatgggaggcttttcttcaagaaaaagaatgaagcaagtctcttgagaaacatggttaactaggtcaaaataatcaagcatgtctgcaggaaggaacaagctcaacatctccataggagtaagggggggcatttctatttcatgcctcaaagataaccactttaactaattccccaagttttcaaactgacccgtttaatttttacccttgcagacgcatctcttctatctacaccgcagatgaagcgacagggatttttgcatttgatgtgcgattttgcgttgcacttactgcatagtcccgttagaatccgtatgcgaggatggtggaattcgatattttacttgggtgaagagggcttttcatctgtgtgaagagccgttgtcactaaagtggaactactgcttcacatagatggagcaacagtatatatcggaagttaacacaatgacatcctatttaattaaatgaaagcacggcatgtcctgtcagatctaatctgatatctgcggctcttttacaaataatgggcgaatgttcccatccccatcacctgcataccagttcagggatattatggatgttttttacacagcaaattgctgataatgagtggaatgatgtgacggaaggattttatgttttacgtaagacgaaatcaccttttcctttggttcttacccggattactcttgttggactctttcagccgcttggtttcacttctataaagtgatactaaatcaaaatcgagcatcactttttgaaaccaacagcttctcctgatgtagtaacgttttacgttcttgccttgaatacaggacttgctttttgtatctccgactcaaagccaaaccagtagccatgttctcccttttcatcggcaggaaggaaacacagacgaaggctttctttgtattctccataaatgatattccaagtagcaggaggaatttgtcgtttggtccatactttctcggcgggaagctttttcagtgacatgcctgcctctatccaggcaatactagcctgtatctgatattcggggtagttttgtttgcagaactcatagagtatcaagcctcgtttttccagactcatgggctggtctatcagattggcttttgttaaatatgtaagaaaacgatggaggaattgttcgtcattcaaaatgagttcacgtgtcagtgcctgccatgccggtgtgttgtagaatccgtccaacaagcgtgaaagctggcgggctgtctgcaattcactgacattgatctcgtgggtttgtagtacttcgtatggcggcagaggggaatatttgatacctgattcttccgccctccggcgcatttcggttccgggaagcagtttgagtgactccagttggatttctcctgcagcatattcggccagggtacggacatcttcaaatatttcatgaagatgataaagaggcagtccggcaataaggtcggcatgggtttccatgttgggtaaagcgcacaggaatctcagaccatccagtgcatcggatagtttgcccatccggcggcttttctcaagtacaggttcgcgcaggctttggatgccggcttccagatgaagcagtcctttgggcagcaggctgagttcttcttttaactcttctgacaacagggcgggatgtatttccagatggaagcggatatcgggatggaattccagaaagagtcggagtagttctttggctcttcgagggttgtaattaaaagtacggtctaatacacgtacatttttgatgccatgtgcatggatgagttgtagccttctgcggatgctttcgatggaaagggtgcgtaccggtttttcaccgccgctgacacagaaggcgcaggtgttgaaacatccgcgtgttgtttccagttggacaaagggtttactccagttaaaaaaacggctttgttcaggagggacgagtccggcgaaattcagtacgcgggctatgccgttgtctttatattctttgtaaggagtgaggtaacagagtccgggcacggtgtgccattgttccggatggttccagcaggttaaccattgtggaaagacttcttctccttctcctctgaaaacgcaatccacaaatggatttttgcggaggaattcttcattgtctcccagaaattccggaccgcccagcaccaggcaggttttggggagcaatgcttttactctggaagcgacatgtatcagttgctcatggttgaaaagccaggtggttgcggcaaggatgtcgggttgatggtggtagatctcgtcgacaatcattcctgcattttcgttgatggtggcagatacgatttcccattctatagaagggtctgtcatgatttgtgcatgtagggctggcagtgccaatgaggaatgggcatatgaactgttcaggtctatccagagaatcttcatatttctttttcttgtttattcggtcggcaaagataactctttttcggtcaatgtccgctggtaggcgatgcgggatgtgccgttgtgggtataaatgatgccacaacgccggaaaccgtactttttcaggatattctgcatcacaaggttgtcgtggtgggtatctacccggatattgttgcaatgctcgaaacaccatttgaagcaggcgtcagctattcccttctgtttgccgttggtagccatgcggtgaatgacgtaatatggttcgttgttcagccagttgccgtcatcaatgcgggcatacgtagggtcctctccgggaataaaacagaatgtgcctattatttctccgttttcattttcgcaaacatagttggtgcagttggttatttctcgcagaatcaattcagcggaaggataaccgtttatccattgattggggttgccatgttctttcatgaactgacgggcataatggaatatttctataattgcatctaaatctttgggtaatgaatgtctgattgttatcatattgaaataggaatgggttattctaaattcattctgtacacattggtctgcttttgttcgaagcctaatttttgatatagcttgttggctgttatccgtgtggggtttgaagtaagcataataagaggtatgccttgttccttcacaaaccggacagcgtgggtgaccagctgtttgctgaatccttgtccccggtatttttcatccattacgacatcttcaatccacgctttgccgcctgtggggctgtgatagatacctacagtcagcattcccgcaattttctgatctgccagtaagaaaaacagatgggtgttctcttgggatatgatctctttgagggttgtctcggtcagttttaccgggcggtttgtgagctgctccagcagtttttgtactgcattggtgtaggctgggataaagtcttttagttctactatttctgtcatttttatagctgaaattagaatcggctgtaaatatagtgattattctctagataactgattatttttttatatcttgcttacgttttaataatagatatgatattatgattagacgagtggaacttcaggatgccaaagccatcacgacaatatacaatgaatatgtcgagcacagtgtggctacatttgaaacggaacctttgagagaggaagatatgcgtagccgtattgccggaattgccgtccgctttccctattttgtgtatgaggaagaagggaaagtagtgggttattgttatgcccatctgtggaaggagaggactgcttacaggtatacgttggaaacaacggtctatttagctcctggatacgaggggaagggcataggcagggaattaatggaaagattgattgaagaatgtcgtagggatgggtaccgtgcactgatagcctgtgtcacagagggcaatgctgccagtgatgctttgcatttgaggctgggatttaaaaaagtttcccattttaagaaggtaggattgaaatttggacgatggttggatgtagtggattatgagttgctgttgtcctgaatccgctgtccggaatgaactttttaggactgtatggagttataagcttgtacctaaattaaaataaccaactatgactcaagtaaacattaagagggtttatgatgaaccttctgaacaagacggctatcgtgttttggtagatcgtctgtggccccgtggcatgaagagggaatatttgaaatacgattattgggcaaaagaggtcactccatccaatgatttaaggaaatggtttcatgcggatgtagaaaaaagatggggggcttttgcggatatgtatcaaaaagaattgaaagaatcggatgccgctaaagcgttcattgataagataaaagcttattcgaaggtaacattactttacgcttcaaaagaacaagaacgaaatcatgccaacgtattaaaacattatttagacacacatttgtagtttttgtgcaaaaaacaagtatctttgcaggcaattatggctcccgcttctaaaaaatagggagttttcgttaaataatcaatactaatgagagatgccacccatgtaaggtgtgttcatgtataatgaatgcatctgtaattttgtgtgacatttcgggtaaaaagagaaagattatgatacaaaaggttctaattgccaaccgtggcgagatagccgtgcgcgttatgcgctcttgtaaagagatgggtatccgcactgtggctgttttttcggaagccgaccgtacggcgcgtcatgtgatgtatgcagacgaagcctgcctgatagggcctgccgcttccaaagaaagttatctgaatatagataatatcattaaagctgcaaggcaacatcatgccgatgccattcatcccggttatggttttttgtccgagaatgctgattttgcccgccgatgcaaagaggaggggatcatctttatcggcccttccgccgagacgatggaagcgatgggtgacaagattgccgcccgtaagcgtatgattgccgcaggcgttcccgtggtccccggtacggaacaaccgttgcaaagtgccgaagaggcggtacgtatctgtaatgaaataggctatcctgtcatgctgaaggcttctatgggaggcggcggtaaagggatgaggctgatacacagtgaagacgaagtggtggaggcatataacaccgcccgttccgagtccatgtcttctttcggggatgatacggtttatctggaaaaatttgtggaggaaccccatcatatagaatttcaaattctgggtgacaatcatggcaatgtaatccatctgtttgaccgcgagtgttctgtccagcgtcgcaaccagaagattgtagaggagagcccgtctccgttccttactccggaactccgccaggagatgggggaaaaggcagtggctgccaccagggcggtgaactattcgggagccggaactatcgagtttctggtggacaagaaccgcgatttctattttctggagatgaacacccgtttgcaggtggagcatcccatcaccgaagaagtggtgggcgtggatctggtaaaagaacaaatccgtatagccaataacgaggtgctgcacctgaagcaagaagaacttttccagcgcggtcatgccatcgaatgtcgtatctgtgcggaagacacggagaacaacttcatgccttcgccgggtatcatcaaacagctgacggagcctaacggcatcggcgtacgcattgacagctacgtttacgaaggttacgagattcccatctattacgacccgatgataggcaagctgattgtatgggctacgacccgccaatatgccatagaacgtatgcgccgggtactttacgagtacaagattacgggcctgaagaccaacctcagttatctgaaacgcatcatgcatacccccgactttgtaaagggtgagtataataccttgttcatagagaagaactcgcgtatgctgctccgtggcaacggtaataatgaggagattgagaatatcgccatgatcgcctcttatattgactatctgatgaatctggaagagaacaagagtccccagctgtctgatgcccgtcccatcagccgctggcgtgagttcggcttgcagaaaggagtattgagaatctgattcttcatttaattaagcaaaagtatggaaatacatattggagaccgcgtagccgatgtgacgttggtgagcaaggaaggaaacaaggtacagtttatgattgacggaaaaccgtatgatgtggatatcgttatggccgagaacggaagctgttccatcctgcacgatggcaattccttcaatgccgaactgatccgtggggagggtggaaagagttatgatgtgaatatgttctaccgttcctatcatgtggacatagtggacacccagaccaagtatctgcgtatgaaaaagggcggcgaggagagacaggatgacaagattgtagctcccatgcccggaaaggttgtgaaaattcccgtccggaaaggagaccgtctgtcatccggggatattgtggtagtgctggaggccatgaagatgcagagcaactacaaagtgacctcggactgcacggtaagggatatcctggtcaatgaaggggattccgtcaatgctaaccaggtattaatagtattggatataataaaagaagattgatcatgacaagagaagaaatatacagccggtttgaagagctggacaaacgcgcgtcgctgggcggcggtgtggacaagatcgagaaacaacacgcccaagggaagatgaccgctcgcgagcgtatcggaatgttgctggacaaaggtacgttcaatgaactggacaagctggtgaaccaccgttgtaccaacttcggcatggagaagaagcagattgccggagatggtatggtcaccggttacggaaagatagacggccgtccggtgtttgtctatgcatatgattttaccgcacatggcggctcgctgagcgagaccaatgctgccaaaatcgtgaaggtgcaacaactggctttgaagacgggagctcccgttatcgctttgaacgattcgggaggcgcacgcatccaagaaggggtgaacagccttgccggatatgcctctattttctatcagaacactatcgcctcaggtgttatcccgcagatttccgccatcttgggtccttgtgccggaggagcctgctactcaccagcactaaccgattttatctttatggtaaaagagaagagccacatgttcatcaccggcccggatgtggtgaagactgtgactaacgaggaggtgggcaaggaggaactgggcggtgcctatacccacagcagcaaaagcggtgtgacccattttatgtgcgacaatgaggaggaaacgctgatgagtatccgtgaattgctgagtttcctgccttccaacaatatggaggatgcgccgttggttccctgcaacgatgacatccatcgtcaggtggaggcgttgcagactgtcattcccgaagatccgaatatgccttatgatataaaggatatcatcgaaccggtgctggataaccagtatttcttcgaggtgatgcctcactttgctaaaaatgtggtggtggggttcggtcgcctgggaggtcgttccgtaggtattgttgccaatcagcccgcctggctggccggcgtccttgacattgacgccagtgacaaggctgcccgttttatccgtttctgcgactgctttaacattcctctgatcactttcgaggatgttcccggcttcctgcccggaacaatacaggaacacaacggcatcatccgccacggtgcgaagatagtttatgcatacgccgaagctacagtgcccaaagtaactttaattacccgtaaagcttacggaggtgcctacattgtcatgtccagcaaaccgacgggagccgatgtgaacctggcttatccacaggcggaaatagccgttatgggagctgcgggagctgtaaatatcctctatcggaaatccactcctgaagaaaaacaagaaataatcaaagattacgaagataaattctctaacccttattgtgcggcagaacgcggcttgattgatgaagtgattatgccccgtgacacccgctataaactcattcaggctttggaaatgtgtcacaacaaaaaccaaagcaatccgcctaagaaacatggcaatatgcctttatgataaaaatcaagattctgccacagattattcagattgacaccagcccaatattaaacagttggttctcaatggaaataaccggtgaaaatctgcgtagcctgtggcggaaaagctttttacctcgtctctttgctattctttattcagccatgcattgatctgtgtcttgatttcttcttgtgtgtcggtgtcaaagctgccgatacgggtggtatggctgccgccgggtaacacataaacttttatgtttttcttgttcttcagccaagtaacgcccgaagctgtccaaggatcattgccgccataaatatagatcatttcgggatcattctctttcaggaattttactaccttattatatagtgtcttgtcaaatttgagatttgacagttcgggcggtaacattaccttatgaagatagttacggctactctttatcgtcagatactttttgaaaggtttgatgtcatatccgtaataccccagttctttggctgcttgcacattgaaagaagggtagggagattgttcggagaaataatccggctcacaaatagccatgaaatgcttgaatagagtgtgatcatcggcatctgtttccggaattttatttacaggagttccccattgccatagggcaaatgagtattccaatacattgaagtcgtatacttcggctataggaatgcggaaggtatatcctttatctgagcaatatttttcgaacatcggcaacagctggtttttgcgtttaagtacttccagttgaaagttttcaactcgtttccggttttcgggagtcgaaactttattggcaatgaacggttcgtgacggccgtcctccaatgattggttgaggggggctacgtaaggtacggagatatccacatcatcaggaaagtaagtgcgatagaacatcgtagtctgtccgcctttgctgattccagtagctatccatttctgatcgtatagttgtttcaaagtcgtggttacatgatgcaaatcatacagtgaattttcaaccgtgagataatcccagttgcagggcttcggcatggactcaccaaagtaacggtattccacgaataccagattggcgttgaataatttggataactcttcttgataacgcggatgggtggcataatgggcggcatagccttcggtaaccagtacagtggggcggtcaaaacctacatgcgagagaataaccctttgcttaaaattccctgcttcggggtgatgcggatccaatagttgattaatgaagaatacatatttctccggataggcatcactttgcattggtttaatgtcactgatgtccggaagattttgaagtcttttctgtaattcagtgggaggagctgtggcctgggttatttgtaaaggcaacaagacggccagtattgcccataacataaaagagtgtgtgtgtttcattgtttataaatggtttaataactaattggcaacaaaaatagcattttatttcgatattgtcgggtaatcttttatctttgtgttacttaataaagccgagaaatatgttttttcttcatcgtatatggaattggtgcagtcgcttccgtcaccgttgtggttacggagtacactctccgtctgatttttttctgattacttctgtcgtttatgaaaaatatcactattatgcttatcgggtattgaaggaaagaggatttcctgcttatttgccacattatcgaagaaaagtgaaccgtttactattccggttggttaattatttcagaccaaagtcattgattgaagtgggaattggtaatggggcatccataggatatatgcgggctgcgtgtcataccatggattccatcaccttgaaaggcagggattggacaaagacttctcgacaactggaggagaaactgtcggaggtgcatacattagattgtctgcatatagggcatactcctttttataaagaagtttttgaactggtacttccttatgccggacctcgtagttgttttattgtcggaggaattcatgaatcgagggaaaaacggaaatggtgggagcaaattgtaaccagtgagtcgacgggtatcacttttgatttgtatgacataggattggtcttttttgataaagcaagatataaacagcattatattgtaaattttttataaccagaaccatgaagaaaagcatgatatacaccaaaacaggtgataagggaaccacatcattggtaggtggtactcgggtgccgaaaacacatatacggcttgaagcctatggcacagtggatgagttgaactcgtatttgggattgttgcaaacgtatttgacggatgaggaggataagcaaatcatttttcgtgtacaaaataaattattctctgtcggttcgtatctggcaacggatcagacacaaatcgatttgcgtatggaaagtcgtatagaggatgaagacatccggatgttggagcaggcaattgacgtaattgacaatgagcttcctcctttgaatgcttttattctgccgggaggtgaccgtggagcagccgttggacatatttgccggacggtgtgtcgccgtgccgagcgacgtattcttgcattggctgaagaatgtgacatagatgcccgtgtaacagcatttgtcaaccgtttatctgattatttattcattttgacccgaaagttaaatcatttaactaaaacagatgaaattttttgggataaaagttgcaaatgaaataatttattatacttttgcggctaattagagaacaaaagaaaagtatttacttaaaaaataagaaaactatgtactggacattagaattggcctcgaagttagaggatgctccctggcctgctacaaaggatgagttgattgactatgcaatgcgttcgggcgctccgttggaagtaatcgaaaacttgcaggagatggaagatgaaggcgaaatctatgaaagtatagaagatatttggccggattatccgagcaaagaggatttctttttcaacgaagaagaatattagaaagagaacatagcggacagaataaaaaattctgtccgttttttgtttgatatttcttcttggaagggggtattggaaagcgtaatgtaactttcctgagagattgaacattatacatggaaaaagtgtttatctttgtggcgtaaactaaaaatagacaaacatgaaaaagattattagtgtattaatggtagctgtatgtttgatgatggctgctcctgctcaggctcagttgcactttggagtaaaaggtggcttgaacctgtcaaaggttagtttctcgaaatcagatttaaaaggagataataaaaccggttggttcattggtccgatggctgaattcaccctgcccattattgggattggtgcggatgttgcggctttgtattcacagacagaactggctgcaaagggatattccaccgatgcaaaactgaaaacgattgagattccggtaaatttgaaatggtctttcggacttggaagtatgttgggtgcttatattgctgccgggcctcagttcggtttcaatattggtaataagaaaggatttatgaattatgatctgaagaagaacaacaccagcttcaatgtgggggcaggtgtgaaactgatccgccatttacagcttggcgtgaattataattttgctttggggcatactgccactctttatgctgaccctaatataatccttgatggtaaaccacttactcaggatgtgaagataaagaacaacacttggcaagtttctttggcatacttgttctagacaaccttatttaataaaagataaaaaggaggcattctttactgaatgcctccttttttgtaattttgcaccatgaaaaaattcgtagatgtcatagttccattacctattgccaaccaatacacttattcccttcctcaggagatggaagagatggtacagattggttgtcgggtgattgttccgtttggaaagaaaaagttctatacggcaatagtgacaaatgtacattatgcggccccggaggggtatgaaacgaaggatatagctgaagtgctagattcatctccggtactgttaccgaaacaatatgagttctggcaatggctggcggaatattatctttgtacattaggagatgtgtacaaggcggctatcccttcgggtatgaaactggaaagcgaaacgttggtggaatataatcccgattttgagaccaccgcaccgttaccggagaaagagcagaaaattctagatttgttgagtcgggatacagaacagtgtgtaacccagttggaaaaaaacagcggactgaaaaatgtgttgactgtcatcaagtctttgttggacaaagaagccatttttgtcaaggaggaactgaaacgtaattacaaaccgcgtactgaggcgagggtgagattggtgaacggagaagcggatgaggcttacttacaacggctgttcaatgaattgtcacgtgctcctaaacaattgatgatattaatgaagtatgtggaattgtccggttgggtaaccaaagggtatgctttaaaggaagtaacaaagaaagagctgcttgaaaagtcaggaggttctgttgccgtttttaacggattggtcgaaaagaaagtctttgaggtctatcatcaggagataggacgtttagataaaggaattttggataccggtgatattaatccgctgaatattgcgcagcaacaggcctatagcaacattcttcaatgcttcagagagaaaaatgtgtgtcttctgcatggtgttacatccagtggcaagacggaaatttatatccacctcattcaggaggtgctgaaaacaggaaagcaagtcttatatttgcttccggaaattgcactgaccactcagataactgagcgtttgaaaagggtgttcggacatcggctgggtatttatcattccaagtttccggacgctgagcgggtggagatatggcagaaacagttgggagagaagagctatgacgtgattctcggagtccgttcctctatttttctacctttccacaacttggggctggtcatcatagacgaggagcacgagaatacatataaacagcaagaccccgccccacgttaccatgcccgtagttcagccatcatgctggcttctatgttcaaggcgaaagtgctgttgggaacggctactcctggtgtggaaacttactttaatgctacctcgggaaagtatggcttggtagaattgaaagaaagatataaagatatccggcttcctcatatagaactggttgacattaaggaactggcgcatcaaaagcggatgcaggggcctttctcaccggtgctgatcaagcagataaaagaggcattggagcgtaaggagcaggttatcctgtttcagaaccgtcgcggtttcgctccaatgatagaatgtcatacctgcggctgggttcctaaatgcaagaactgtgatgtgagtctgacgtatcataaggggctgaaccagctgacttgccattactgcggatatacctatcaagttccccgttcctgcccggcgtgcggtggagtggaattgatgcatcgcggtttcggtacagagcgtatagaagatgatataaaactgatattccccgaggcgaaagtcgcccggatggacttggataccacccgtacccgtaccgcatacgagaaaattatcacgaattttgaactgggcaagacggacattctgattggtactcagatggtatccaaaggattggactttgatcatgtcagtgtggtggggattctgaatgctgatacgatgttgaacttcccggacttccggagctatgagcgtgctttccaactgatggcccaagtggcaggacgtgccgggcgtaaaaataagcaaggactggtcatccttcagaccaaatcgccggatttgcctgttattcatcaagtgatacataatgattatgaacaattatactacgatcaattggcagaacggcagatgtttaagtatccgccttactatcgtttgatttatgtatatttgaaacatcgcaaagaagatgttctggatctggcggcggataccatggcagcacagctccgttccggattgggcgacagggtattgggcccggacaaaccgccggtggcccgtatccagaccttatttataaagaaaatgattgtgaaagtggagcagaatgcttctataaagaaagtgcgtgattatctgcttgccgtgcaacgtgccatattggaagatgaacgtttccgttcgttgttagtatattatgatgtagatccacagtaactggtccatgcactggatgataatagaaaagataaacgaaaataaagatgaagatagaattagacgtacatacccataccattgccagcgggcatgcattcagtactttacaagaaatggcgcaagctgccgccggtaagggattgaaagttttagggataacggaacattcgcccggtattcccggtacttgccatcctatttattttagaaacttgcatgtggttccccgccggatgtatggggtggagctgttgctgggggctgagattaatattctggatggtaaaggaaacctcgatttggacgaggactatatgaagatgcttgatatccgtatcgcgggtatccactctttgtgttatgaatatggaacgatagaagaaaacactcatggaatggtgcaggctatcagtaatccttttattcatattatcagtcaccccggagacggtacggcagcgttgcattttgaaccgatggtattggcagccaaagaacaccatactttattggaaataaataacagttctttaaagcccacccgtaacaagcccgatgcccgtgagaacaacctcaccattctccgtttatgcaagaaatatgaagttccggtcatcttgggaagtgacgcgcatatttcgtttgatatagcccgttacgataatttgtatgaattgttgcagcttaccgggtttcctgaagagctgatcatgaaccgtgatgtgaaatcatttaaagaatatctccatttgtagattatatatgaaaagaatactttttgtctgccttggtaatatttgcaggtcttcttcggcagaagaagtgatgcgtactctcataaagaaagaaggactggaacacgagatagaggtggattctgccggaatcctgagttatcatagaggggaattgcccgacagccgtatgcggatgcatgcttcccgccgcggttacaatctgacccatcgttcccgtcctgtctgtacggaggatttttatcattttgatatgatcattggtatggacgaccgtaatatagaggacttgatggaacgtgcccccgacctggaaacggaaaagaaaatccatcgcatgacggattattgccgcaccaaggtggcagactatgttcccgacccttactatggcggtgcgcaagggttcgagaacgtgcttgatatattggaagatgcttgtgctggattacttacttctttagttccggataactgatacgagtatgatacatcgttttcagcttttctttaaacagcgctttaactgttgctatatccttgaacgtaatagggcattctttgaaatacccttcagatacctgtgtgtcaataatcttatctaccagtgtgctgatgctttcttccgtgtactccggcaggctgcgtgaagccgcttctacagagtctgccatcatcaggacggcctgttctttggtgaacgggttcggaccggggtagcggaacttttcctggtccacttcttcgtcaggatgttcgtttttatatgaaatgtagaaatacttcgtcagtccccgtccatgatgggtactaatgaagtctttgatcactttgggcagattatgcttctccgccagtttcagtccgtcggtaatatgactgatgataacctgggcgctttgttcataacttaaactcttgtgtgggttgactcccgactggttttctgtgaaaaaagccggattcaccattttaccgatatcatgatataatgctcctgtacgtaccagctggcttttacctccaatcttgtttgccgccgccgcagccaggtttgccatctgcaatgagtgttggaaagtgcccggagctacttcggacatttcccgaagcaagctattgttgatatttgacaattctaccaaagtcacatctgaagtaaaaccgaatattttctccaaaaggaatagtaacggataggcgaacagcagtaaaataccgttgatcataaaatagatgtacatgcgcgtattcagcttggtcaaatcatcttcatgaatcagctcgaaagcaaaatataataaagcgtaactgataaatacaaccaaagccgtccgtaacaattgcgaccgttgggacaattctctcaaactatagatcgccaccattcctgccactacctgtaacaatataaactcatgtggaaaacgtaaagtgatggagcaaagcaaaatgatagtgacatgtgccatgaatgccgttcttgagtcaaggaaaacacggactataatcggaatcatggcaaatggaaccacgtaaatacttgacaagttctgttccaccataatggaagacaggacggggaagaatacaatcagcgcaaatagcaaggtgagtgttccttttcgttcataataatctgcccggaacaactccagataggccatgaagcagaacaggaagattcctacatataatatttgtccggccaatgtcagtcttttctcttgtaccgagtcgctgcgtttttcccattccttgcgtaaggattccaatatattgtaagtttgctcatcaacaatttctccacggtcaataatcttttgtccgttcagcacaaagccgtttgcccatgaaatattagagagcagatctttttgcgcggcttcggacttttcttcatcataaaccagattaggtgtaatgtaatcattcagactacattgttgtaatatcttctttttgtagtgggcggtatccgcattcagcaaatattcataggcttccttcacggtgtacaattggtcgataaaacggctcgtagctacattcttgtctaccagccgtatggcaatgatactgtcttcctccatacgcttcaagtcatttccggcaatgattccgtcctcatacagtgcctttaatgtgcgttcaatataacgcacatagtccgtgcccggcagtgaatggcgtaaggtcttgttgtaatcctcccttaatttggaaaggacatttttttcggcttccttgtctatttggaaataaggttgatagtctgccaggatgctgtcctgttccttttgtacttgcagatcgtttttgtaaatcggaaaatcaaaagatgcctgtaacagtccgtatttccaaggcttgtttatatcaaattgatagttgaacttcccttcattgggcaaaaagtagactattaccgatactgtggcaatgaaaataaggcttttataaatcaaatttttatatgaaaaccgtttgctggtcttgaaacttctcataatcgtatatttttgcgcgcaaaatacgaaaaaatcgggaaatttagattaattttgcagcgtattttatataaaacaacaatgtcagaaagaaaagtaagagttcgttttgctccgagcccgacgggagcgttgcatatcggcggtgtgcgcacagccttgtataactatctgtttgctcgccagcatggtggagatttaattttccgtatagaagataccgactcaaatcgctttgttccgggtgcggaagaatatatcattgagtcgtttaagtggttggggataaacttcgacgaaggagtcagctttggtggtaactacggcccctaccgtcagtctgaacgtcgtgatatttataagaaatatgtacaggtgttgcttgacagcgataaggcgtatattgctttcgatactccggcagagttggatgccaaacgtcaggaaatctctaatttccagtacgatgcttctacccgtatgtctatgcgtaactctttgactctgccgaaagaagaagtggatgcactgattgccgatgggaagcaatatgtggtacgtttcaagattgaaccgaatgaagatgtacacgtacatgatattatccgtggcgaggtagtgatcaattcttccattttagatgataaagttttatataaatcggcggatgaactgcctacttatcatttggcaaacattgtggacgaccatttgatggaagtttcccatgtaatccgtggtgaggaatggttgccttccgctccgttgcatgtcctgctgtaccgggctttcggctgggcggataccatgcccgagttcgcacatcttcccttgttgttgaaaccggatggtaacggtaaactgagcaagcgtgatggtgaccgtcttggcttccctgttttcccgttggaatggcacgaccccaaaaccggtgaggtgtcttccggttatcgtgagtcgggttacctgcccgaagctgttatcaatttccttgccctgttgggatggaatccgggcaatgaccaggaactgatgtctttggatgaactggtgaagcttttcgacctgcaccgttgcagcaaagccggagcgaaattcgactttgaaaaaggaaaatggtttaaccatgaatatatattgaagaaaagtaatgaggaagtagccgggcttttcatgccgatcttgaaagagcacggcattgaagctcctatggataaagtagtgaccgtggtaggtttgatgaaagatcgtgtaagttttatcaaggatttgtgggaaacttgcaaattcttcttcgtcgctcctacggaatatgatgagaagacccgtaaaaaacgttggaaagaggactctcccgaacgtatgctggagttggcggacgtgttggaggccttggacgacttctcgctggaaaaccaggaagctgtggtcatgaaatggatagaagataaaggttatcacttgggtaatataatgaatgctttccgtttaaccttggtaggtgagggtaaaggcccgcatatgtttgatatttcagctgttttagggaaagaagaaacattgcgacgcattcgtcgggctgtggaagtgctcaagtaatagccggtagttatgatttataacttagtcatctatatttatctattcggggtgaaggttgccggcctgttcagtgccaagcctgccaaaatggtaaaaggacactgggaggtatttgatatcttgcgtaacaagatagacaaaaacgcccgttatatttggtttcatgcagcttcattgggtgagttcgaacagggacgccctttgatagaacgtatccgtaaggagcatcccgaatataaaatattgcagacattcttttctccctcagggtatgaagtgagaaagaactaccagggggcagaccttgtctgctatctgcctttcgacactccgcgtaatgtccgtcggtttgtagaattggctaatccctgtatggtgttttttatcaagtatgaattttggcagaattacttgaatgagttgcataggagaggtattcccacctatagcgtatcttccattttccgtcccaatcagatttttttccgttggtatgggaagagatatagtgaggtgctgaggacttttgctcatttgtttgtacagaatgaagtttccaaaaaattactggcaacaattggtgtgaccgatgtgacagttgtgggcgatactcgttttgaccgtgtgctggatatctgccatcaagccaagcagcttccgctggtggagaagttcaaaggtggctcgttgacttttgttgcaggcagctcatggggaccggatgaggatatttttatcaaatatttcaatgagcatcctgagatgaaactggttattgctcctcatgtggtgagcgacagtcatttgaaagagattttagataaggtgaaacgtccgtgcatccgctataccgaggctacggaagaaaatgtgacacaggccgattgtttgattatcgactgttacggattgctgtcctccatttaccgatatggtgagatttcgtatattgggggtggtttcggagttggaattcataatgtgttggaagcggctgtatatggtattcctgtgatattcggacctaacaacaagaaatttcgcgaggcgcaacatttgttggagcagaaaggcggttttgaagtgactggctatgatgattttaaacggctgatggacaaatttttgtcggataaggcttgcttgcaacaagcagggaaagctgccggagattatgtgaaccataatgccggagcattagaaaagataatgaaagatatcactctctgattgtttcaaggtaattggtaatataaataggttatagagaagatttggctctataacctgtttttttccttcaaatccttcattgtaaggtaatatattgttactcagttgtttatgatgaaccatttttactttatttccttcatccggatataaatccttcagcctgctgaaatgagggcttatccggcttttgggtcagcagaaatttagtggggatttatttcatgcaattgtttgtgatacccccctgtacgagcgttcgtaattttatggatggtttgtatgacaggcaaaagtaaagattgggattggatatatgccctcactttagcatttcgacttgttgctatataacatacatgtagtcagatgtatatcttcctgccaatatgttgtttcgcttttttataagaaggcagtctggggacttttcctccctgcttaaggaatgcgtagctttgtaatcagattcatccttaaaagctcttgtctatatttctaaacctttcccgccgtatggttaaaggtttttttcctgtttgttctatctccgtaagcctttggagttaactccatagccttgggagataactccaaagcttatggagatagctccaaaggctatggagatagaatacatccgtataaaaaggtttaatcaggagatagaaaaggtttatgcaacagggttcgatctattgtcatttccataataattccaaatgcttctggacttttatagtagaactttaaaaaaaatggttgatgggatttctctttgatgaaacaaaaaaagttaaaatgatgaacttttctccttttaaagctaacataaactctttataagtagcaacattctgtctttcagtttgttatgcttcgcttttacatgacccgatttatatatctcttgataagagatatatattttctgtgcaaaaataagcaaagttttgagaactaatacattt

SEQ ID NO: 14516 - DNA, 1281 bp, Unknown
  gut microbiota DNA sequence
cagcctgacgtgtatttcttacgccaaggtggtcttgcccgcttattttacggacaatatggttcttcagcaaaatacgaaggttacttttcatggtaaggcggcattgggcaaaaccttaaaagtaactacaggctggaataatgaagtgtatgtgactccggtgaataaggatggttattggactttgtctgtgcctactcctctgcaggagggccttatacgttgacatttacggatggtaagaaattgcaattaaaaaatgtaatggtgggagaggtatggttttgttccggccagtctaatatggagatgcctgttgcgggttgggggaaagtcatgaattatgagcaggagatagcggaggcgaattatccttctatccgtttgttccaagtgaagaaaaatacttcagtaactccgttgagtgatgtggaggctacgatgggaggatggcaggaatgttcttccgccacaattcctgaattctcttcgctcgcttatttttatgcccgttcattatggaaggagttaaatgttcctgtaggagtgattgactgtacatggggaggaacacctgctgaagcgtggaccagctatgaaacattgaaacaggtactgggctttcatgaggagttggctaagatggaacaattggattttgaccctgttcgtatggaaaaggcctataatcaagagcgctccgagtggcaatctcttttttctaaggaagacaagggaatggaggaagataagccttgctggattgcaccggacttgtcagaagaacaatggcaggatatgtgtcttcccggttactgggaaaggaatggattgaaaaattttgatggagtagtatggttccgtcgtagtcttgaaattccggcagaatggattggcaaaccgttaaaactaaatttagggatgattgatgatgaagatattacttattttaatggggtggagattgcccgaggggcaggctatatgacaccgcgtacttataccattcctgcaaaattagtgaaggctggtaaggcggttcttgctgttcgtgtttctgattttggtggagagggcggtattcatggcaaggcggaggaactttatgtagaagctgatggaaagcggatcagtttggcaggagattggaaatatcgtatcggactttctttaaaagggtttccacccgcaccggtttctcccattcaaagttccagttaccctacggtgctgttcaatgcgatggtcaaaccatggactgcttttcccattaaagga

SEQ ID NO: 14517 - DNA, 695 bp, Unknown
  gut microbiota DNA sequence
ccgcgcttcggcttctcgcggggcttcattccgctggtgtggaaggaggaggcttcggggcggagcagggcttcggggtcgtggcagaggaccgacatgcgcgtggcgttcttgcattgtccgtcaatctccactccgcacaggcgagcgtaatggtcgttcacccactcccataccatgcggtagttggccttggtcactccgccctccacgtggctgatgacccggatgccgcatcccgagatggtgatgtacaccaaaaaggaatgaatatcctcctttaccaaagtcaggatggcggcgaatcgctcgggggggatgccgtctatgtccaccatgataaatcccgtgaatcccttgacatgggcgtaggttctccctccctccagcaggacggaggggatgaatgccggctgtgcgttcttcatgttgcttttggtgagcttccactgctccagctgctgcgcgtcgcctgtcgcctcgatgtcggacagcgtggccagatgggcgcggtaatgacgggtggcggcggtgtgggtgctgttggttatctccttgaaaagaacctgccaggtggtgggttcaggccgggtgtcgcgcagggagtggaagcgcgatgggttgcttgatttaaaaaaatctttattcataatgtgtagcgtagaattttgtgtctgcaaagtacagagtaaatt

SEQ ID NO: 14518 - DNA, 5136 bp, Unknown
  gut microbiota DNA sequence
tggtgtgggtgctgttggttatctccttgaaaagaacctgccaggtggtgggttcaggccgggtgtcgcgcagggagtgaaagcgcgatgggttgcttgatttaaaaaaatctttattcataatgtgtagcgtagaattttgtgtctgcaaagtacagagtaaattttcaggaggacaatagcgatttaaaataatcactctatgatttaaaataatcgggaataattagaaatcaagataaaacgataatgaaaaacgagactaaagaatctcaaaatactgcgagggcaagtgttgttatcaacattcatggcggtaacaatcaaatactgcccaacgctacagaggtagtgcaaaatttttatggtgctgagttcgcccatgtgagaacacagaacaatggtatggaagagaaagaggaggatgaggcagtgcgtattgcccgtggcacgttgtgcatttactactctgatgactgggaactgaatgatatcatccgccgcatagctgattgccgcagtgcgtcggacttggcgaaccttgtggtgaatgatatgcataagcataccatccttactgccgaacgtatggtaagcaaggatttcatagaggcgctccagcagttcctgacgttcaagtcggggacgtccacgggtaatattcgtacgcagataaataatgtgaggagagaatgaccagaaagataatttaaaattgataaaataaaagttacaatgaagagtcaaaacaaacaatctgtatggacgtgcatgagtgaaaaagcattttctgccgatgtgcattggatgacgattttcactcccgcttatcaacgtgaagctaccatggagtgtttctatcgtacactcatcactgacgtgtattcgtttatcggcaaatgccttgtgctggcgtttatgcctgccggctatttgctttcaagaaaataggtctatatattcttctttgccatgttaaaactaaatcaaaaaaaactgtcttacacatttgaccggtgccagcagtgcggcatttgttatgcggtgtgtcctgaaaatgccatttcattatctttgcggcatgacgggttgcacgatataaagataaatgctgcgctttgtatcgcttgcggcaaatgtgtgagaagttgtccggctaacaaagagtatggttacgaaggctattttgatggctttgcacaaaagaaatactacttgggatatcatgcggacaaccgtatccgtagggaatcttcttcgggtggtgtatgtaaaacattgatcatcgattccttaaagaatggcatggtagacggggcttattcgttgaagtgtacagattctttcccttttgcccaaggtgagttttatacccgtgagcatattccttcattcggagatatgccaaattccgtgtatcactccgtgatggcttgcacggaaattgaccggattcaaccttgcaagcgattgatgttagtggggacggcctgccagttgagagccttgaactccatcataaaggataaatgcgatgaggttgtccgggtgtgtatcttttgtaagcaacagaaaacactggactccacacgtttcctggctaagatgatgggtacgtccgttcctccaaatttaaaattccgaccccgctatcgcggagatggttggccgggaatcgtgagagtggacggatttgagctgccctggaatagggcagctcaaatcccgttcggtaaacgattgtggacggtgcctggatgcggcatctgtggggattcttttggtatggaagcaggagcggacatcacgctgatggatccttggactatctgctcgcacaatgagttgggagagactttggtaacggttcatactcagaagggggatgaattgcttcaacaatgtgtttccctgaatctggaaccccggtcattttccgaagtggagcctgcactttcgctcaaggatgtgtggcgcaaacaagtgaccgagccggtctacaggggcagaccttgtaagaaacgttatgtccgtgcagtccgtgcggaacggaggcagcaaagattgttgcgcatggtggtggaaatgctgcctcgcttacccattatctgctatcggactcttgctaaactgcccgatttaagaaacagaatactaaaataacccttcattctttttaacgatgcaaattaaagtgattaccagacatacgcccaataattacggttcgttgttgcagtccattgcaaccctccgggtgattgaatctttggaacatcagtgtgagattattgattattggaaacgcgatgaggtgggactgcaaggaattctcacatcgctgcaaggaaaatcattatggaaaaacagtttgtttaaacgtatggcatacgtggctttgcggtatccgggtgagaaaatagcggcgttacgtttcgataaaatgcgtaggcggtatctaaagctgactccccgttgctattcaatggaggagttggagtcgcttcaagcggatgtgtttatgacgggtagtgaccaggtatggggaccgttgctggatggaggatatgatgaagcctattttctttcttttgtaaaggaaggtatacgtaaggtatcgtatgcaggcagctttggccgcactgagttttcggacattattattgcatcttataagcggttactgtcaaaatatgatgcgcttactgtacgtgaaagcagtgccgtgaagcttttggaggagtgggggattgactgtggaggacaagtactggatcctactttattgctcgactccggtcagtggagtgagtatattgaagaagatgtgaaaaaagagtatgtattgatttatgaaatacataacaatccccggttggacgattatgccaagcgttttgccgctcatgccggtctgccgttagtacgtgtgtctcctacgcttcaccagttagcccgagggggcagattggtgttttgtccggaaataggtacattcctttcgtatatcaagaatgcccgttacatgcttaccgacagttttcatggaacagcttttgccatcaacttcaatactccatttctggaagtgctgcccaataacaagaccggagcacgaaatcaaagtatacttcaactgacaggactggaagaccgaattgtcacagattttaacgacttctcattggtagaccggcagattgactatgctaaagtgaatgagataatgcatagagagcgggagagatcgatggaaaaactggcggagttgtgcgaatgtcagatgtgagaattgatcgatattctttacccttaaagtgtataacaaaataacttaatcaggctttgcagccttgaaaatcttgcaggtcatataattaatgttgatatatgaaaatcttactggctaataaattctattaccgccggggcggtgactgtgtccatacactcaacttggagcaactgctcaaagcgcacggtcacgaagtggctgtgtttgccatggactaccctgaaaatctggaaactcaatggagcaagtattttccttctgaggtgaagttcaaactcggaacgggcatgattgaagcactgatgagaccgtttggcacgcgagaggtacagcggaagttcaatgcgctgctcgatgatttccatccggatgtggtacatctcaacaacatccattcgcaactttcgccggtcattgcagagatggcgcacgaaagaggtataaaggtggtgtggaccctgcacgactataaattgctgtgccctcgatacgattgtttgcgaaatggggaaacggtatgtgaatcctgctttgcagacaagcacaaggtgttggaatataaatgcatgaaaaactcgaaagtagcaagtttcctctcttatggtgaggcaatgaaatggcaccgggagcgcttggagaactgcacggacgctttcgtctgtccttcacaatttatgcgcgacaagatgaagcagggtggatttgctgctgcaaagttgcacacattgtgcaattttatcgatgtagccccatgtgtggccgatgattacagtcaacgtgatgattattattgctttatcggccgcctttcgcacgagaaaggtgccaagactctgattgaagcggccaatgcgttgccgcaacataaactggtggtaattgggggagggcctttggaagacgagttgaagtctatggcaggcaagcacattgagctggcaggctttaaacagtggagcgaaatcaagcgcttggtgggcaaagcccgtttctcggtcatcccatcggaatggtacgagaacaatccactttcggtcatagaagctcagtgcctgggcactccggtgctgggtgcccggattggaggtatccctgaattgatatcagaggaaacgggcatgactttcgaaagccgccatacggccgacttaaaggaaaaaattgaagcgatgtacggtcggactttcaacaatgctaagattgctgccgcttcacataagcgttataatgcggaaaggtattataatgaaataatcacagtgtataaaatgtaaaaatattataatgtttatggcttatcaaaaaactgttcctactcctacggacgcaagtatcatcctgacttatcgttgtcccatgaagtgcaagatgtgcaacatctggtttaatcccaccaacaaaagcgaagagataaaagcgagtgatttgagaacactgcctaagttgaagtttatcaacctgacgggtggcgaacctttcgtccgcgaggatttggcggagattgtggaggaatgctaccggcataccgaccgtattgtcatttcgaccagcggatggtttgaggatcgtgtggtggcgctggccaaaaagtttccaaatatcggcatccgcatttccatcgaggggctgagtggcaagaacgacgaactgcgcggtcatacgggaggtttcgacaagggacttcgcacactgctgacattgaaggaaatgggactgaaggatatcggtttcggctgcacggtgtctaacaataactctaaagacatgctttcgctctaccaactgagcaagagcttggggatggagttcgccacagctgcttttcataattcgtactactt

SEQ ID NO: 14519 - DNA, 5433 bp, Unknown
  gut microbiota DNA sequence
cattgaatggcagctgaaggagcgtcatccgaagagctggttccgtgcctggttcaatatgggactgataaattatattgaaggcggtcgccgtatgttgccttgtgaggccggttcggctaacttcttcattgatccgtttggtgatgtatatccttgtaatgggctggaagagaagtattggaagaagtcgatggggaatattcacgaaactcccgactttatgaccatatgggagagtgagcaggcacaggaggttcgcgccatggtgcgccgttgtcccaaaaactgctggatggtgggtacggcttcgccggtaatgcacaaatatattaagtatccgctgaaatgggcgttaatcaataaactgaaatcactgcaagggaaagatatttgtctggaaccgaaatggtgcgatgtagggcaagactcttgtcaaggtgatttaagggagaaattctgatgaaactagtagttaccggcacccgtggtatccccgatctcatgggtggcgtagagacgcattgcgaggaactgttacatgttattagacataaaataatataattcacttgatagttatccttatatgaaaaataaaagctatatttgtgataaaatctcgaatgaagcgattaaagtatgattattcaacttacaataggaaattttctatctttcaaagaacagtctacattgtcattagcggcatcggctttgaaagaaatacaggttccggctgaagatataatctttagtgtagggactgccggattattgttaatgaagagtgcggttgtttacggtgccaatgcatccggtaaatccaatttcattaaagcatttgagttcttcaagtggtatgtgataaattcatcgaaggatattcaggcaggggaacgtgtcaatatagaaagtttccggttaaattcgcttacagcaggtgaaccaagttattttgaagccatattctgtgatgaggataatcaatatcgttatggttttgaagctgacaattcatcggtacattcggaatggctctatcaaaaagctaataagaaaagggctaaggaggtggaattattctaccgggaaaaagacagttttgatattcataccaagtttgccgttggtaaagagcttgcaggtaaacgaatggtgagagcaaatgcactattactttctgttgcggcacaattcaatgatccgacggcagtggagatcatgaaatggttgaacgataccactattatttcaggttctaatgatgagaagatatggaataccgccaccatccaactggatgacatcacaatgaaacagcgaattgtggagttttcccgttatgctgatttaggtattgaaaatattgaaaaaattgataatactattgtcagtacgcatacacaatacgatgatgaaggtaatgaagtcaaagctgttaccttcccattcaggaaaaatgaatcggaaggtacaataaagtatttttctttagcatatcccattattgatgctttggataatgggaagcgtctgattatagatgaatttgattccaaaatgcatccacttcttacgtgtagaattattaccttgtttaattcaaaagaaacaaatccgaaaaatgcccaattgattttcactacccacgatacaaacttgttgagtgctaatatattccgacgagatcagatttggtttacacaaaaagaccgttatggagcaaccgaactttattcattggcagagtataaagttcgtaatgatgcttcgtttgaaaaagattacctgtccggaaagtatggagctattccaattgtcggagatttaacccgtttgtttaatacgcaagaaaaataaactatggcggctacaaaaaggaaaaatatgaatccgcgtatcgaaagaaagataacccgtatcagtggtgtgcgtgaagtgaaacaaacatttctgattatttgcgagggggttaatactgaaccagactactttaatgccttccgcttgacttctgccactgtgaaagctatcggtcaaggcatggggacattagcattagtacagaaagctatcaatataaaagagcaggaaaggcaaagaggaaggacatacaatcagaattgggtggtctttgacaaagatgattttccagaaaatgactttaactccgcaatcctgtcagctcgccagaatggttttgaagtggcttatagcaaccaggcttttgaattttggttcttgcttcacttcaatctgtatcagggggctttgcatcgttccagatatgaaaaaatgttgagtactttgctcggatttgcttatacaaagaagtcgggcgtaagctctaaaatgtttaatgctttatttcttaaacaagaacaagccattaatcacgctaaaactatcatgaaacaatttgatgggaataatccggcacaacaagagtcttctactactgtttataggcttgtagaagaattgaataattttttatagaaagccaaataattggggcgaagttgcctttgtctggttgttgagggatttggcgtggtttcttaataactaatatttaccgataaaacttatctcctcatttcctgtatcaggaaatgaggctaaatgcattgtggctgtcctattcggattgtagccttcattaataataatctaaattttgatgaaactagtagttaccggtacccgtggtatccccgatatcatgggtggcgtagagacgcattgcgaggaattatttccgcgcatagcagccaaaggtgtggacaccactctcatccgccgcaaagattatgtgagagattctctcaccgagtggaagggggtgaagctggtggatatcagcgcaccgaaaaggaaatcatacgaagcggttgtccatacgtttcgggctgtaaacaaggcgaaaaagctgggagcggacgtggtgcatattcatgccatcggacctgcgctgttagtgccatatgcaaagatgctcggcatgaaggtggtgttcacgcatcacgggcccgactatgaccgtgacaagtggggctttgccgccaaaagtgtgctgaaactgggggagcggttggggtgcaggtttgcagatgatgtaatcgtcatatctgaagtaattcaggatctgattgcccggaagtaccatcgacgtgagagggtacatctgatttacaatggtgtgccgaagcctgaaatttgcgactatcccgactattttgaagaactgggtattgagaaaggaaagtacatccttggcatgtgtcgttttgtgccggagaaaaacctgcaccacctgatagaagctttcaagaagttggaagctggagattgtaagttagtgctggcgggcgatacggattttgaagatgaatattcactggggttgaagaagatggcgcaagaggcaggcgtggtgctgacgggattcgtgaagggacgtaagttgcactcgttgctgacaaatgctcgctgttattgcctgccttcatcgcacgaagggttgcctattgcattattggaggctatgagttatcacttgccggtggtggtgagtaatattcctgccaatctggaggtaggcctttcttctgactgctattttcattgtggagatgtggatgctcttgccgctcgattgcagaaggtgatagacgaggattatcatagtgtgcagtatgacatggctccgtatgattgggacaagattgcaaagcaggtgatgggagtttatgagggtttgttgaaataagaataaaacggatgatgataaaaaaactgatttgtgcggcggcattattgatggtagcaggtttgcagcatacgcaggcacaatatgtatatggcaccacggggcttcttcacgcccccagcgcggatatgcagcgcgacaagacttttctgtgcgggttttcctatctgcaagtggcggctaccccgaagcattggaattatgacacgtggaattactacataaacatcaccctctttccgtggctggaagtgggctatacctgtacgctgcacaaaataggattgccccagtatggttattcatataagttccgcaatcaggaccgccagttttccgcccggctgcgtgtatggaaggagggatggtggaaggagtggacaccgcagatagtggtgggggcgaacgatccgtccaccaacgatgtgctgggcgaccccgataaggacgattatggttttacgggtacgtcttcggtgggtaacggacactggaaccgctattacatagctgccaccaagcacttcggggtgaagaatgtgggggagttggggatgcacttcggttatgtctataacaagcggctggattatcaccggaacggacctgtggcgggggtgaattttcagtttgccctgccggctacctctttttggatgaaggctgtgaatgggctgaatgtgatagcggaatacgatagttattcggtgaattgtggtatcgggtataacttttggaaggattatattagtggtgtggtggaactgacccaatgtaagtatcccagtgcagggatggtattcaggatacatctgaaataagggatgatgcatggcaaggaacgattgtcttcgtgactaccagcaggagatgaagctcaggctctttgaagagtgggagcttcaccggagtgtgatggtacaaatgcctacaggcacgggaaagacacatctgctggctgcggtggtgaaagagtttctttgtggtggcggtgtcggtatgcgggtgtggatagtggcacaccgcagggagctggtagagcagatagaggaaaccgtagcccggtatggaatgggaaaagaaccggacaagtcggcaaagaacggaaggacggggaaagacagtatgccggaagaatccgggagggtgagggtattttccatccagtggttgtcacgaaaccggaagattatggacggacagccggatttgatcgtcattgacgaggcgcatcatgccctggcggaaacctaccgggagctttggaagagatatccggaggcgaggaaactgggcatgactgctactccctgccggctgagccgcaagggattcacggatttgtttgataccctgattacctcataaagcattgcggaatttatcgggaggggctggttgtcgtcatttgactatgtgtccatccgtgcgaacagcagtgaacagcgactgattgactcgttgaagaaacggggtgcggacggggattatcaggtaaaggaaatgaatgcggtgttaaatcgggaaatcggtattagacaattgtacgagagtgtccgaagatatgctgctgggaagaaaggaattgtctatgccgtaagtattgcacacgcccgacagattgcagcctattacagcttacatggtgtggagtctgt

SEQ ID NO: 14520 - DNA, 305 bp, Unknown
  gut microbiota DNA sequence
ggcttgtagccgtacttccggacatctatagctgaaatgaactcgttggagcagagcttcatcccattgatttgtgttaccatatccccgttccctttccggtcacactgaatcacgaaacggcaatcggaaaagaaggacatatcggcatggctgctgcctatgcatcccacctcctcctgtacgaagaaggcacatttcaccgtcttgcaatcctccaggcatttcaggcagatccagatgccgttcttgtcatccgcaccgattccggtcatccgtttacgcttgtgatcatagccgacaat

SEQ ID NO: 14521 - DNA, 494 bp, Unknown
  gut microbiota DNA sequence
gttatagcatttgtaataccttcactaaatacgttttctttttcaatagcagtggagaaaatcaattcatcgcctgtaggattagcagaatacgaagccaccagttctacactagtaaccatatcagcaatcttgcctacaatgtcttctactttcttagtggcagcatcaactttttctgccatttctttcaatgctgcgtcagtggattcttctacttcttttttcaatgtctcaatttctgcttgtacagctttgattgcttctgcctttgcatctgcaacagccttgtctgcagcggcttttgcagcagcggcagcatcaccagcagcttttgcagcggtttcagcggcagttgctttagcaagagcatcgcttgcatcttttgcagcagtagttaaagcagcttgcaaagtagcgatctgagaagtcatgtcctccttagtcgccagtttgttaatttgttcctgcaaattgtctatgtcatcatcata

SEQ ID NO: 14522 - DNA, 735 bp, Unknown
  gut microbiota DNA sequence
atgccgccaccatcatctcgaaagtctttttctcgatagatactatttccatattcatgtcatttagagtttgccgcaaaggtaacgaaacggcatacaagacgtatcgttttccgctgaaaggctgcctgttgcgccgtttgaccgggttacggagccatcttccgcaaaaatcttacgtgagtcacgtagtgagttgttaaagccccttttgtttattgccgaattttgtcgcagaaacaaaaagaaaggactgaacatgaaagtgataacaatggaaagttccgcctacaaggagatgatggcgcagattgcgaacatcgcagggtacatccgcgaggcaagggacgagaagaaacggaagcgggaaaccgaagacaagctgcttgacacggcacaggcggcgaagatgctcaacgtgagcaagcgcaccatgcagcgtatgcgcaccgaccaccgtatcgagtatgtggtggtacgcggaagctgccgctaccgcctttccgagatactgcggctattggaggacaacacagtaaggaacgaggaagggacaatagacaccctgttccacaaccacacgctgcgcacgggcggcaaaccaaaaggaaggaggacataggtcatggaactgctcacacgaaacaacttcgagggctggatgcagaagctgatggaacggctcgaccgtcaggacgaactgctgctggcgatgaaggctgaggggaaacagcc

SEQ ID NO: 14523 - DNA, 240 bp, Unknown
  gut microbiota DNA sequence
catttcttccagttcatcgtccgtcaacaggcggatctcttcgtccgaacaatagtaagcgatttcttcgtccaaatcgaatgctgccggatcaaggcttctgatgccatccagcagttcctgttccagtctttctacggaaaccagatagtttccatctttgccttgcacttcccgtgcaggatagctcatttcccgataaaccaacatcgtcatttccggattggcttcctgctgtcc

SEQ ID NO: 14524 - DNA, 321 bp, Unknown
  gut microbiota DNA sequence
actgattcttaaacgtgttttcgggaaagacaccgaaatgcgtacactgctcggcaccatgagggaaggcatcaaggaaatggaaacattggcgggtatagactactctcccgtcacgatcaaccggtataagaacgtggtgaagaaattacagctgctcatcccctcttattatggaaaggaggatgtcactttccatgagctgacaccggagttcatccgtgcgtttgacatttacctgaaaacggaggcgggactgtgccggaacacgatagtccgttatatgaaatgcttcaagaaatttaccaatatggcattggc

SEQ ID NO: 14525 - DNA, 214 bp, Unknown
  gut microbiota DNA sequence
gcctatacgatagagcacatcgtagaatccatgaaaagagtgacaaatatgaaggtaaaagttcctttcatgccgggatggctgatcatgactgctgctggtatagccggagcgctaggctctccgatgggcatctgtccggcacgggtgagaaagctgcagatctctacgaatatctgcggaaaaaaactgtccgcttcgggctaccgtttcc

SEQ ID NO: 14526 - DNA, 3678 bp, Unknown
  gut microbiota DNA sequence
gatgcgcccatataggctacacaataaatatctctatggcaagagattaggttagagttcaacagacctatcctcaacgacttagctggaggagaaatccaaaggtgacaaaagcatgtcggtaaagtcattagtcagctaaataccaagctgcgactgcatggcgagaggaaaagacagacacaaggatgaagcctgattggttgaacgatagttctgctgcacacgtaccagccccgacgaaaggtatttgattcacgtcgggctgaagcaccccatgtaaaccgaaattacaatggagcaggagctggcttcagagcaaccacaataagtggaataggaacgtaagtcgcatccgacagtctgccgagccaaacagttattgtgaaagcaaatggggattccctaaatcagaatgccgtaaggctatgggcataggaccctgaatatctgacatgggaacggagcttccgtagtagtccgagcaagggaaagccttgtaacatggcgaagggaagcagttagataacttaatacaaataatggaaaatgtgtgagacattatgagaagtcctgagcaagtattaaaagctttaaacaagcatggtaaagtttcggattacaagttcgaaaggctgtaccgtatcttattcaatgaggagatgtttcatgttgcttaccagcgtatttacgccaaaccaggcaatatgacacccggtacggatgggaaaaccatcaatcggatgagtcttcaaagaataaacaaagtcattgcatctttgagagatgagtcttacaagcctaatccggcaaaaaggatatacatacccaagaaaaacggtaagaaaagaccgcttggaattccttcctttgaggacaaacttgtacaggaggtggtgcgcatgattcttgaagccgtctatgaagaggtgtttgcaaacacctcacatggattcagaccaaacagaagctgccataccgcattgacccatatccaaaagacatttacaggtacaaaatggtttgtggaaggagacattaaaggattcttcgacaacatagaccacaatgtattgattgcaactttgcggaaacggattgccgatgatagatttctaaggcttatccgcaagttgttgaatgcgggatatattgaagactggaagtttcataatacaaacaagggaactccacaaggcggtaatatcagtcctatactggcaaacatttatcttgataattttgacaagtatatggaagaatacgccctacgcttcaataagggaaaagaaagacacatcaccaaagaatacaagcaacttagcgataagatgcaacgcatccttaaaagcatcaagaacatacaggatgcagatgtcagattacagcttagggatgagtatgagaaactgagacgtgaaaggcaaaagattgagagcagagacagtatggatgaaacatacagaaggcttcgatacgtaagatacgcagatgatttcctcattggtgttatcggaagcaaggcagagtgcgttaaaatcaagtcggacattaccaagtatatggaagaaaacctcaagctggaactgtcacaggaaaagacattgataacaaacgcacaaaagcccgcgaaatttcttggcttcgatgtttcagtccgtaagtctgatgctatcaagcgggacaagaacaatgtgccagcccgttattacaacggtaagatagtcctaaaggtcgccatagaaacggtgcggaacaaactggaagaatacagcgccatcagatacaaggtagaaaatggccgacaagtttggtttgcaaagttcagaggcaatcttatgaagaagaaaatcgaggacatagtggcggcatataactctgaaatcagagggttctacaactactactgcattgccaacaacgtggcatacgcgctctcaaagtttggatacatcatggagtacagtatgtaccataccattgcaggaaaaaccaatagcactgtaagcaaagtcattgacaaatataaggttgggaatgacattatagtgccatatcaggatgcaaaaggtaaattacggtacaggaaattctataatgagggattcaaacgtaaaccaccaatgtactatacggaggtaaacgacttatcctacacaatcgcaattccacagccgacacttactgagcgattggatgcgagaacatgtgaattatgtggaaaagtcggacctgtagtcatgcgtcatgtcagaaagctaaatcagcttaaaggaaaaactgaatgcgacaggctgatgcttgaaaagcataggaagacattggttgtctgtgaaaagtgttatgccaaaatacacagccatgctaaataaagtcatgttatcaacggagagccgtatgcgtggagacatgcaagtacggtttgggggcaggtacgggaaaacctactgccgaaaggcagtaaggcgttctgtaccgagcctacgtttagggaaagggggcggtatcattgaactggctgcacacctgtatgctaccgaccatgtaccttacctgctggagcggattgcggaacagacaccgcatgtacacccggtatctttctcttttggcaagcaggactctttcggtccgagcttccaacagctggagatagtaccgctatcgtctcctgccctgctttcctatttacaaggtagaggaataaatctggaactggcaaaaagagaatgtagtgaagcccgttacacccacaacggcaagcgttactttgccatcgcattccctaacggttcgggtgggtttgaggttcgtaacccctatttcaagggctgcatcgcccccaaggaaatctcccacatcagacagtcgggaaaagcaaggactgcctgctatgtgttcgagggtttcatggactacctttcctttctgacattgagacaagagagctgcccaaattatccggaattggacgggcaggactatattgtattgaactccgtatcgaatgtgaacaaggctctctatccgttgggcaattacgaacgcatccactgctttttcgacaacgaccatgcaggaatggaagcactccggcaaatccgcatggaatacggcagagaccggtacatccgggacgcttcgcagatttacagcggatgcaaggacttgaacgaatacttacagaaacaggttgaaagaaaaaggcagctccagtccgccaaaggggtgcgcagccaatcaccggagaagaagagcggcttccggttatagcccactataactacacgctccgctttcgtagttgtgggctctcccgaggggattagggctttgccctaatgacccactcagggcgtttcacccctgagaaccccgagcaaagagtgaccctctctttgtaatctccgcttatgggcacagcccctaagaaccctatagcgattatgagcgaacagcggcaaacaactttagtcaataaccaaatcaacataaaaatggcaacaaaatcaagcatacatatcaagccctgcaacgtcaaatcaagcggggctcataaccggagaacagccgagtatatgcgtaatatcggcaagtccaaaatctacatcgttcctgaacagactgccagtaacgagcagtggataaatcccggcttcggcgaccctgacctgcaag

SEQ ID NO: 14527 - DNA, 401 bp, Unknown
  gut microbiota DNA sequence
tcgtttttcaacaaggctcctttctgcaccagattcttcagttccttgtcgaaatccacgtctatctccgatgctccttgaatttcgatggccttctgcatgatggtgtctttgctgtacagtcctttggtcaggtcggaaacagccgatacggtggtctgcgtgtccagttcgtaggtcttttgggagagggacagggattccggcagtcggcctccaaggtgtatctgccgcatgacggactccctgaccatcccgttcaggcacgccccgttgagcaggaacgaccgcatatcgaccgatccgttgccatagtcggatgtggagaagcgtgctcctgcgaagatgatgaccgttccgttcttacgggtgggtatctctatcggagtgggcaggattgt

SEQ ID NO: 14528 - DNA, 969 bp, Unknown
  gut microbiota DNA sequence
gtttcatttgactgatccacggggtgcctcggataaatccggacgtacttttaataatccgtaccagtatttctttgaacagatgcatatggatgatgctatttatgcggatgagtctatttatgaatatcccatgcagcaaggtggtggaaatgatggtcgcccctattctttcggtcgtccttcgtctggtggctcaaaggctgcgtatccatgtaagagctatggacagggacgtataaatcctgcttatttttatggagtctttgatccgaatgatatgcgtcgtgatgtgagcattactatgaccggcagtaatggtaaaggggttgagaagttaattccttttgttcccaactcaaaagctgaaggcggtggcttgacattgaataaatgggatgagaatcgtcaggctaatccatgggtggcagcacaacgtaaatcaggtatcaatggtccgtatatgcgtatgtctgaagtttatttgggctatgcggaagtatgtgcggcattaggtgatgtggttacaggtaaacaatatttaaaaacggttcgtgaacgttcgttcccgcaaggtttggctaacacagatgcttttattgcatcttttggtaatgacttagttcgtgcgattattgaagaacgagggtttgaatatgcaggtgaaggtgatcgtcgttggacattgattcgttctggttatcttccggaagatataaaaagaatcaaagatatgactaaagctatgatggatggtttggcaactaaaggttattatgagtttgaaaatggtaatattatttctgcttatatatggacaaaattagttgatgcaaaaactatatatggtcatcgtttgacagcacagtgtccgacagacaaggtcaatgatccggtgctttatccgggatggcgcggacaaaaggataattgggaagaaatgggattgaattatggaagttcgactcc

SEQ ID NO: 14529 - DNA, 13329 bp, Unknown
  gut microbiota DNA sequence
acacagacagaaaaaaatttgctgacttcatttgcaggtgagtcacaggctagaatgcgttatacttactttgcaagtacagcaaagaaagaaggttatgaacagattgctgctatttttactgaaacagctgatcaggaaaaggaacatgcgaaacgtatgtttaaatggttggaaggtggtatggtagaaatcactgccagctatcctgcaggtatcattggtaccactatggagaatttaaaagctgcggctgccggtgaaaatgaagaatggactactgattaccctcactttgctgatgtggccgatcaggaaggttttcctgctatcgctactatgtatcgcagaatcgctgaagctgaaaaggggcatgaggaaagatatctggctttattgaagaatgtggaagaaggcacagtattcaagaaagcggaagaaactgtatggcagtgccgtaactgcggttacatttatgtaggtacggaagctcctgaagtatgtcctgcatgtctgcatccgcaagcttatttcgaagtgaagaagaataattattgattgaaataaaatcactcgttcatcatgaatccggtttctctgaaaaggggaaaccggattttttatttttagggaatgatttttgattagtttttattcttctcttttcccgtttacaaattcccccggtttcatgccgaactgtttctggaaacatttggagaaataagacggattattgaatcctaccatataacagatttcattaatgcggtatttgttttctgctagcaagatcgctgcttttttcaaacgtaccacttgaatcagttcattaggggtgatattggccaatgttttaattttggcaaacagacccgaacggctgatacacaacttttcggccaggaaatctacggataattccggattggagaaattctcttctatgatttcattcatgcgggtaaggaacttgtcgtccatagaattattggcaatgctgttcagcggaaccagcggcatcttcgagaatttctgacgcagcagattacgcaagtctaccagattcttgatacatgcttccaagtattgcatggagaaaggtttctctatgtaggcatctgcaccacaatccataccttctatcttggagttggtatctgtcttggccgttagcaggatgaagggtatatgactggtagtttggttagtccttatcgctttgcagaattccactccgtccatgcgtggcatcatccagtcgcttacaatgagtgtcacttcgttttctttgagtttatttaatgcttctataccgtcttctgcggtaagtatgctgtatttatcagccagactactcgaaaggaaattcaacatttcctcattatcatccacaatcagcatggttggtttatgtttgataggagaaccggagaggtcctcttgcaagattccttcgggaatggctgggttgttcaatagtgatgtgcccgtatcctgtggcaggacttgtgcttgttctacaggcagtgttacgataaaagatgaccctttgttcacttcggattccacttcaatgcagccattgtgtgattctacaatacttttgacaatgctgaggccgatacctgttcccggcttgttatccatagcctgatagaacggatggaatatcttcttttgttcttctttgctgatccctatgccgttatctgtcactcggattataaaagtatgttgttccggctgtacgatacaggtaagagtaacttcatcttttgtgtatttactggcattggttaacaggttgctgactagtttggttaccgcttcactgtctactatagctgtgaaatctgcttcaggatattccacagtaagccgtgctccatgttgggcgatgaaaggttcgaaacgttcacaaaccgctttgagcagttggtggatattttgggaagcaaacttcattttcattccttcctgttccaccttccggaaatccagcaattggtttaccaggaacagcagacgctggctgttacggtcaataatatttagatcgtcgcgtactgtagacggcagggacacgggggatttcattattttctccaaaggtcctatgataagggataccggtgtgcgtatttcgtgggctatcatggtgaagaacttgattttggcttcgtgtacttctttttccttgttggcgttcagtttgtttatttcagccgtatgtttcttctctgtccgtttgatgatgaagcggatgacgaatccgaaagctatgcaaaccaatataaaatagagcagtttggaagcggtggaccaatagaaaggagggtggatggtgattttcagactggttcctttttcattccatattccgtcattattggtcgcctttactttgaaaagataggttcctgcgggcaaattggtgtaagtggccttattctgggagcctacatagttccagtctttgtcaaatccttccagtttataggcgtatttgtttttattgggggtgcaatagcttaaagaggcataaagcaagctgaatgcattttctttataggatagctccagttcttccaactggttgagagattttggaagcagtttgtttccagtttggatttccttattatctatttccagttctgtaatgattactggaggaagcatcacatttgtcttaatctgatgggggtagaaagcattgaatccgtttaccgagccgatataaatttttccatccgatgcttttaaggcagcattaggtaggaattgttcactttgcagtccgtcgcttttagtaaatactcggcaaccttctccaggggtgtagcgcactagccctttggtggtggtgagccacaatatgcgttggtcttcgatgatgctgcatatattgtgactgggaatttcaagaggtaaagtttcgaatgcatcttcttccgcattgtatttgcagagcccgttcatggttcccacccacatctctccgtttgtgtcaatcagtacacagttcacttggttgtttgccagtgagttcggatttttatggtcatgtatatagttcttccatatctgtttttctggatggtatttaaataatcccttgccttgggtggagaaccagagatttcctttggtatcctggtcaatgtcaatggtcagtgcgtccaagtatttaattcgggtgaaattatctttttcccggttatatagatttactccggacatggaggtgacccatattctctcttttctgtctttgaatatggcataagaactggttccgtccagtgaggcgggattatcctgataggcagaatatgttttaaaagttcccgtttgcagatttaatacgtttacccctccagtataagtaccgatccataaattatcaccgtccatacaaagtgcatgtacattgtgataggacagactgttttttccctccaagggcaaataatgggaaaattttctatttttgggagaaaagcggtttaaccctccgtcatccgaagcgatccatacatctccgttagagtcttcgcagaaccgtccgatgactgttccgttaacagaattggagaaacgtgagtggacaaaactttcgaattgtccagtattgggtgatatataatttactcctccatagtaagttccgatccatattccaccttcatgatcttttataataggataaacaaaacggttggacaatgaatgtgggtttgtttcatcttctgtaaacaattgatattcctctgtaatggtattgaataacagaagcccgtcatccgagcctatgagtagctggtgaggggcatattccatgatagaatgaatatgggtggcaccttttccgtctgtcggatgcagataagtagtggcctttccgctgtatttatcgattttttgcaaaccacactcccaggttcctaaccacagtgtatgttccgagtcttccaacatgaccaatgcgtttgagtcatgctttccgctttcataggagagcggaaaagtctcgaatttattttctgctttattcagtttgaaaagacctgagtttccccaattggtaatggcccatatttggttttcactatccaccagcacacttgccattaaaccatttgcgtttttaaattcgtattgctccaagtggttggtgatggtgttgtatttgaatattccttgtcctaccgtagtgaaccataggtttttgtctttatcttcgacaatatggttcgtatttgtttcaatatggatatttttggaggtggccagtacaaaaggcattatatcttctgtttcgtaatcatagatatatatgccttcgtctgtgcctatccatatcttgttgagggtgctgtataaagatgaaatagcttcattagctcccctatctttcagtctatagagttttacagtagtaccgtcatagcggttcagtccttcatccgttcctatccatagaaaaccgtatttatcttgcattaaagcacgtaccgaattggatgatagtccgtcttctacagaaaaatgacggaaacagaggtcattggacgcagcaaacagaatcatcggcatcagtaagttcaatagcaataggactagtcttttcatagtattttcttcttatttctaaatcttatgcaagattactacttttctgagaaagaaaagagaaaattcgaagaaaaagtgaggattccagatgaatctttcaatagacctttccagacattctctaaaagctagcttatcataatcctgctgcagattttaagcggttgatagctgtttctatcatatcatgtgtgccactgccgtctgttacatattttatgaccatttcagtgaatgcaacagcatcttttaatgtcggatttgtagaatcacctattgtgcccacgcgccttaatagagcagataaaggccttaagttttccatttcgggtaagttacccggtctcattgtattgatgacggtattcaaactagctactatggcattgacttctccttgggagtagtttttatccttattaaaatatacattttgggcatgttccaatgcacgtttcaaacgggtaaacccgaaatgagcccaaggagcaaattcaggaaccttgactgcgagagcattccatttttcttggtttgtttggcgttccatagctatattaagtaactcctttaattctgttttatctacattatttgccagtaccaaagaagcggtggcatcttgtagtgataaagtttgtttgtcaataacggtttgtaaatcaatgttatccattacttcatgggcggtttcaagagtagcttgcaatgttttaaaactatcagtagtataaaggtccggattacattttttagctatatggatactggcttcaagattgctcttatctaatcgggaggcgactaatgattctatggccttgtcaatattgtctacacaagtagaaatggtagtttctgtcagaggagatattttcattagtttctctccctcttgtatagcggttgttagtttggcgaaacttgcttttgtgtaatggcttttactaaatgctgtagtttcttgtaattttgccgacagagccattttcagttctacagtaggatctttaatatgattgatgcggaagtaatgagttgtatggtcatggcgataataatctggttggaaagttcgtccaccttgcattagtgtatataaatttcctgtagtaccggtttgcagaccgttaggttcaacaacggcaatactggcaagacgtgagtctatattgagtgttgcttccgtccaattagtgatatcggtagctgtcatggcaaacggtccatacattaatgtacctacccaggctgtttcaagttggtgtccatctttacttgctattttggccggtagcttgtcgggaccatagtctatatgtttggtgaatggcattgtaatttctactatatcattttctttccattgccgggcaggtattaccgcgtatgaacaaggttgataatgagtggcaatagagattccatttagttttacatcaaagccgtcggtggcccaataaggtactcgcagtttcatggcaaatcgggcttctccggcagtaactttaattgtggagctttttgctggccacaaacattcctgttgtaaagtgatatttttctcttcccaatggagtgtggtaggcatataaagggctacccacaatgtattgtctgaaacaaagtaggttgcttcctgatattttacatgattctcagatcccgtacctccgcagcaggtagattgcggagtttcgttgccccatggtttcgatgcatttagtcctacggcatattgataagtagtctgatagtgttcagggtgtaatgagccgattatttggttgtaaagtgtccgttcgtaataatccatgtaacgggcatcgtctggattaaaacagttgaggtcttttgttaattttagcaagttatatgtacaacaagtttcattgatatgtggatttgagtgactctctccttcagatacgccattcatggccatacttactatttgggtatagggctgtctgaacatttcgccattacccacaccgccggtagaataacgataacgtccttgtattaaattccagaaattatgggatacatgataataaaatgtatcattgttacttaaataacttctcagtgcaccgatgatcatggggatatgctgattggcgtgtctgttacgtatatcatcaatattctttgaaagcggttcgtaaaaggccggactatcaaaacaattggatgcttctatcagacgcgccttctcttcaggggcgctgaccatttctgaaagacgtgctaaagattctcccatacctcccacttcacctgcaatgtacatgttccacatttcataacgattgccgggacgtgtcctgcgttcttcttgtgttccgtctttttttacataagtgcggtagtgcattctattccatacccacagacccatatctttggctatgagcaatgctttgtcggcaatgcttttatcatccatataagttgcgatatctatcagacccgctaactgtttgtgaatggagtaatagggggcccatacccagtccgaattgttatatgcacgatacatttctatcagtgcgggatggtgtggggggatcgcattcagataaccatagccataagtagcccattttgttttatgttcatcaaaagcttcccatgtacccttcatctttttcaattcttcttcaggggcaaaatcacgggcttcgagataccttcctaattcttcgctccatacgaatgtacgctcctgacattcacgcagttcattcaccatccgggtgatgttacggcgtagaatttctttatgcgaaggatttgttgcagcagcataggcaagggccagtgcggacatatagtgtccggaaccatgtccttttagtttggtttcaggtgagtcccatccgtcggatcgggtatatccttcggtactcaggccataagtgtcgcgataattatatagctgttggcttacatcccaactgataatctctttaatggcaagatcacgattggaggtcaggcggttgttgccgtcaatctttacattgtttaaggggatagtatgggctattagcttgggaaaaattgtatttttagtgtctaccacctctattttagcagtgataggatatccgttttctgtagtatcgtctcctataatgaatccgtttattgtgtattggcttccgatgggataaactttatcgtcagcttccgattgttctgtggataaagcggaattggaccatttagtttgacggtattcaccttgtccgtctgaataagtcacccatacttgataaggtaattggggaacagttcccacaggacaatagaccacgatgggttgtacagaagttatgcttcgtacttcgataacatttgtctgcaaggtggatgttgctgttttattaggacttagtgtatacgcctcaacgggtattgttgtcaatagggataatcctgtaaagagagtaaaagataaatatctgttcatttccatgagcatattttaaataatgattttataagagatgggaatataaagcccggttctaataacttaaaccgggctggaaaaataaatatttgcttaaataattaataactatcgagaagaaagaaggttaccttctatcacattatttcttatttaccggcatagcctggattttgctgtaaattagggtttgtattaagatgatctaaatgaatcgggaacagggtagagttgccattcaagtcattggcagtcggagtatggttaaaccaacttttcttctgataggttccaaagcgaatcatatccgtacgtcgacgggcctcggctgcaaattcccatccccattcatcataaagtccgcctaattctacgacttctgtattacccgcatcatcaatctgacctttttcgtcaagcgtaccatagttaatgtgtgtatcgcctttcaaccaagctgcatcaaccgttgctttttccggatgagccgattcacggaatgcacgctcacggatctgtgatacgatatgggctgcttcggtttcgttttgtcctaagcggagcagacattctgctttcatcagcaatacttcagtataacggaaataagggaagtcgttgcttagaaggcttttagctcctaccttgatttcgtattttcctacccgataaccgtcatctgtgtctgttttgtaaatactgggtagcttattggggaaagtggtgatcagtactccgtccgggctgtactggtcaccttgcagccatgtatattttaaccgcatatcatcaggatcatagctgttaatgaactgagggtttgctgctgaacctccccatggggtggtttgcatattgaagaccttacgactgtttgaagatagaaatttcatgtgggctccaaaaacaggaccattgttgtccccttcattataaacttcatcataaggaatggcaaagatcgtttccacacatccggagttttctgttttgaagatatctgtgtagtttgtttctaaactaaacaaaccgctgttaatgatatcgttacattgttccatacattcgttccacattggagttcctgtatagaccccagcatttagatacatacgtgccatcaagcatttggccccccattgagtgagtctgccataagtggatttattgacttcagtaggcaaattgggcattacttctttcagttcattgataatgaagtcaaaaacttgtttacgagtagattgaaccggaacctcttcactgaaactggtttgtataggaatatttccatgtgtatcgcaaagaatggagtaccaaagtgcacgtactccttttacctcagctacgactttaggtttactttcttctgtaaaaaaaccttcatcggcacgttttaatattttattggcattggcgatgcctttatagcaataatcccaaatactttggggctgtccttgctggttgtcccaagtgtgtttgtgcatttgcttgtaagtacctccgtcatcccagccgttagggcgggtaggtgtgacaattacatcgcccgattcttcctgtaggtcaaacaagccataccagtccatcacaaagcgtaattgtgaataggtggtagccaacaaggctatctcatcggcttcggttggtacatagtcttcttcaatgatttcagaataaggctcctcatccaaattaaagcaactgcttatactgagcatggcagatgcacagagtgcataaacaccatatttaaatagtttcataactgttcttttttgtttaattagacttagaatgtaagattaactccaaaagtataagtgcgattggtaggatacttgtcgcgattgtcagtaccggcatccaataatccataggtgttgctgctcaatggtacttccggatccatacccttgtaaccggtaatggtagctagattcaatactgaagcatagatacgtaggtttttgatgatattctgtttggatagtttgaaggtataccccaaagtcacattgtcaattttccagtaatcaccgtcctctacgtaatagctgacatagcgttggtcatctttcaattgggttttgccatatactttgtcaaaagcagaattcaggcggttgtactggatttcaggttttgcattttcataatacatacgttggtaattcaaaatctggaagccgaaagcaccacgcatatttatacttaaatcgaaattaaagaaattgaaggtattgttccagttcagataatgtttaggaataccattacctaatacttgccagtcagtggcatcggtttcctcggctaaaacatgttcaccttttttgttttctaccaaccatagtccgtcatctgtaatatcaaccgatttcaaaccatagaaagtacctataggcttgcctacttggacgatatgggtagtggtttgaatgggttctccggtataccctgtatagaaataatcttggtccatcgagaatttctcgctggatagtgcaacgaccttgtttgaattagtagaataggatacattggtattccaagtgaatttttctgtctggataggcgtagcacgaattagaatttcaagtcctttattttccatttccgatgcattggctagcatggttggatacatataaggcggaacaggaacctcgtagtcccaaagagcatcttttgttctacgtatatagtagtcaacggttccacccaatcgtcctcctaggacatcccaatccagacctacattgaattcgtgtttcttttcccaacgcaggtcagcgttgttgttacggattgtttccaatgctttgacccatgttccattgtacaggaaagcgccattataattcaaacttgagagtgatgtgtacgggtcggctacattgattccggtcacaccgtatcccacgcgaagtttcaggttatccatccaattcacatttttcataaaattctctctgttaattctccatcctaaagagatgccggggaaattaccccacttatgatctttaccgaacttggaagagccttcatgacgcaaagaagccatcaataagtagcggtcattgaaattgtaactgacacgggtgaataatccgattaatttatcagaatttttataactggtcatggaagcttcaccacgtttcaaggccatacctgcttccattttgttgtaagaataagcatcggtaggaaaatcgtagttggacatggacaggttagagttggtgttgtcttcatagttataacctatcaatacactgacattgtgcttgccgaatgctttctgaaagttggccgtcaattctatcagattattatcaaaatcagaatcataacgatatgcatagccgttacggccactcttggttgtagatacatgtttcttggtttggtaatatccatcggtagaagtcgtactccggcgggcatacatggctttcaaggtcaaagattcaatagggcggaaagtcaggctaccattgaaacggatgtttttacgtttcatttcaccaattgtttcgcggatataacttacaggattatcataaaaatacaagtcgcgctcaaaccagtcaccgttctcatcttttacaggttctgtaggattgtgaatcaaagcctgtcgataagcgtatgtattccaactgcgaggcatggtatgttggctgacgaatgtactgacattggctgtcaatttattgtcatacatagagtgagtgatgtccatacgaccgtttatagcttcaaagtcagtctttataaaagtaccttgccggttggtatagttgatggaggctgtataattggtatttttactaccacctcttaaggataagttgtgtgaatgagaaacagctgtgcgggtcagttcacccagccaatcggtattggctccgaaatctttcaagttagctccgttgaaagtatatccttcattccatttctgacgaaggtcatcagcatccatgaaatcaggtctgtttaaaatgtttgatacagaaacatatccattataatcaatggtgggagccatttctttacgactttgtttggttgtaataataattacgccatttgtaccacgtgtaccataaatggcagtagccgaaccgtcttttaatacatcgatggactcaacatcttcaggggctactgtattcagacttcctggcactccgtcaactaatactaatggtgaagttccaccttttaaagatgaaataccacgtagcataatttgtgtgttgccggtaggatctcctgaaggtaaagaaatattcagccctgctaccttaccttgtatcagctggcctgcatcggttaccgcccccttcacaaaactttctgattttacacttgaaatagcactggtcacatcaccctttcgctgcgtaccataaccgatcacaaccacttcatccatcagttcggaatcgtcttgcatggtaatatctttcttaccaccatttccgactggaatttcctgagtctgataaccgatataagaaacaaccaatatggatttggcattttttaccttcagcgtatatttaccgtcaaaatcggtaatggtaccgttggtcgttcctttttccatgatattggcaccaatgataggctcccctttcctgtctttcaccacaccgcttacggttacagtttgctgttgtaccatttcggttctcatagattctgttgtttccggtgttgcccatacactactgactcctgcacccgcagtaaggaaaagacaggtggtagccttcagcaaagccctgctgaacaaggcccggttctcatgtgttttcatcatacagttttatttaaaaggtttatatgttcattcagttcactttccattcaatcacccctcccgaagctcctttctgcaattgtgctgcaattttaagcccctttgttttgacaggtttgaaatccaaactattatagcaatctttttttacagtatattcagtcaacgcctctacctctttccaactttcgccttctttataatatagtttccagctttccggcacacggaaatccccgtcataatggtcaaaatccaaccaatacacttgtacgttcgatacggtataaggctggtcgaattcataagccagtgtttcgacagtaccgttcttcagccaccaatagtggtaaggtttcga

SEQ ID NO: 14530 - DNA, 535 bp, Unknown
  gut microbiota DNA sequence
tccgtcataatggtcaaaatccaaccaatacacttgtacattcgatacggtataaggctggtcgaattcataagccagtgtttcgacagtaccgttcttcagccaccaatagtggtaaggtttcgagatatccgatgagcgtttaggttcccattggtcatttaccccccatgcccatgtttccaccgaagccgattcgggagcatctttctgtataggagcctgtatcatcagagtacgtgctttgctggcaatagtagcttccggagtggggcgggcatactcggccgcttcgggaatccatacagccatctggtcggcaccgcggttgttccatgtagaataaggaattgctttgaagggaacatcttttaccttaccattcctgtcaatttctttagctgtaccgctcagcaccattacgccattcaacaaaccggcatcgtaagaagcctccatcggagtaccgtcggggatgaatttgttgaatacagtactgtcggcttggtcttgtccttccagacagaacataata

SEQ ID NO: 14531 - DNA, 442 bp, Unknown
  gut microbiota DNA sequence
tcggcactgctcttgatgtcgcgtttgagcgtctgccatgccttttcctgtttctcttcctccggtcgtgcggcttcctttttccgtctgacggtttcaagaacttttttccgccaattgcggaattcttcgtaacggttctgatagcttctgttcgttttttcctgcctgtagtaatcaaatccgctccgtcccgtcaccatcgggttggcacagcgggagaggaccgagagctgggcggacaacttctgccggtaggcggcgatgtatgtatcccgttcctcttccggcatgagttgcaggtcgttgtgcagcccctctccgtaaatcatgatgtccgtctcgccgcgaatctccggattgaaggaactccaggcgtatgcgtcgcaagcctgtttccacatatcatccaaataggcaggatgtttgaatgctacggctt

SEQ ID NO: 14532 - DNA, 770 bp, Unknown
  gut microbiota DNA sequence
gatttatggtcacaaacgtggacttctgaaacagatttacgatatcaatatatactaaataaccagtattcatcttcttatgacctttcaacggaacaaatggcaaataaaaatctaaaatgggaaacaactattacacgtaattttggtttcgatttcggatttttaaagaaccgtttgtggggatctttggatttatattggaatacaacaaaggatttgctgatgttgacttcgcttccggggattaccggattcacatctacgtatgataacattggtcagactagtaataagggaattgagttttctttgtcaggtgtgatttttgaaaataaagattggaatattacggctggtatgaatataaatttcaataagggtaaggtcgataagttggcagaaaatgtaacaggtttatatggctctagttggtgtggcagtagcagtttcccgggtgaggattatattttacaggaaggcaaacctgtgggtatggtcagaggttttatatatgatggcttttatactacagatgactttaattatgtaaacggacaatatatattgaaagagggcgtggcagatttaggttcttttattaatcctgtacatggggtggaccgtccgtccggacaaaatgcctatccgggtcttccgaaatttagggatatggataatagtggcagcattgatgagaaagatgttaccattattggtgatatgaatcctgttcatacaggtggtttcaatatcaatacaacttataa

SEQ ID NO: 14533 - DNA, 354 bp, Unknown
  gut microbiota DNA sequence
agaccgtccgtccggacaaaatgcctatccgggtcttccgaaatttagggatatggataatagcggcagcattgatgagaaagatgttaccattattggtgatatgaatcctgttcatacaggtggtttcaatatcaatacaacttataaaaattttgatttaggattgtattttaattggagttatggtaatgatgtgtataatgtgaataaaatcgcttccttgtacggcgcaaaagaaaagggagtatatgagaataaacttggttttatgaaagactcctataagatttatgacgtggtagatgggaaattagttcgtctcactactcctgagcaattaaatgcagctaa

SEQ ID NO: 14534 - DNA, 1329 bp, Unknown
  gut microbiota DNA sequence
tgcaaaagaaaaaggagtatatgagaataaacttggctttatgaaagactcctataagatttatgacgtggtagatgggaaattagttcgtctcactactcctgagcaattaaatgcagctaatgtaaatgctaatttaccattaccttatagtgaaaatggggttacttccagtattgctattgaagatggttcttatttgcgtctgaacacgttgacattggggtattcattgcccgataaggttttgcataaggctggtttgagtaaattgcgtatttatggaacaatctataatttgtttaccttaaccggttactcaggtctggatcctgaagttagtgctaatacctctcagaataaggcgaaataccctacagtaggattggactggggtacttatcctagagcacgttcgtttgtggttggtttaaatcttgctttctaatcaaaaaaacaaatcattaaattaattattatgaataaattagcaacatatatatctgcattggcactatgctgttcctttgctcaatgtagtgattatctgaatacttcttcaccggagaacactggagatgagtttgtaacctcttctacttccgaaacttttaaaatcctgtcttggtgttatgctaattatcggcagaattgtattatgggagcttatcgttggaatgatcccattggctcagactctgaaatatatccggaaataggctctttaaataatgccaacgctagactattaccggaattgttaagtgtaaatgctggtggttcaggcttcaacgggctttatactacgattgcacgtgcatctaaggtagcggaattggtagctgataaacctgcatttcaagatgctgtggcagcaggaaaagtaaatgattggactcaactttatggtgaggctttaacaatgaaggctttctgctatttcgatttggtaaaacattatggtgatgtaccttatggatatgaaaataacaatgtggaagattattcattgacttcccgttttgaaatttatgataatcttattgagatattgaaggaggcagaagcattgatgtatccactgggagaaggtggcattactgctgaacgtttttccaaggggtttgctgacgcgttgttaggacagatagctctttattccggtggatatcagacaattcgtacagatgtgcccggtttgtatggtgacgtacagtttacgacaaaaggaaaagaagaactaggatgtgtctatgctcggcgcaatgattatctagattattataagattgccgagaagtattttcaggctgctttgaataataaagg

SEQ ID NO: 14535 - DNA, 30416 bp, Unknown
  gut microbiota DNA sequence
ggatgtgtctatgctcggcgcaatgattatctagattattataagattgccgagaagtattttcaggctgctttgaataataaagggacggctgctttagttacggttgatgaccggagttatgcgaataacccgtttcagcgtcattttcaatatactcatgatctggctctgagcccagaatctatttttgaagtaggtaatatacaagggggacaaagtgggcagactactaccagtgaatattcttatgcttttggacgtccgtccagtggtggtagtaatcaggctgcgccttgcaagtcgtttggggcgttacgtattattccctctttctattatggtgagtttgaagcaggtgatatgcgtagagatgctagtgtgactgttactggtagtaaaggtgatggcaatgaagctctgttgtcttttactccgggtagcaagttggatgggggaattgctattaataaatgggatgagaatcgtatgaatcctccttatactacatctcaacgtacttcgggaatgaattggccggtgttgaggcttgctgatcttattttgatgcaagcggaggtcaaagcagaattgggagcggaaggagaagcaatccaattacttaaccaaatccgtcaacgtgcatttgggaattctgaacatgctatttcagcttcaggtgaggctttgaaggaagctattttgcaagaacgcaaattagaacttctaggtgaagggactcgtcgctgggatttgattcgttctggtaagtttgtggaaaaagctttagctgttcgtgcagaaatgacggagatggttaatgatttgcaaacaaaaggatatcatgaatttgctaatggtaatgtgatttcgaattatgtatatactaagaaagtgtatttaagttcaccgctgacttttgatccagatgagtcgaatccggctctgtatccgggatggagaggtcaatatgattatagcactactccggtaaaagttactgggacagaccataatctggctattgaggggctgtttaattatatagatcccgatggtgctgaagcaaagagattgcttgacgagggttatacacaggatgattggggagtgacattggtgaaatatgctgatcattatacaaatagcaatttgttgccgggagtaaaagaaggtaatgttcctcccagatattattggcctattccatttgaaacgctgagcaagtctaaaggcaaaataacgaacggatatggcttggcacaagaataaagagtatatatgaaaaacattttatctatttgtacatttttattggcctttgggacgcttcctttatgggggcagtcccaagaccctttgaatgaggatcagactacagtacgcattcttgagggggataattcagacccttctattgtccgttatggaaaatcttattatctggttcattcttcctttgtttataccccgggactggtagtttacaaatcggatgatttagtaaactggactccgtgttccacagctttgactacttttacaggagatatctgggctccggatattgtggttcataacaatcgtttttatatctatttcccgaccttgaatggaaaagggagaaagaccaatatggtaacttgggctgatagtccggaaggtccgtggagcactccgatagatttgaaaataggaggtattgatccggagcatgtggttagtgaggatggaaaacgttatctgttgctcagttctggcgctttatatccgttgtcggatgacggatactctattacaggagaaccggtcagaatttataaggaatgggaaataccggaggaatgggatatagaaggagtttccatggaaggtctgaatgtgaaaaaagtaggagagtactattatttatttgcggccgaaggggggacggcaggtcctcccaccagtcacatggtagtacaggcacgtagtaaaaatataatgggcccttgggagaatgctcctttcaatccgcttcttcgtacggaatcccgtaatgaaaaatggtggagtaaagggcatggctctattgttgatacggaagatggacggttatttatgattttccatgcttatgaaaacggattccagacattggggcgtcagacccttttacgtgaactggtccaaaaagaagatggatggttacatttgaaagaaggagccatttctttacctgcaccggaacgtttgaaattatctggtataaaagattttgtatggcagacgtgccgggaacataacttaaatgatcggttccggattactcctgataaaatcagtatagaggcaaaggggaatactccaaaagaaggatctcccttgttagcacgcaccagtgctcataaatatgaagtggaggcttgttttgaactgaaaggtgaaaatacatctgccggattggtggcttattatgatgagaattatcattttggatttggttttaatcataagcagatgcttcgttatcggcgtggacaagtaagccgtacggaatcaaaattacctcaagcaaaccaatgtggaaagatgtggttacgtttgcggaatgatgctaatgtattgtcggcctggtacagtgccgatggtaaaaaatggcataagtatccatggggatttgagatatcgggagtacatcataatacggtatatggtttcttgtttgttcgcccaggtatttttgccggtggtgacgggcaggtggaagtaacagattttgttttgagaaatcttgattgatgcgttgtttaactggaatttaatgattgaattgcttatgaaatattgctgctcttttttattgttattgctttttgggatttccggtggatttgcccaagataaggtggagtgttggggacgttatgaaatctccctgcctgccaaagtaaaggggaacccttttgatattgagcttacggcaacgtttagcggaccggatactacattgactgtacgtggattctatgacggaaatgataccttcaaaattcgttttatgcctgtgagccagggagtatggtcgtacgtgacgcagagtgagattccggtgctgaatgaggtgaaagggcggatagaatgtattgctccgggtaaaggaaatcatggcccagttaaagtggatggaacttataattttaaatatgctgacggaacgcgttattatccagttggaactacttcttatgattggatgcatgtggcaggtaaccagcctgatcagacagtgaaatcattggagctatccaagttcaataaaatcaggatgctgttttttgtgcaaaactttgatccggattatcctgaaccctccatgtttccttttgagataaagaagataacaaaggatgaaaagggaaaacctgtgtatgaatgggatttcacccgcttcaatcctgcttattttgctcatgtggaagcatgtgtggataaattggccggaataggagtagaggctgatttgattcttttccacccttatgatggtggccgttggggatttgacagaatgcctttggaagccggtgtccgatacttgaagtatctgacagcccgtatgagttcatttcgcaatatttggtggtcattggccaatgaatatgattttttgagagaattaaaaccggaatattgggatacttttacacatacggtagtagagaatgatccttattcccatttatgctccattcatacttatacagctaagtattataaatattgggaacctgaatacactcatgccagtatacaggaccaggcacctgtggagggatttggaagagcggctacggtgaagaacatttataagaaaccgattatttttgatgaggtatgttatgagggtaatatggataaccgatggggaagcttgagcggtcaggaatacctttatcgcttgtggcaaggattgattgtggggacttacgtgactcatggagaatgttatatggatgatcctaaagattattctcgtgactttttggctgtgggaggaacttttcaaggggaatcctggaagcgcattggctttacaagacagattttggatgcactccctaatcctctacatttatgtgatagcagttgggacccttatacttcgactgccggagaaaattattatatgatttatctgggcaaggaaataaaaccggaatgggcatttgatttaccggtaaaaaacgctttttatccacgtttgaaagaaggagtacgttttaaagtggaagtcattgatacttggaacatgacgatagccgaatggcctgtcgtttttgaaacgactgctcctgtaaaggatagggtgtatgataaaaatcaaggaagagtaagactgcctgcaagtccttatctgctgctaaggataactgaagtagaataatttatgaatgtgttagtttgttaatatgctaattgccgtttggttccgctatgtttacatgtcaattggcctattagcaaattggcaaattagcacattattcaaaatttgcacataatagaccaatttttacctttctgtcctctgtttctcgtttaattttgtattagaacaaatcttaatctatacaaaatgaaacatttacattttcttgcttttgtcttgtgctggcttgtatggggacatctgttaaaagcacaaagtcttgataattatagttcgttagatccttcgcaacctatagaatttaaagggaactgccttcgttatgcagataaagaaattattttaggtccgaaaacattttttgttgatgggcagttgtccgatagggaagtggcgggtaatccttatgtttttaatagtttcaataaagctgccgctaatttctcagctggtacggaagcggaaccgatgaaagtttatttggctccttatgtctattggattgatgatccagatgaccctgctattcgtgttggtaaagacggccgtgaaccgttcggcttggttgttaaatgcccttatctccatattatcggattgaatactcatcctgaaaatacagtcctggcatccagacgtggacagacacagggggctgtcggtaatttcaccatgtttgatttttggggagacggtctgttagtaaaggacttgactatggggaatttctgtaatgtcgatttggaataccctctgaagaaggaattaagcaggaagaaaagaatgtctgccatcactcaggcacatgtcgcttattgtcatggcgacaagattgtggcggataatgtacatttcatcagccgcttgaacatgaatccgttgaatggcgccaagcggatactttttaataaatgccacatggaaagtacggatgacgcattgaccggaacaggggtttatctggattgtacacttcatttttatggtcagaaacctttttggagaagtgatatgggcggagctgtatttttgaactgtgacttttatgtatgtcatgaggaagatcggcaatatttttgtaagtcggtcggaccattaagtattgtcgattgccgttatcattcgaagaagccggtttatgcgggctggacacatgatcccacagattggttgcgttgttaccaatacaatgtgaaacagaacgggcaaccttatgtaattggggctgacaagccttataatacggtttgcatggatcagctgaatcaactgaaagctttccggctggaagagaatgaagaggtagtttataatacttacaatttattgagaggagaggatgactgggatcctcttcgggtgaaagaccgtgttattgctataggtaagcgagatggaagggattatactcggatgccctcttgtctttctgtagagcccttaacggcttccatccaaacaggtggccggacggtcagattgactgcaacagtaaaaaggcattgtaactatgtactgaataatgttcccgtgaagtggaaagtacaacaaggttacgaaaaggaggtgaaattatccacttccgagggttatgaatgtgttgtcgaggcaactaatgtggaggatgaaacaaagcatttcactgtgatagcctatacagaagatggtttggaatgtgcgacagagcttacggttgctcccgattatgtgccggctccttcgtttacgaaaactccaaagatgaatatcactaaaggagtagctactgtcagttatgctttagaattgaatgggcgtaaagatgaatcattgataacttggtatagatgtacagacaaaaatggagccaatagacttccggtttctgtatctcgcttgaatgaaccggaatactcctatacgttggtaaaagaagatgtcggttattatctgatggcagcggttgctcccaaacacttgcgttgtgtgccggggaaagaacagattgttgtttccaactctccgataaagaaaggacaagtgaatattgctcatatatttgaaacggattttcagaactttccatgtaagaatcaaccacaacttttaccgggattttggacgattggtggatataagcctttggatacggcagcatacgattggcaggtagttccggataaggattattggatttatgggccgggaatgaatggttctcacggaaccggtttgttgcaagatcagaaaggagcccgtttgctgtatactccattggatggcagctatggagatatggcaataaccttgaatgtggatgccagtaaaacagcaggacaaggttttggtagtgcaacaggacagtatttggatttgtatatcaagtttgatacccgtactttaacgggatatgcattgcgtatcattcgtacgaccaagtatagtaatgcggttgattttattttgatgaaatatgagaacggggtggctgaggccatcagtcaaccggtgtcttctacctgctatcgtacaaattgtactctgacattgactgctaaaggaggaaaattgacggcacacgcttcaacaacaactccgcttccggcgcctgtaacagatccgaacttgaaactttcggtagatttggaggcggatatagcctcgaacacttttgggggcaccggtatccagcatacgggcagttgtggtgaaagtacaacgatgctgcactatatgaaggtggaatgggaatagagtgattaaaacttgaatttaatactgatgaatctatggttacattaaaatcgtttttaggtatgattgccgcagttccttttataatggcgtgtaatcagacagggcaggtcaatgcaacactttttcctgcttccggttcggaaaatgtcaatccggacactcatttggttcttactttttccgagactcctgtccttggagattccggtatgatacgggtttatgacgcagttactgaccaagtggtggacagtttggatttgagtatcccacctggtcctacggagagccgtacgtatggtccggaatgtgattatacaaaagtgccttatgactatactcgtaccgttatgcctaccaataaagatactcgtccgggtactccttcgggaacggcggaacctactcctcctgtgtaccagcttactattatagggggatttacggatgcctttcatttttatcccgtcatcgtgcgtgattctatagctactatttatctacacaataatatgctggaatatgggcatacttactatgtgactatagataatggtgtgttaaatttagctgatggcagttttcaaggagtcactaaagaagatgagtgggttttcactactaaatctgacatgccggaactttcagatacattgattgtggatgttgcaggaaaaggagactttaatacagttcagggagccttggattttattcctgattttaatgaacaacagactgtgattttagttaatcccggtgattatgaagaattggtctatacaagaaataaatggcatgttaaaattaaaggagcaggaatggccgatactaaagtacattatgcaaataatgaagtctttaatcctcatccgctgactgtgaaaaccaatgagtggcccggtacatttccttcccgtcgggcagctttcatgcttgataattgcaaggatatagtcattgaggatatgaccattgctacagatttaaaaggtcaggcagaagggttgttgattaatggagaaaggattgctttataccgtgtacatattataggttcaggagatgcattgcaggcgaatggaacaatctatatggaatcttgtgagttggatggtggtggtgatactattttaggacgtggcagcttgtttgcttataaaagtaatttccgtaatggtggcggccctttctcatgggtaagaaatacggcgggcaatcatggtaatgtgtttgttgaatgcactttttctacggaggatggtaaacaggcggattacggacgtactaaaagtaaccacggttcggcctatcctgatgcagagtttgtcttgatagattgtaaagtgaaaaatataattcctgaaggctggagttctattggagcgaagactgctaaaatgtacgagtataatacttgtgatatggtgacaggaaatccggttgatgtatccaaacgtcatccatattcccgccagctgacaaaagataaagatacagagctgattaacaattatcggaaccctgcttttgttttgaaaggctgggtgccggatagttgtataaatgggacgaagtaataattagtggagataagtttgcgcatcgaatattgaggtatctaattaaataccggaaacagatatggatgatctattaaagttggaaacagaaacttttaataaattatatactgattacaggttacggtttattcgttttgcgcaaacttatattcccgatatttctatagctgaagatattgtgatggacactttagcttattattgggaacatcgaagagatataaagaacgatgagaatatattaagttatcttttaacggctataaagcataaatgcttgaactatttaagacaggaacgctttcattatgaaaagaataattctttgtctgaacttgctttatgggaattggattttaagatatcagcattatcggcatgtgatccttgtgaattgtatactaatgaggtgcaagagattgtaaatcatacgcttgaaaaattgccatcaaaaactcgacagattttttttatgaacagatatgaagatatatcctaccctgaaatagccaaaaagttatttgtgaatcaaaaaaccgttgaatatcatataagtaaggcattaaaagctctacgtgctgtcctcaaagactatctttcttttttgatttatctaatttagcaaatttttttgtttttcgtttagggtatttccattctcatgtgcttatagagtaaataatggaaagaaaatgaatttattatcgttgtatcatttttttgcaggcaaagcatctgacaagcagaaagaagctattaaacgatgggctgaaagttcaccggataattatgagacattatgtcgtgaaaagaaaatatttgatgcaggtattttgttggtagataaaaaggaactgtctcaaaaagaaaatgccccgttgttatataagctaattaattataccgtaaagatagctgcggttgttcttttggttgttgtgtctgttactatttataagtatcaggaattggtgaaaaaatcagaggtattacaaaccatacttgttcctgccggtcaaagaataaacataattttacccgatagtacgtttgtgtgccttaattctaatacgaaatttagttatccttctgtttttgcaacaaataatcgtaaagtaaagttggatggagaagcttattttgaagtatcggccaataaaaataagccattttatgtacatacttcaaaaggagaaatcaaagtactcggtactcattttaatttggaagcttattctaacgctgatgtatttaagacttctttgtttgaaggcaaagttcgtgtcagagtaaaaggtaacaatatttatttgaaacctgatcaaatggtatgttatcataaaaatggaaaaattcatttggaaaccatccacgattatgaccagtaccgatggcgtgagggattaatttgtataaaaagcgcaaaatttaaggacatcatgaaaacttttactaaatattttggagatagcattgttgttcaaaataaagaggtggaacattataaatatacaggaaaatttagacaaagtagaggggttattaatgcgttaaggttattgcagaaagatgctccttttactatagagcaggatgaggacaaacaaattatttatatcaaatagaggttcaaatacataaaacacaactatattttttttaaaactaaaatctaataacatggaaacaacttatttaaacgtatgtgataggccaataagtcggtggtctattgtgagattactgaaaacagtcttgttgctattatgtgtgtcatttagttcagtgtacgtacaagcatcagatcggagcgaaggtatcactatttcatgtaagaatgaaagtttggaacaagtgatacacttgattgagagccagtcatcttatctttttgtgttaaatgataaggtgaatactaaacacaaagtaagtataaagatagagaatggaaatataaatgctattctgaataaaatctttcaaggtaccaatatgacgtatcaagttgatggagatcatattttaatttcaactactcataaaagtatcggtttggatgaaacacgacagactactatgataaaaggaaaaatagtagataatgcaggtgagcctatgattggagtaaatgtattggtaaaaggaacgactaatggtgccattactgattttgaaggtaattattctcttgctgatgtaaacgagaatgatgtattaatggtgacctatattggctatcttactcaggagataaaagtcgggaaacagtctgtcataaacattgtgatgaaagatgatactcaatctttggatgaagtggtagtggttggatatggtgttcaaaagaagagtgatttgactggttctatatcttctataaaaccagcggatattacatctactcctactaccaatgcgttgaaatctttgcaaggtaaagtagcgggattggatataacacaatctagcgggcagcccggagcctctatttcattaaccatgcgtggtaatcgttctcttaaagctgacaataatccgttagtattggtcgatggtatagattacggatcatttgttgatattaatcctactgatattgagtctattgaagtcttgaaagatatctcatctacagctatttatggaacgaaaggagctaatggtgtaattattattacaacaaaatccggagccaagggacaaaagacgaaaatcgattttaatgcttatgtttctattaaaaataaggctaaataccctcgtatgatgaatggagaagaatatgctcaattaaagagagaggcctatagaactactaattcagcagcgccggatcaatatatggatgatgctttgattttcaatgcagaagaattggagtatttggaaaaaggttattgggttgattggcaggatttattgttgggtaccggtattacccaaaattatgaaatcagtatgtctggtggtacggagaaaacatcttattcattatcatttggttttcaagatgataaaggattgttgaaaaatgatgtattgaaacgttataatggtcgtattagtcttgatcataagataaataaaattttcaatgtgggtgtgaatgtttcatatacttttaaagatcaggataagagacagaatccattgaatttggctaacaaaataccatgtataggcagagcttatgatgataatggtaattttatattaaaccctgctcctggaaatagttctgcattcagtcctttatgtgatgagcagccgggtgcttacgaggataatattcgtacgaaacgtatgtttgcttcggggtatttgaatgtgaatattctgaaagattttttctttaaatccactattggcattgatgttacagatagtcgggaaggtatttataaagataaaaatacagtagctaatcttggtgtaaaatctacctcttctgttcaggcggataacgattggcgttatacttgggagaatatactgaattactccaaaacatttgggaaacatggactaactgcaatgattggtagtagtaccactgcttatggatatgaaaaggttttggctagtggagctaaccaagcttctgctctgacttcattccacgatctgggagcaaatgctgattcaaaagaaaatgccagtcaattgattgagacgcaaatggtttctttctttggacgattgaattataagtttaatgaacgttatttattccaagcttctttgcgtgctgatggatcttccgttttggcgaaggggcacaagtgggggtatttcccgtcagcatccgctgcgtggcgtatttcagaagaaggctttatggctgatcaagatatttttagtaatttgaaattacgtttaagttggggagttgctggtaacagtgcaattgatgcttatgctactttaggaggacttaaaaaatcagtatatacatttggtagtagtgtttatggatattatcctagcgagattgcaaataaagatttgacttgggaaaaaacatcgacatggaatcttggactggatttctcaattttaagaaatcgcatatctggtacaattgatacttatatttcacaaacctcggatttgttacttccaagtttattgcctagttctactggatatgcatctgttatgcagaatataggtaaaacagaaaataaaggtattgaagtgacattgaatacaatttggtttcaaaataaaaattttagttggaatacggattggacatatagtttgaatcgtgaaaaaattaaagctttaaatagtggtgtaacgcgtgatgaaggtaatctttggtttgttggctctcctactcaagttttttatgattataaaaagattggtatctggcaattaggtgaggaagctcaggccaaggcttttggaggatttaagccaggggatattaaagtggcagatatgtcacctaaaggttctgaaggtgaaggcgttttctctacggatgaccgggttattttttcaagagttcctaagtatacgtttggtataactaataatatcacctataagaattttgatttaatgttctttatttatggtcgtatcggacaatatgtaaaagatgcctatactcagttatacaagccaagtgcgttggaaaatagcgcacctgtaaattattggacacctgagaatcctagcaatgagtatcctcgtcccaatagtggttattcaacgaacagctatttgttacagtcttcattggcattccgtaaagcttcttttgtgaaaatacgagatattacattgggatacacactgcctaaagaatggacatccaaaatgatggtgcagaagttgcgtatttattgttctttgaataacttcattaccttcacggatttcccgaattatgatccggaaagcaatggaagtatggactttccattggcgaagcaagtgttgtttggcatcaatcttagtttgtaatctttaattatgatcattatgaaaacaaaattttattattatataagcatattatttctttgtttatgtcatgtctcttgtgaagactttctagaagaaactaataaaagtggattgacaacggatccatttatgaaaacgaaagttggaatagagagtgcgttgaattcctgttattcgggtgcaaggacattttatggtcaggaagatggttttggtatgacagaatctggtactgatttgtttttgcgtgggggagataataaagcaaatcaattggctgattatactattgacttaaatggctcccaatcaactatcggaaatgtttggaaaaatctttatttgtcattaagtgcttgtaatcagactatttctttgttgccaagtgaagtattgaccgaagctgaaaataagtcatttgaaggccaggctaagttttggagagccttctatttgtggttgataacagaaacttggggagacgtggtattgaacacagaacctataacgggtgctgttactgaagcacaccgttcgtctgtagaagatttttataaagttatttttgatgatttagatgtggctgtcaatcaactggcaccaggcaaatcaacagatggtagaataactcaggatgtagctaaagcttttaaagcaagagcttgtttgaccagagcttgtgcaacgggcgaggcttcgctttatgctgaggccgctatgttggcaaaggatattatcaatagtcaacgctattctttctatactgattatagtgatatgtgggatattgccaattgtgatggaggtacaaacaaagaagcaattttttctataaattacaccaactcagaattagaaaataatgcttttgatgctactgctactaattcgggtaataaagggattgttgattttgtaatgaaatatgataaggaagccggaatggaacgcgatgtcttgaatgctcgtcctttccaaagatatatgccgtccaggtatttgctgcaattatataatgagaatatagatcagcgttataaagtgacgtttaaagatgcctggtacgcaaacaagaatccgttatctgagagtgatttaaaagtttatcctttaatggctacaggagatacggccatatatatcatgaaaacggctgctactgattcacaaaaagtatgggcgtcaaagcggtatcgtttgctggatgttaatgacgtgtacacttcggaaggtaaagctatcttaaggtcgcaatttgtagaaatgcataagtttgccgatcctacggcggtttataatcaggattggtgtcaacgggatgcatttgtcattcgtttgccggaaatgtattttattgcagccgaagcgatgctgcaaacgaataaacaggaagcagtggatttgatgaatgaatttttgatgaaacgtgcaataccaagtaaagaaaatgacatgagaattactgaatcggaactgactatcgattttattttagatgagagggctagggaattgtgtggagaacaaatacgttggtttgatttaaaacgaactaaaaagttagttgaatacgttaagttgcataatatggatgcaaaagataatattcaagaatatcatatgctacgtccgataccccaaaatcaattggatgcggtgactaataaagatgaattcactcaaaatcccggatatacaaaataaagtaattttgtaaaaggagtatattgaagtatttcttcttaacatactccttttacaatataccataaagaaaaatagaggtaaaatgaaatcagctataaaaaaaatattcgttttaacgggttgtgtactattgcttgtaacatctatgagagcacagagggcatgtctcaatttatcagaaactctatggaatatcactcttgatcgttcggctgtatggcaaaatgattctctttacgttcctcctgtcaatattcatgacctccctgtccatatacctaccggaggctggaatttgcttgatacacccgataagataggggtgacacttcctgctaccgtagagcaacacctatggggatggaatggagaaacatttggagttaccggaaattatgtaggggtttcatggtttgatacaaaaataaatgtacctgctgattggagaaataaacggatagtgatgaatgttgcttctgtccgttttagagctgagatttttgttaataaaaaattggtgggatatgatttggtgaatagtacgccgtttgctgtagatgtgacaccttttattctacctggtcaggaaaatgtgattgctttccgcattactgatccaaatggtaattttaattggaaagattcccaagtctatacatggggagagtatagaactaatccttctcatggttttggcggtataactggaaaagtggagttggttgctacggataagttatatattggagatgtttttattaaaaaccaaccggaccctcattctattgaagttgaagtgacggcttgtaatgaaacaaagaacccgatgaaggctcagaaaatgcttttaacagtaaaagaacataaaggtgagaaagtactttaccgaaaagaatactctgttgaaaatcttgttgtcggagagaataaacaaacttttcatattcatttgccagcggcaaaattgtggagtacggattctcctcatctttatgatttgtctgtttcagtaggtacggataattatacgcagcgttttggattcagatggtttgaagtgaaggatattcatggagataagcaatttttcttgaatggaaaaagaattgttttacgtacagctatttcatggagtttctggccggataatgggatcactccatctgatgagttggctaggagacaagtggagagtgctaaaaagctaggacttaacatgttgaattttcaccgtactatcgggcatagcaatgtcttggattatgctgatgaattgggattattatactttgaagaaccgggaggcaatcagtatcctatcagtcactttaatgataataacaagcaaagcaagttttattttgcttaccggaatgaaaaattggtgcgaatgattaaacgtgaccgtaaccatccgtctcttgttatttataatttgcataatgaacggggagcttggccacaggtacaggattatgcgcagatgcgtatggcacattcgttggatcctacccgtatcttaacttataattccagtaatggagagaacccggaaaatgaggcgaatgcccgttttaaattgcacttgatgccaaacgatactactttttatgattatggatggtatgacaggcatcatgcaggtggtccgggttgctatcatgataatttatattggggtaaagataactatcaccgtttttcagatcataaggatgagattatttattggggggaagacggggccattggtactccgccgcgtcttcagctcattcgggatgaaatcctgcaatctggcactacttctggatgggaagcgatggattatatgaaatggtatgatgcatatgattcgtttcttaaacacaatggatttgccaaagcatttcctacagtggatgatttgacccgtgccatggggaatgtggctttctattatcaaggtagggtaattgagaatattcgtatcagtaatacggtggatgcttatgctgtaaatggttgggaaagtatgaaactggaaaatcactccggcattgttgataattatcgttatcctaaaggagatgtggaagtaatggctcgttataaccaaccgttatttttagctgtaaaaatgaatcggaaagtgctgaatgttggagatacgactatagtagatacttatattgtaaatgaaaagaatttgaaggggaattattctcttcaattgatagcgaaagatgcagaaggtactgtattggctacccatgtatctagtgtacatgttaaaggggggaatgtatatggtcaatgtttacagatcggctggaattttgttcctcgggcaacaggctatgtttgtattgaagcaaagttggtcaaaggcaaaaaaacttttgcaactggagacgattctttgtttgctgtaagtttgaatacgaaaggaattacagctaatggttctattgctgatactacgggcgttctgagcaattttatgaaaacagttggttttgatattccggaatataaagaagggacaccttcgggagattatttgttggttggcgcctttgaacctactcaatggggaagtggtatgagtgatattatggaatgggtttacaagggacatacattgattattgtggataatgcggaaaggtgggctgagttcttagcggataaagaagttttggattatcgtggttcaaagaaactaggtacggcttggtatggtgggaactttttcaatagagaacatcctatttttgatggattgcctgtcaattgtgtctttaattgggaatatcaatgctttgctacttacaaccgtcatcgtgtagggttgcgttgctttaatggggaaacattggttgcttgtgtttccgatcataaaaaagaagtttattctgccttgtctgttattccggcaggtcgtggaaaaataattattactacattggatattcctgcatgtataaaggatgtcaaagcttatacagttcctgttgatcttgatggcatgaacgagtcgatgaatacttttaataccaaaagcgagaatagggctaatgtagtgggccaacagttattattgaatttaataaaagaaagtaatagataattatgaagaagagtattattgccatagcatttttgttgttatgtccattttatggggtgagagcacaggagagaccattttttgatttgtcaggaaaaggatggcatttatggcaggataaaaaagcgacttggcagacagaggatatttatttgacattggaagaggcacggaaaagttctgtaattgttcctacagcgggatgggatatattgacttctgcccaggctgttccggtacaggttcccggaacagctgaagaatatcttcaaactcagtccggacccgaaggagatattacaggagttacatggtggagtcgtacaatggatattccggtgttgaagaaaggacaaaaagtctttttgaattttggctctatacgttcacgggcggagatttttattaatcagagattagtggattatcagattgtggacaatgttcctttcgaaacggatattactccttatataaaatcgggagaacaagtacaattggctgtacgtataacggatgcgggtggtaaccatgattggcgcgactccagaactattccgtggggagataaaatgttgcctcccggtcatggctttggaggaataacaggaaaagttggtatgaaggtctgtaatgctgtttatgtggcggatatttatatgcagaacactcctcagataaccaccgccaacgctattctgacattacagaatgaaaaaggaaagactacgaagcaggatcttcgtataacggtgtacgagtggcaaaataaagaaaaaatagtttattctaaagagataaagggtgtttcattaaataaaggcatgaatgaactgaagattcctgtatcagctccggatgcgaaattatggagtgtggatgatcctaatctgtatgtatgtgaggtggagttatccgaaggaaagaactgggtagataaagattcccgccgttttggatttcgttggttcgaggcttccggtataggtgaggatgctgtttttcgtttaaatggaaaacgtatcatgcttcgctcggccatcagttggagtttttggccggtcaatggtattttcccatcggaagaattggctgaaaggcaaattcgcatagctaaggagttagggttgaatatgttgaatttccatcgttttatcggtaatactgacgtaatgaattatgctgatgagttgggactgctctattttgaagagcctggtggcttccgtctggatgtgaaacagccgtttatgaatgctgttttgcatgaaaaggtcatccgtatggtaaagagggatcgcagtcatccctgtctggttatctacaatatgatgaatgaatcgggaaatgctactcctgaaaagttagaattggagattcaagcgatgaaggatatgcgtgtactggatccttcccggctgattcttcgtacctcggcttgggcaaagggggatgatatagaagatcaggctaaaattcatattcgtccttacgatgaaaaagtgtattggagtggttggtatgattatcatcgtgccggaggacctgctgtttggaatgaaggtttgtacaaaggccctgaagattattataatgatacaaagaataagcgtgaaattgtattctttggtgaggaaggggctttatcatcacctcctcgtttggaaaaaaataaagaagatttggaaaaatatagctataaaggatgggatggtagagagtttttacgttggtatgatgaatttaatgaattcctggatgctaaacagttaaggacagtttatcctacggtagatgatttgtgtgtggctatggggactgtatcctatgagcaccaaggacgtaaaatagaatcggccagaatgaataatttgacggatgcatacgttgttaatggatgggaatcggaattgacggagaattattcgggaattgtcgattgttttcgttatcccaaatcagatccggctatcatagctcgttataatcagcctttgtatgtagcggtaaagaccaggcaacaggttgcagccgcagggggagaggtgaccgttgatttttatctgattaatgagaagaatgtccggggaaaccatcaattgaaaatctcggtgacagactctcaaggaaaagtgatggaggtagggacttatgaaacggaagctgccggaggtgaggtttatggtcagttgttggtgaaagatgtaaaaatacctgttcctacagctggaggactttgtagaattgaagcaaaactatgtaaggaaaattctgttgttacaactgggtatgatgatatattgtctgtaaatctggcatccaatatgttggatggtaaaggggccgtttgggaagatgggagtgctttacagaatttcttgaagggtaaaacgaaagaagcggttgcagcttatgaggataatttaggaaagttggattggattatggtggcccgtcctcctaggaaagatcagttgacaatggtgccgatggaagcgttacgctctgccgatggcaaaccgggattagatgtggtctattatgaggatatggaatttcagaaggaagtttatcatgaagtggccaaggtggttaatctgagtgctattgagggagctacaccaagtccttttgtgtatatgcttgatggttatggtattaaatggagtggtaaagtacttccctctgtcagtggtgaatatacaattattcctcaaagtaatgaccgtagtatgattgaagtctttgtcaatggtaagaaaatatatgaaataaccagaaagaaaaagcatttgggcgatggaaaagtttatttggaaggaggcaagtctgccgatatagagatccgtttcaggcatcctcgtagtaacgcgcgttgtcgtctggattgggccgttcctaatgataagatgccggatgcacagcgtttaatggaacgtgcagtaaatgatggaaccaaaatctttattattcagagtgctgatgaatggtcggaatttatagcggttaatagtaaagcggtgtttaaggacaaattttttgttggaaccaactggctgggcggggtgatgtttaataagccgcatgatattttcaaggaacttcctgtcggaaatgctctcaactggccttatcaggcattgatacatacaggggtggagcgtatgggattagtgatggaaggtgaagaattgctggtcggagcctatcatacttatcctatggctatcggaactgctatggggattgtccctatgggtaagggtagtgttttgttctctacattggatatctatgggaacatcattaatgattcggctgccggacttgtagccaaaaagctgattttcaatatgattgattttaaataaaataacagataccatgaaaaaaacaatcctatgcttttgtttatgcctgtattgtataggggtatgggcggctagtgcttcttttaagaagacaggaaatgatttgttgttttttttgcctcagggaaatgtgaaattggaattttgtacagatgatatgttccgtgtacgtcattctcaaggtactgtgttcgctgagaatgaacagtggatggttcggaaatatgatttttcttctgtcaactatacggtggaagatagaggtactgcatggttgattacgaccagaaaactgattatagaggctaccaagaatccattctgtctgtctgtttctgataaaaacggcaagatgctttatacagaacttgaggaacaacgtttttataaggattctgtcaagatgaaagctgttctacagccggatgagcatttctttggttttggggaacgtatggatttcatggatcagcgagggcgtaagatttatctgaatgtagagttgggaagagggataaaaccggctgtaggaggaaaagatattttacgtgccaattattgtcccgtaccttttatgatgagtaccaaaggatatggtttgttctttcatactccgtttgctaccgaatggaatatggggtgggatagtagtgattattattcgtttaaagcttttggcggtgatttggactattattttatgtatggtcccgatttttataccatgattgaccgatatacggaattgactggaaaatcccctatgcttcctcgttttgcaatggggttgcatgttggtacttattccggtggaacttggaagaatgaagagatgacttccgataaatacccgcctgctttatgtaaacgtttgcgtgaggaaggagtgccttttgatttgctttggctggattctacttggagattgtttaataccacttacggaaatggtggttgttgttttgaatggcgcaatacgttcaaagatccgaaagccatgtttgatagttgctatgcgcaaaatgtaaaaatggtggggcttcatatccgttccatattagataatggccctgaatatcatctattggataaggcgcgtgaacagggaaatgtgctgtatccaggagccaagatagaaggggtggtgaatttctttgacccgaaagcggtggattggtggtgggagaacggagtaatgaaagtggcttccatcggggctaagtttgtgaaaacggatgtcggagggacgatggacctaaaaggacttcataatatttttcctttagcttatgcggaagcgccctatcgtaaatttcaggaatataataatatgaggggggtgacacatacccgtgagggttatgcgggaattcagcgttatccttatatttgggccggagactgggggagtgaatggcagtggtttgaaccggtgatacgtgcgggacttaatatcggtatgagtggcgtgggtaactggactcattgcatgggaggatttgaacagtattctccttacgatacggaattatatactcgttgggtacagttcggtatgttttcacctatcgccatggtgttcggtatggatcacccccgttatcatgaaccttggacttatggtccggaggctttggccaattttatcaagtacgatagtttgcgttatacattgattccttatatttatagtaatgcttatcagctttataaaacggcacgtcccatgatgacccctttagtgatggattatcctcaggatgagaatacctatcagctggcgcgtcaatatatgttcgggccatggatgatggtttgtcctgtcactaccaaaggtgcactgagccaacatgtctatttccccggtggagaatggtttgattatgaaaccggtgagcgttacgagggccgccaatataagtcttttcttactccgttggatgtgttgcctgtctatataaaagccggagctattattcccatgcaacctgctatgcagtgggtagatcagcatcctgtagatgtgataacattggatgtctatccgtcaggtatttcttcttatgagatgtatgaagatgatggtatatcaatggattatcaaaaagggattggttcattgacccgctttaccagcaggctcgctgatgatagctggacgtttactgcagataaaccggtagggaagtacaaacctgtcagacacacttatctggtgaaggcttatttgcagaacgctccgcaatctgtgatagaaaatggtaaatcgttgcccgttctttcatcagttgcagatgcagaccggaatacaggctggttttatgatacggagcataaacgtctgtatgtgaagacagccggagataaccgtcagaaaattgaaattgtggtacaataacttaaaggattgattctatgagaaaaatcatcggttttcgcactttgtgcgtaagtttgggaatatgggtggggactttggtggtatctgctcaaggtgagtttaaggcattaccttggaggcaaagtaccgcttataattcttatctgatgcgtgatgtgcatcggcagtttgccgaccggcagtttgccattcaaaaagcgtttgcttctcctgccgggatgcagaagtatctggagggttgccgtgaacgatataaacaaatagtaggtacttttcctgaaaaagggagtttaaatgctcaggtggtagggaaggtacaaggtacgggttatcatatagagaaaataatttttgaaagcaagcccggccgctatgtcacagcacatctttatatgccagagaacacgactgttcctgttccggcgacattggaactttgcggacatggattgaatggcaaaggtccttcgtctcatgccgctatgttgatggcatccaatggtattgctgtgctggtggtagatcccataggccagggagaacggttgcaaattattgatagggaaggaaagccgctgacacggggggctactacggaacataccttactgaatgcgggctttaacttgcttggtactagtttggcagcacaggaatattgggataatcatcgggctttggactatttactgacccgtaaggatattgatccggagcatatcggagtatatggatcttctggcggtggcactcagaccgcttattatataggtttggatccccgtgtaaaggtagcggctatttgtagtttcttttctacccgagaacgtactatggagttgcaaggtccttccgatggttgccaacatataccatacgaagggcgtgaacaactggaggtacctgattttgctttaatgatggctccacggcctttattgattttaagcggtaaatatgattttgtcgatttatggggtgcgcaacaaggatttgctgaattacaacagtgctataaagtattgggagttcccgaaaaggtggatatgctgacagtagaaaccggtcatggacttggagctgaaaaaaggcaaaagttggccagttggttcaagcgttggttgaaagataatcaatctccggtgaagaaagcggcacaagaccgttttcagttgtcagatatgctttgtacgactaaaggacaggtgaatgtatctatgcctggagcactcagtattatgcaggaaaatgtgaatcagctggatgagtgggcttccaagcgtgagacgtttctttcgaaaggaaagaaaactgttcaaacaaagatgctggatttgttaggtcttaaaggtcttcctgaccataaaataagaattgaggcaaccggacatgattcaatgcgtgaatatgaacaatataagtttcagctcataagggaaggggagatgcctgttccttgtattcttatcatgccgtccagagcgaatgctgattctcctattgagttaaggttgcaggaagaggggaaaggaacttatttgagtgaatatgcgaattttgctgctgccttgacggaaggaaaaattttgttgttggcagacttgcgcggattgggggaaacaacagatcctgcattttatacggatgctaaatattggaaccgtgaatatcgtaatgcaatgatcagtatgcatatagggcgtcctattatgggacaacgggtagtcgatatcctgactttgcttgatttttgttcagaacatgaacttttgaaaggacatcccgtcaaagtatttgccaatggtatttatggtccagctgtaattcatgctgcttatttggatgaaagaatcaacagtgtggagataacacatagtgtgaagacttggaaggaatacattgagaagcctatgcagtgggatatgtattctaatgtgttgtatggtgctttgaaatattatgatttaccggatttgataaggttaagcaatcgtcccatccgttttgcagattaaaaaacagaattcatctccactgtaggagcatattaaatgtcctgaaggcacaacaatctgctcctgcagtggatggaatatatggcttgtctatttcttttccaggaaatcagcacgcatcgggctgaaacaatctatcagcatacccggctccaggcatacacaaccatgcactgcatctggttccttatacagacagtcaccggccgatacaatttttttcacaccattgatggtgaactcaaattttccactttctacataagtcacttgtgaatggatatgatggtgaacagctcctacagctcccttttcaaattttactttaacaaccatgatgtcatcattgtaacccatgatttggcgcactacaccttcgcctgcaggttcccattctttgccttctgcaaaaatgaagttttcactacctgttttcataacctttttttcagtgtttttgtttgtttcttcagtacactctttgttgctctcttttttttcactttgtgcattgcagctctgcaatattagtggtgccatcagggcacaagcatacaatgcggttcttactttacgattcatgatcttgcatttaatataaaatgaataactaaaacttttcttcaaatatatataatatataaggagagtggttcaccgtgattaaaatatacgaggaaaagaccaaatattacaatcccataccctaaaaaatggcttattttgcttcataatgatattcaaacttgaatcaaaacactacaacaacaatgaaaagcacattaaagaagagatggggaagaattgccctttgcttgtgtatggcaaattttgcttgcgcaggtatggctcaaactaataaaaagttagatgaccaagtgataaatacaatgaaaaccgccactcagtttatgatggataaagtgagttataatggtggttttgtatggaattatttgccggatatgtcccgctcatggggagagatggaagccaagaggacaatggtttggattcagccaccgggaactccttctgtcggtcatttgttgcttgacgcttatcatgctacaggagatgagtactattatgaagctgcccaaaaagtggctaacactttgatttgggggcagcttgaatgtggaggatggaattatgtatttgattttgcaggagagaactcgttaaagtcctggtatgataccgttggtaaaaatggctggcgtctggaggaatttcaacattattatggaaatgcgacttatgatgatgcgggtactatggaggctgctaaatttctacttcgtatgtatgtggaaaaaaatgatcctgctttccgtccggctttggagaaaaccattgattttgttttgaaaagtcaatatccggtgggtggatggcctcaacgttatcctttgatgtatgatcacccttttcaaggtaagaaagattattcgtcttttattactctgaatgatgatgtgattcctgatgcgaccgagtttttgattcaatgctatcaagcaatggggttgcaaggggtaaaggagcctattatgcgtgctatgtacttgatgatttctcttcaacaaggggaaccttatgcaggctgggcggaccaatatacagtagatgatttgaaaccggctcatgcccgttcttatgaaccgcgcagtgtgaataccggtactaccgtccgtcttatcaatttaatgatggattactataaacttacagctgatactcgtttcctgtcggggattcctgctgcaattcgttttttggaatcaatgaaattaccggaatcggatgtgaagaaatggaagcgtcagtctactaatccggaagctattttggttcctcgttttgttgatcctgatacaggtaaaccactgtatgtccatcgtaagggaagtaatgtgaaaaatggaacgtattatattgatcagaatatagaaaatacaatagctcattataattcggcaacttttgtgaatcctggtgaactgcgtcgccgttatgaggaagtgaagaaacttcctgtatccgagttggcgaagaattcacctttgctacaggatcatttggttcctttacctaaatattatactcgtttacgtggaaaagctacggaagaagttgcccggaaattggtgcaatcactgactaaggacggttgctggctctctcctttaaagtcaacctcgaacccgtataagccatatactgtttcaggacctagtgaggaaacgaaatatatagctacttttgtaggggacgagcacgatacatcaccttatccgtgtactaccggagaattgtgcatctctgtaggggattatattgataatatgataaaattaattagttaccttgaaaagtaaaagtttgttaggtataggtttatgaagaatgctgtaatttgtttattgttgttcgggatatgtctgacggtttctgctcaagaaaaggtggaaatcgtctctatgcgttatgaaacgcagaatgatatgccgctgttttatcagaagctgaaagaaagtctgacttatcctatggcatgggggaactcttctatccgaaattttgaaaaatggcgtgaagaggctagaaaagttttgttggattgtatgcagcctgctcctcctgtagcggcttttgataaagaagtgatagatattgagcggagggaagggtatacagtggaaaaaattctgtttaatgtttcggaatattcccgtgttcccgcttatctgttggtccctgaggggaagggaccatttcctgcagtgttattacttcacgaccatggggcccatttctcaatagggaaagagaagatggtacgtccgttcggtgtggaggcatctgtgacagccgatgcggatgattgggcggaaagatgttatgataaacagtatgtgggtgattatctggcaagccatggatatgtagtgcttgctgtggatgccttgttttggggggaacggggacgtaaggaaggagtgcgctatgactcacagcaagcgttggctgccaatatgctacagatgggaatgtcatggggggccttgattgtttgggatgatatccgtagtgctgagtttttggctacattgcctatggtcagtaaagatagaataggtactatgggcttttctatgggagcacatcgtgcttggatggtcagtgccgctacagatgtggtgaaggcaggcgctgctgtgtgctggatgaatactacagatagcttaatgacacttaccaataatcagaacaaaggcgggtctgcttattccatgattattcccggaatacggaattggatggattatcctcatgtggcatctatcgcctgtcccaaaccgatgttgttcatcaatggtttgcgggacaaactttttcctgtaaagggcgttgaaagcgctttctctaccatgcaggatgtatggaagggtcaatcggtagaaaatctattgactaccaagttctatgatttgcctcatttttgcagtaaggagatacaggctgatatacttgagttctttaatcaaaatttaaaatagaaagcgatgaaaattaagatgttgatggcatttgttgccttgttgttattttctgcttttacggcagaccacacaattactatctttatgataggtgactcgactatggccaacaaatccttagagggaggtaatcaggaacgtggatggggccatgtgctgggaggatatttcagtgaaaatattcgtgtggaaaaccatgctagaaatggtcggagttctaaaagttttattgatgaaggattatgggaggtagtaattaataaagtaaagccgggtgattatgtttttattcagtttgggcataatgatgagaaggtagatgagaaacgtcatactgatcccggatctacttttgatgccaatctacgccgttttgtaaaagaaacacgtgccaaaggaggaattcccgttttgttcaatgctatagttcgccgtaattttcggaataataaaaatgcggtggccgaagatgatgtgcgcaaggatttgtcaaagggggggggg

SEQ ID NO: 14536 - DNA, 26611 bp, Unknown
  gut microbiota DNA sequence
atgtgccttttgtggatatgaataagataacgcatgatttggtgcagagaatggggccggaggcctcaaaaaaattgttcatgtggattcctgaaggcgtgtgtgcagcttgtccgaaaggccgtgaggataatacgcacctgaatgtatatggggcgcgtactattgcaggtttgacagtggatgctatagctaaagaggttcctgtattggggccttttatacgtcattatgattttgttgtggcaaaagatggcagtggtgatttctttaccattcaggaagcgatccatgctgttcccgattttcgtaaagcaggacgcactactattctagtccgtaaaggggtatataaagagaaagtggttattcctgaaagtaagattagtatttctttgataggtgaggacggagcaattctgacaaatgatgattttgcttctaaaaagaactgtttcggagaagaaatgtctacctccggttcatcaacctgttatatctatgctcccgatttctatgctgagaatatcaccttcgagaatagtgccggcagagtagggcaggcagtggcctgttttgttagtggagatcgcgcttatttcaaaaactgtcgttttttgggaaatcaggatactttgtatacttatggcaaagacagtcgtcagttctatgaccattgttatatagagggtacggtggattttatttttggctggtctacggcattgtttaaggattgcaccatccatagcttgggtgatggttatgttaccgctccttctacagatcaaggcaagaaatatggttatgtttttattggctgtaaattgacgggtgtggttgaggctcagaaggtgtatttgtcccgtccttggcgtccttatgcacaggctgtctttattcattgtgatttaggaaagcatattcttccggtggggtggaacaactggggcaaaaaagaaaatgaggaaaccgtattctatgctgaatatcagaatacaggagaaggggcggctaccgcttcgcgtgcttcgtttggaaagcaactgaacgatatcagtaattataatgaagcacagattttggcaggtgatgacggatggaatcctgtggaaaatggaaatgtattgttgcagaatttaaagagataagctgttttttcttcatgtaataatactttgtcactgtagggatggatcttatttacccctatggaaaatgtcaaggaagagtggaatgataaaaggggtatttaactttgccccttttatttttttaggaacttgtatgtcggtatctctcgttttttatgtatttttgccatactatatatgaaaatctacgaaatgaaaagacacattctgtttatacttactttgctgttctttttttatgcaaaaagtcagcctaattgtatctttactcattattcttcggaaaacggtttgtctcagaactctatcatgagcatggtacaagaccataatggagttttatggttctctacttgggatggaatcaaccggttcaatggttatgacttcaaagtttataaagccagacaagggaataaaattactatgactaacaaccgggtagacttattggaagtagacccttataattatatttggctgcaaacgtatgattaccgtgtgtatcgttttgaccaaagaacagagaaattcgaacaaattcctgcagaaggtgaagaggagggcatgcgtttctcttctattaaaatattgcccgacagtgtcatttggctactttctgaaaatgagggggctgtccgtgtgaaaacaaatcctaaggattacagtgtaaccactcaagtatatgctactcatagtcatggaggaaatgccgctcacattaatcaggtttttagcgatgcttataatcaagagtggttacttactgataacggtctgctaaagattacgaatgataaagaagagcctgtttcttattttgtgaatatccaatcaggcaaagatgaatccgtacaggctttctactctttttgcagttatggtgacgaactttattttggatcagacaggggacggatatggtgctattctttgcaaaatgaaatctttcgtctttgggaattgccggtaaaggataaagtgattgctataaatgaaataaaaggtatgggactgttgataacaactgcccatgaaggattgatattgtaccattcggatacaaaagagtgtaaagtctataataaatccaattgtcccgaattcccggcagacgctttccgttctgtttatgttgacagtaagcaggaagcatggtttgagatgaccgaatggggaaaggtttgtcatttcaatcctttgacggaagtatttaagcaagaaaagatgcaagtggagcctcgtggtgccgatcgttcctatcccagttttcatatttgtgaggacttgaacggtaatttgtgggtacatccgcaaggaggagggctttcttggtatgacagggaggcaaatcggctgttacctttctacaatgaccccgattcacctgattggcacttttctaacaaattacattctatgttatccgataaacaaggcaatctttggttatgtactcattctaaggggttggagaagattacttttttaggaagccagttccatatttatccccgcatggggcacagttatgacttgaatgccaatacggtacgtgcgttgtttgaagatagcgaacatcgcatctggatgggaaaacgggacggtcagattgaaatttattcttctgatttagattttcagggtattctgactgaagaggggattatagctaaatctggtaggccgttaagtggagttccttatcatatcatgcaagattctcgcggaaacatttggattgctactaaaggggatggtattattctggcagaaaaggagggggcacattttaagtttactcgattcaaatatgatgaagatgatatttatagcctgagtcataatagtgtttactggttacatgaagacaagcatggacgtatttgggtggcaacttttggtggagggttgaattatattcagaaaactcctgaagggaaatatgtgtttattagttctagaaataacctgaaaggttttccgtatgaccgttgttatcgtgtacgccatatcacttctgataagaaggggaatatatgggtggggagcagtgatggcgcacttagttttaaagaggattttaaggatccggagtcgattgtgttccatctttatgcacgtatccccgatgatatgaattgtctgagcaacaataacgtatatcgggttgtaaccacttctcaaggagaagtttatttagctacatttggtggtggccttaaccaacttgtttccatgaacggagaagggggagctgtatttaaatcctatacagtgaagaatggtctgccttcagatatcctgttgtctgtagaagaggatgacacaggaagcttgtggataagtacggaaaacggattgagtaaatttattccgtccgaacaacgttttgagaattataatgaaagggattttggtggtaagatacgttttgaggagggaacgtcgttgaatcttagttccagcaccattttgtttggtaccagtcgtggcgtgctttattttgaaccagagcatattaagaagagtaattatgtaccatccattattttaggtactttgaagatatccaatcaagaggtagttccaggggtatcaggaagtttgttgcggcaatcactcaataatacagaacatctggtactttcacataaggagaatattgtaaccttatcgtttgctgcattggatatgatttatcctgaaaatatccgttatgcttatcgtttacgcggatttgataaagaatggaattatgtagacagacagcgtaccgctacatatactaatcttccgaaaggagattatgtttttcaggttaaatcgaccaatagtgatggtgtttgggtagagaacgagcgcagtttgagaatcaccattcagccttcgttttgggaaacagcttgggctatggcaatttatattcttgcttttctgttgattctgttttcaggagtatatatattgtttactatttatcgtctgaaacatgaagtgtctgtggaacagcaggtttctgatataaaacttcgtttttttacaaatatttctcacgaacttcgcactccgctaacgttgattgcaggtcctgtagaatatgttttgaaaaacaagactttgccagatgatgtacgtgagcaattgcatgtagtagaacgtaataccgaccgtatgcttcgcttggtgaaccaaattcttgatttccgcaaaatacagaaaaataaaatgaagttgcgtatagaacagatcgatattgttccttttgtacgccatatcatggataattttgaatcgttggccgaagagcatcatattgattttgtattcgaaagtgaaatgccttccttgaaactgtgggtagatgcggataagctggaaaagattgtctttaatctgctttccaatgcttttaagtatactccacagggtaagatgattacgcttttcattcatgaaaatgagcataatgtggcgattggtgtacaggatcaaggtataggaatttctgaaagcaagaaagcttctctttttgtccgttttgaaaatctgctggacaagaatttgtttaatcagcaaagttcaggcatcggtctttctttggttaaggaattggtggaactgcacaaagcgactatccgtgtggatagtaaagagggggagggcagctgtttcacggttgagtttttgaaaggtaaagagcactatacggagaatgtggagttcattctctctgattctgtcgaaatgaggccggaagaggtggaagaaccagttcagggacatgaagagaaaaggaatgaaagtaaaacgatgttgctggttgaagataatttggaacttcgtttctttttgcgtagtatctttatctcaaatttcaacgtcatagaggctgttaatggggctgatggtttggataaagctttgaagtttgttccggatattattattagtgacatcatgatgccggaaaaggatggtattactatgacagaagatttgcgtgctaatatggcgaccagtcatattccagtggttttactgacggctaaaacggatatggacagtaagttggagggtatggagctgggagttgaggattatataacgaagccgtttagtgccacttacctgaaggctagggtggagaatattttgacacaacgtgtcaagttacaacagttgtattgtgcgaatctgatgaatattcagcctgttccggaggaagaacagcaaacacagcctgagatgtcttcgcatgaccgtaaatttatggaaaaactgacggaattaatggagaagaatatggataatggcgatttgatagtggatgatttggtacaagaacttgcggtgagtcgttctgtctttttcaagaaactgaaaaccctgacaggacttgcccccattgagtttattaaagagatgcgtgtgaaacgtgccgcgcaattgatagaaagtggtgattataatatgacgcagattgcttatatggtaggtattaatgatcctcgttatttcagcaaatgttttaaacaacgttttggtatgacacctactgaatataaagagaatgcaaaaaataagcgataacttttgctgctatttgttagttcttgcagcgtttattttttaatgatttcttaaagggtatgtttaagtgtcgggtatttcttttgttatgtgagtgagttgctcatgttattttattattttttcgaatatgtaatgggggtttttctgaatttttagtcttttacatagataatgaactaaaaagaggaaaaagatgaaaaaagtaattttatttatggtaggtgttttggcgagtctgatgttgagtgctcagtctcgttggagtgttacgccggaagccggcttggtagtgaataaggaaaatgaagggacatcagttacattaggttttaaagctggtgccggtgtattgtatcagttaaaggaaggggtgggaaaaaagccttcttttggcttgaagtccggagtttatatcttaatgcagaaaggtgggtatcatcctatgagttggggaaacatatcaacagggggaggatttagcatggattatgaaaaaacggatgttgagtccacgcgttattatttgcaattgcctgttatggctcattggggttttaaactttgtgatgatgtgcgtcttaaattagcagtagggccttatgtagctgtaggaattggtggacgcactcatgcttatgtttcttcctcaaaatataatatagatgaagaaacaggtgttggacagtatgaatatcggaatgattattaccggtttggcacatttaaaggaaaagcagtaaatgaggaatttggttttgaggcgtcccctcgtttggattggggaggaacggcttctgtcgggattgctgttaaacggatttcatttactatcgggtatgatttggcttggggaaaatataataaggaacagaatgatttaaggatacggaatcatatggttagctttatttcagggtatactttttgataagaaaaaggataaatgaaacaaacatacacaaaatttcttgtttaagattgttaaatgaagaattttgtgtatgtttgttttttcataaacacgataaaagttcaatctatgaggaaaatgctattcattacccttttaatgggcggtctgtgtacgactgtctctgttgcaaaggcacaggaacgcttgccagaatacctgcaggcagagaagtacacacaagaaaaattgaacaccatgttgttttctactgtggtggatccgcattggttccagaaaggtaataatttctggttcgagtacaaaacaagtgaaggaaccttttggtatgtggttgatccggttgcccggacaaagaagcttttgtttgatagggatgaattagcttctcagcttactgaaattgtaaaagatccctttgaggcacgccatttgccaattataaatctgaaagcgaaagaagatgggcgtacctttacttttgaagtaaaatcaacaaaagatgcgacaccaaagacagaaggtaaggataagaaagacaaaaagaatgagaaggaaatcttttatttttcttatgactatcctactcgtaaattgactcatttgaaagataaagaagacgacctgaagaaaatctattggggatcagtttctcctgatggtaaaacggtgatttatgccaaggatttgaatttgtatcgcatgagtcgtgaagattatgaaaaagcgaaaaaaaatgaaaaggatagtacgatcgtggaaatccagcttactacagatggcatgaaggattttggctatggtattccctatagtatgcttaatacagatactttatgtaatggcaagcgtcgtcgtgtaggtggagtgtggtctccggattcacgttattttgctatgacagtttctgacgatcgcgctgtgaaagaattatgggtaataaattcgatggcccatccgcgtcccacattggaaacttataaataccagatgccgggagaaaaggaagctcccatagaacatctgtacttgtttgacttggttgataataaacgtaaggaaattaaagtagcagcttataaagatcaaagcattggcctggaatacaaaccaatgatgcaaaaacagcgtgatatggaagatcaggctgtcgtttggcagggtgataacaaccgtttttttctgactcgcagcagccgtgatttacatcggattgatgtttgttcctatacgataggacaggattccgttgtacctgttataaaagaacggatgaatacctatcaggaaactcgtcctttaagagtcttgaatggtggaaaagaaattattcaatggagtgagcgtgatggttgggcacacctttatttatatgatgatcagggtaatttgaaaaatcgtatcacaaaaggtccctggcacgtggaggaaatcttgaaagtagatgataaggcgcgtgtgatttattttactgctaatggaatgaatgctaaagaacatccttattatgaacatttgtatcgtgtgaatttggatggcagcggtttgaaactactgactaaaggggattatttccatcgtgtggaagtggatgatgatgctcgttttgtggtggataattattcgcgtgtaaatacagtgccttgcgccatcctgctggatactaatggcaataaagtaatggatattcaggagagtgatttttcacagctttttgctgccggttataaatttccggaaatatttaaagtaaaggcggctgatggtgtgacagatttgtatggtgtgatgtataaaccttttaattttgactcaactaaggtttatcctattgtggattatgtttatcctgggccacaggtggaaggtgtttattatccgtttacccgtatgagtccccgtaccgaccgtttggcacaggccggatttattgttatttctgtaggacaacgtggcgggcaccctagccgctctaaatggtatcataattatggatatggaaatatgcgtgattatccgctggccgatcataaatatgctatcgagcaattggcgcagcgtcatcattttatagatatagataaggttggtattcatggacattcgggaggtggatttatgagtacggcggctatgtgccaatacccggatttcttcaaagtggctgtttcttgtgccggaaatcatgataataatatctataaccgttggtggagtgaaacgcatcacggcgtaaaagaagtagtgagtgagaaaggggatacaactttcgtttataagattgctactaatcctgaaatagcgaagcaattgaaaggaaatttgttgctgattcatggtgatattgataataatgtacatccaggcaataccttacgggtagttgatgcattgattcgtgccgggaaacgttttgatatgctgattcttcctcaacagcgtcatggattcggcgatatgaatgaatatttctattggaaactggtagactacttctccgaacatctgaaagggagaagtgaaaaatcggtggatataccgaaacggtagatttaggataattgccggacgaatatgaaaggagcacagagggttcgtgtcattaagatacctttgtgctccttgtttttatagcagactgttgatataagccttcatgtccggtgtcgcggattttgcttccagatacagtttatactgcgctttggtacgtaccagattatggtctttataccgggtttgataatacgtgtctccgtttatataatctgctaaaaagcgtacagcttgcatataagggaacagagttgcagcgtatggtagcatttctatttcaagaggggtcaggaaagctcgggccgactcaatataacctttggtaaatgctttgaagatttccatgttgaacttcaccttatttaaatcagcctcatcctccttgccggtattggctgccgaacggaggaaatcaccgaaatcggagaaaatgaaactgggcattactgtgtccaggtcaatgacgcacaacacttttccgttttcatcaaataacatgttgctgacttttgtgtcacagtggcagatgcgtttgggcaatttgccttcacggtaaaaacgttcagcgctgcacatcgtatcagcatctttttctattgcgtccactatgtcctgtacttctgccaaacggccagacatgttggcagatacggcttcacgtaattgttttaagcggaattccatattgtggaaatcggggatgatttctccgagttgttcgggtacatcagccagcatggcttggaattcaccaaacttcagtcctgccagataggaggattccggtgtaactgtttccaatgtttgtgaacgtggaataaatattgaaattcgccaataaccttctccatcatagaaataggttttgccattggtggaaggtagaaaatggagtaccttacgttcaatgtcctcttcgtgtctggcttccagcttttggcggatgtgtctggttactacttctatattgtgttgcagcatttcaatattggtaaatattaaatggttgattcgttgcaatacatagtcaggctcttcaggagataccgattttaccagataagtctgattgatgaggccggatgtcaaagctttgatttctttcacttcacccactttggggaactgtttgataatttttttgaggttttccataggtttgtttgaataatgtctatatatgaaacaaagataacttctttccttcaattggaggaaagaagttatcttaaaaaacatataataggaatataaatctttttatttttttaaatcagtctggaacatacggtcagcgcgtaacagatgacgccagtaggaaaccaattcttgtgattcctgcaatacattgaggtacaccatagaagcttttacattgacatcccgttcttgtatgcggtccatctgttctttgcgcaaggtggagatcttgcctttcagaagggcgccttcacgtagcaaagcatcagtctggtcgtaggccttgttagcaagtacttcagtagctttggccattaatgccgtcatctcatcgcggatagggatgaactcgttagtggcacgttccgataatggggtgaacttattgtccacatgttctttacaaggctcgcagatacgtttcagacagtaaagcatttgttcacaactgttgcttcctaaatggaaccaagtatttttctcaatagcagtgaagttgtctatgcgacgtaggcccagtatttctttacggcgtatcttttttaacatttctttctggttgtcagtattgctcacggccttgcgcagagctttcagattttcgttgatgaaaccgtcggttatctgccggtaggtttcattggtgaatgccatttcggctaccaatgtgttatttacatgctggcgaagtaatgtccaacgctcttctttgtctttactggcaatgaggcgggagaatatgtcgtctttgcctttatccttctgtttcttgctgtagtgtatgttgctgcgtaccaataggaagatggcaagtgcaataagagccaacatggcgaatgtgcctccataatacatgatgagcgtaaccacaaaacagatagtgaaagcagctccggcagtaatgaaccatccaccgataacagaaagcacaccggtgatacgatatacggcactgtcacggctccaggcacggtcggctaatgaactacccatagctaccatgaaagttacgtaagtggtagaaagagggagtttcaaagaggttcccaaagctatgagcagaccggccagtaccaaattgacagaagcgcgtatcaaatcaaatgctgccccattctccataatcatcacatctttgttaaaacggctgtcggcccatcgtttcagattgtcgggcaatattttggctatattttctgaagcgctcatggtagaacggacaatactgcgtgctacagcggaagaaccaaacatttcgtcaccttcatcctgacgcgagagatctaccgaagtcttcactacattttgcgctttttttgaagtaatcagcgcatataccatgatgacgcctgctaaaaataaaaaaaggaatggggttttagccggaccattcagtgaattcatcaagtatcccattggttcaccgtttccattagccatgaagtctgtataagctgagaagcctgccaaaggcacaccaatgaagtttactaagtcattgcctgcaaaagccatagctaaggcaaaagtacctaacattaccaccaccttgaatacatttatcttgcaccaatgcagtatttgcatcagaatggtgaagaacacaaaactgcaacttactaacatcaaggtgttttcctgaatccaatgtttgttttcggcagtcatgaaggcggaatctttcaggccttttatcaacatgaagtagataatggccgtaacagcgataccgccgaacagtccgatagtgtatttcagtttctttgtataattaaatgtgaagaggagacgggagagatattgtactaatgtgccgaagaagaaggctactgctactgagaggaagatacctaaaatgacggataatgccttttccgtattcagcagatcagcaaatcctagcattccggttttgtcttctgctattttgataagagctagaacgaaagttcctcccaatagttcgaataccatggatacggtagtggaggtaggcattcctaaggaattgaaaatatccaataggactacgtctgttaccataactgctagaaagatacacattaactcctgaaaataaaattgttcaggtctgaaaataccgtgtcgtgcgatttccatcataccgttgctcagtgtggcgccgatgaagataccgaaagcggcaatggcgatgatggtcttgaatgacgcggctttagcaccaatggcggaattcataaagttcactgcgtcattgctgacgcctactaccaaatcgaatatggctagcagaaaaaggaatacaacgattcccaaaaacatagtttccatataattttgtctctctattttattgggcgcaaaggtacgggaggtatattatgataaaatgtcatatatgttacatttgtgttacaggtgttttttgttcaccatagattgcacggattcacacaacttgatttttaatttattattatccatatttagtggcgaatctcttcttttttgagacaaatatgagtggataaataatatttcacgtttatgtgtggaatttatagagtgaaaatttatacctttgtagcccaaatacttaatctataaaaaatgtcagaggctaagagaattaaaaccgcattggtgtcggtttatcacaaagaaggtttggacgagattataaccaaactacacgaagaaggagtagagttcctgtcaacaggaggtacaagacagtttatcgaatctttaggtttcccttgcaaagcggtggaggatcttactacttatccctctattttgggcggacgtgtgaagacactgcatcctaaagtctttggaggtattttatgccgtcgtggtttggaacaagatatgcaacagatagaaaaatatgagatacccgaaatagatttggtcatcgttgacctgtatccgtttgaggcaactgtggcttcgggtgccgaagaacaagctatcatcgaaaaaattgatataggtggtatttctttgattcgtgctgctgctaagaactttaatgatgtagtgattatcgctagtcaggcacaatataagccgttccgtgatatgttgctggaacatggcgctactacttcacgcgaggaacgccgttggttcgcaaaagaagcgtttgctgtttcttctcattatgattctgctatctttaactattttgatggtggtgaaggttcggctttccgttgcgcggtggaagaacaaaaacaacttcgttatggtgaaaatcctcatcagaaaggttatttctatggaaatctggatgcgatgttcgaccagattcatggaaaagaaatttcctataacaatttgttggatatcaatgcagctgttgatttgattgatgaatttgatgaggtgacatttgccattctgaagcataataatgcctgtggattagcttcgcgccctactgtgctggaagcatggaaagatgcgttggcaggcgatccggtgtcggctttcggcggtgtgttggttactaatgccgtgattgataaagaaacagcagaagaaatcaataaactgttctttgaggtaattattgctccggattatgatgtagatgcattagagattttgggacagaagaagaaccgtattattttggttcgtaaggaagctaaattgccgaagaaacaattccgttctttattgaatggggttttggttcaggaaagagacctggatgtggaaactcctgccgacttgaagcaggttactgaaaaagctcctacggcgactgaagtagaggatatgttatttgcaaataagattgtgaagaatagtaaaagtaatgctattgtactggccaagaacaaacaactgctggctagcggtgtcggtcagacttcacgtgtggatgcattgaaacaagccattgaaaaagcgaagtcatttgagtttgatttgaatggcgcagtgatggccagtgatgctttctttcctttccccgattgtgtagagatagcggataaggagggtgtgaaagctgttatccagccgggaggctctgtaaaagacgagttgactttccaatactgcaatgaacatggcgtagctatggtcgttacagggattcgtcactttaaacactaagatcattgcaatttaccatttgcggctacaatcggactgtttatacagcattgttcagtaaatggtcaattgcaaatgtcaattgtaaattgctaaattgtaaatgaatttatgggattattctcctttacacaagagattgcgatggaccttggcactgccaataccatcattttaaataacgggaagattgtagtggacgaaccttcggtcgttgcgcttgatcgccgtaccgacaagatgattgccgtaggcgaacgggctaaaatgatgtacgagaaggaaaatccgaatattcgtactgtacgtccgctacgcgacggggttattgccgattttaatgcctgtgaacagatgatgcgcggtttaataaagaaagtgaacatgggtaatcgtttcttttctccttctttgcgtatggtgatcggagtcccctcgggtagcactgaagtagagcttcgtgcggtacgtgacagtgctgagcatgcgggaggacgagacgtttatttgatttttgaacctatggccgcggctattggtatcggtattgatgtagaggctcctgaaggtaatatgattgttgatataggtggtggttctacagaaattgccgtgatttcattgggtggtattgtttccaacaattcgatacgtattgccggtgacgatcttacagccgatattcaggaatatatgagccgtcagcataatgtgaaggttagtgaacgtatggctgaacgtatcaagatacatgtaggtgctgccttgactgatttgggagatgatgctcctgaagattacattgtacgcgggcctaatcgtatcactgctcttcccatggaagttccagtgtgttatcaggaggtggcgcattgtttggaaaagagtattgcaaaaattgaaacagctatccttagtgcattggaacagactccgcctgaactttatgctgatattgttttgaacggtatttatttggctggtggtggtgctttgctgcgtggtttggacaagcgtctgacagacaaaatcaatattccgttccatatagccgaagatcctttgctgagtgtggcgaaaggtaccggtattgcactgaagaatgtagatcgtttctcttttttgatgcggtaaataatttgctaatgaggcagtttgctaatttgctaatgccatgcggtatggatagcgcagtacattggcacattggcaaattagcacattgaacaattagtattaatgaaaaatctgctgaatttctttttaaagtataattactggtttctctttgttcttttggagataatcagttttgctttattattccacttcaacagttatcagggaagtgcgttctttacatctgctaattttgtgtcgggagctatgtatgatgcagccaataatgttaccggatattttcatttgaaaacgattaacgatgagttggtacagaaaaatgtggaactggaattgcagttggagagtattcgtaaagctttgattgaagcaacggaagacagcagtggtgtggaacagcttaagcaggaagcactggcaggatatgatatctttaaggctagcgtgataaataacagtgtgacccatgctgataattatattacacttgataaaggagaagtagatggcattcgtagtgagatgggagtggtaaatggaagcggtgtggttggtattgtttatctcacctctccacattactccattgtcattccggtattgaattccaaaagcagtattagctgtaaaataaaacggagtgattatttcggcttcttgaaatgggatggcggttcatccgaatttgcttttataaaggatatgccccgtcattcattattttctttaggtgacactattgtaaccagtggacacagtgctgttttcccttccggcattccggtgggtacggtagatgatattgccgatagtcacgatggcttgtcttatttgctgcgggtgaaactatttacggacttcgcccgtttgaatgatgtgcgcgtaattgctcaaaaagggcaggaggaacaattggagttggaaaagcaggtaaaaacgattaagtaagaaggttgatgttgacttatctacaaagaatagagtggtttatcggactggtactgttgcaggtgttggtgctgaatcatatgcatatcaacgggtatgccactcctttcttttttatctattttattttgaagtacaattcgggagttagccgtaatgtccttatgatatgggcattcctgttgggattggcagtcgatatatttggcaacactccggggatgaatgcggctgcggccactgtactggcttttatgcgtgaacctattttaagattagtcacactccgcgatagcgtcgaggattttgaaccaggtatcaaaagtatgggattctcgcctttcttccggtatatcttattgtgtactttcttattttgtaccattttacttgtcatagatactttttcattcttcaatctgcctgtcttattgttgaaaatattgacagatgcctcaataaccgtcatttgtatattgtgtgctgaggcaatcaggaggaaaaaatagtggaaagagattataatctggagaagcggaaatatgtaatcggtgcatcggtaatcgttattgtgctgatttacttgatacgtctttttaccttgcagattatgagtgaggattataaaaagaatgcagatagcaacgcttttctgaacaagacacaataccctagccgtggggtaatgtatgatcggaacggtaacctgctggtatacaaccaacctgcctatgatgtaacgatggtgatgaaagaggtgcataatcttgatacgcttgatttatgtaaaacattgaatattactcccgggtatttcaagaagcgtattcgtgagataaaggacagacgttccaatccgggttactctccatatactcatcaagtatttatgacccagctttcggcagaagagtgtggagtcttccaagaaaagctgttcaagtttcccggtttctatattcagcggcgtactatccgtcagtataattacaattcggctgcccatgttctgggagatattgcagaagtgtccaagggggatattgaagcggatgattactatgtacgcggtgactttatagggaaacagggggtggaacgctcatacgaaaaacagttgaggggggagaaaggagtggagatattactgcgcgatgcccgtggacgtattcagggacggtatatggacgggaaatatgacaagactcccgttccggggaagaatctgaaactaggtatagacatagagcttcagatgttaggagagcgtttgttggaagggaagataggcagtatagtggctatcgagccatccacaggagaaatactttgtatggtatctgctcccacttttgacccaagattgatggtggggcgccaacggggtaaaaatcatctggaactggcgcgtgacagttggaaaccattgctgaaccgttctattatggggcaatttccaccgggatctacttttaagactactcaggcgttgacttttctgcaagaggggattattactcctcagacagcctattcttgctatcatggttttgtgtatgccggtcttagggtgggttgccactctcatgggtcacccctgcctttggtgcctgccattgcaacttcctgtaacggttatttttgttgggggttgtttcacatgataggggcaaagaagaagtatggttctgtacaggctgccatgaatacatggcgtgattatatggtttctatgggatttggttatcctttgggagtagaccttccgggtgagaagcgtgggatgatcccgaatgctgcttattatgataagaactatcggggatcatggaacggactgacgattatttctatctccatcggtcagggggaagtgacggctactccgttgcagattgctaaccttggggctactattgctaaccggggctactatataactccgcatgtagtgaaagaagtagaagacgagccgttggataccctgtatacgaccaaacattatactaaagtaagccgtgaacattatcagacagtagtcgaaggtatgcgttcggcagtattgggaggaacctgccgtagtgcgaatattccggggattgaggtgtgtggcaagacaggtacggcgcaaaaccgtggaaaggaccattctgcttttatggggtttgcaccaatgaatgatcctaagattgccgtggtagtctatgtagagaatggaggttggggagcaacttatggtgtacctatcggtgcattgattatggagaaatatttgaaaggagaactttcaccggaaagtgaggcgaaagcggcggaaatacaaaacagacgaatagattatggcatacacgaacgatagtatatggaaatcagtggactggatgactatctgcatttatctgatgctggttatctttggatggttcagtgtatgtggagccagctatgattatggtgaaattgatttttttagtttcgacactcgtgcaggaaaacaatttgtatggatctgttgctctttggggctcggatttatcctgatgatgttagaggataagttatatgatatgtttgcttacattttatatggaggcatgatgctgttgttgttgataacaccttttctggcagaggataccaagggatcttattcatggataaaattcggacctgtaagtttgcaaccggcggaatttgctaaatttgctacggcgttggctttggctaaatttatgaatgtctatgggtttacaatgagtaagttaaagtattcattgcctgtagtagggatggtgttgctgcctatgctgctcattattttgcaacgggaaacggggtcggctttggtttatctggctttcttttttatgctgtaccgggaggggatgccaggttctattttgtttgctgggatttgcgctgtggtttattttgtagttgggatccgttttggcaatgaattgatggcggatgactgtacttccatcggtgaattttctgtgttgctgttgatagtcattctttctgctttattagttaatagttattgtaaaaaagcatcggtagtgtggtatattggaggggttggtgttggtggtaccttgctggctttattattttcgttttatgttatcccttttgatattacttggtttcaatatggattgtgcgtagttttattgttctatttgatcttcctttctatgcatgaacgtatgcgtaattatttttatattgctctatttgcggtaggttcagtgggattccttttttctgctgattatgttttcaataatgtgctggagccacatcagcaaatacgtattaaagtggtacttggtatggaggaagacttggctggggcaggatacaatgtgaaccaaagtaagattgctattggttcgggaggcttatgggggaaaggctttttgaatggtacacagactaaactgaagtatgtgcctgaacaggatacagactttatcttttgtacggtaggggaagaagaaggctttataggttcggcagctgtattgtttctttttaccggacttattttgcgtcttattgtggtggcagagcgtcagcatactcgttttgcccgtgtttatggatattcggtattaagcattttcttattccatctgtttattaatataggtatggttttaggactgacccccgttataggcataccattgccttttttcagttatggggggtcttctttgtggggatttacgatcttgctttttgtattcttgcgtattgatgcagggcggggaaaacgttagagtttattggttttccagtttgcgcaactggatacctatatcactgattcccgtcaacgggttatccctcatgatatggacgatgcggaaagtacgtgtgcttccttctgtacggataggaataaatgctttataaggcagattacattgatataatccacaaagaccatttcctgttttatttccagcttcgtcaactagaaaaagttgtaaagtgtctgtgacgtaagtcaaagtatcctctgtgttatggctgactcctaaccaaatatctctgtaaggataagattcttgataacggatgccgatttctgcttcgtaatttccggcagggatagaattgggcagggtataaacaagagtatcacttttattccatccgtcaagggggacgggggtataagagtgatagattatattgttttgacaggctgccaatatgattattggcagccatgtcagtttattctttagttgatacaggagtttgtggcttttcattcggaatttggctattgtttccgttgttcttgttgtcattttccttccctcctccgttattccggttttcactgcctccttcattattaccattattggggcggcgtttattgcggttccggtttccgtcttcccgattttcacgactgcgttcttcccggccgcgactttccctgttgcgattttcttctttagggcggtttccgttctcttcgcgtggctgctgagccttgttttctttaggctctctaggttgtttgggacgtccttctctaggtggccggttttccttgggttgttgtgaccggttctctttaggttgttgcggacgtctgttttcattgggaatactttctccgttattaccgttattttccggcttacgttttttctttcggttgctgttgttgccttttcgtttatcgaatcgggttaagctttcttgttctactaaatcaacaggcttttgaggttcgttcttttttactgattcggttaagctttccggtttctcaccacgtcggttcatattaataatttcaaaagcacggcgtgcggtgatggttacagcattagctatgaaatttttgtcagtagagtacatgatagttcccttcaaaatatccgctttgaaaaaatagaatgtaccatctgtcgtttctaaagtcatttctttgcttggaaggcgtttttgggattctacataagcgtctacctcatagtttaggcaacatttcagtttggcacattgtccggctaacttttgaggattcagagaaatatcttgataacgtgccgcactggtagatacagatacaaaatttgtcatccaggtagcgcagcacaattcacgtccgcaaggtccgataccgccaatgcgtccggcttcttgacgggcgccaatttgtttcatttctatacgtacacggaaagcttcggccagtactttgatcagttggcggaagtctacgcgttcgtccgcgatgtaataaaagatagctttgttaccatcgccttgatattccacatcaccgatcttcatgtccaggttcagatttttggctatctgacgggatcggatcattgtgtcatgttctttggcttttgcctcctcgtatttttccatatctacaggttttgccttgcggtagatacgcttgatttcggcatcgggtttgatgtttgccttacgcatttgcaaaggtaccaatcttcccgtcagggttactgtaccgatatcgtgcccaggacttgcttctacagctactatatctccttttcccagcttcagtttgttgctgttcttataataccctttgcgggtattcttgaattgaacttcaaccatttcctgttcctcggtgttgccgggaatatcagccagccagtcgtaggtgttcagctgcttatcctgtcgtccgcagcctttgcaacacaaacagccgcttccgttctttaatttgaattcattgtccataattctgttttaaatgagaattgaaaattgagaactaagaaataaatgccatgcaattctgttattttttaatactcaattctcaatttttaatttttcaatagcacaatcatttttaaagagaaatcaaagaacaccattttgggattcacattctgtcctatatgtaattgtgcttcactaagttcgtccattatgcccatcacattccgctcgttgacaaacggtgcgaaacgggtggaaaaattttgttcttcgggattcatatacactaaatcacgttgatgaaagttgtatatgaagttttctcgtatcatacgttggcagtaagccagaaaattcttctgacgttcacgccccatggaggctaccgcatcgctccattgtttcatttcgcgtatcttccgttgataggagagacgcatcaaatttataaagagttcaaagaacagtttgttctcctcactcaggtgtatggtttccagtgctttcagaaaattgccttctgagcgatgtgctatatcgtcagcatcttccggttgtaatccatatttggtttgcaatacttttgaaatctcaggttctttgatcccatgaatgttaaatcgttgggtacggctttggatcgtttgcaaaatggcatcaggctcttcggatactaataaaaagacagtcatggcaggaggctcttccagtaacttcagcagtttgttgctgcattccacattcatcttttcgggaagccatataatcatgattttgtaaccgccttgactggatttcaaactgagctttcgtacaatctcatcgctttcttttacaaagatttgcgcctgctggttttctgctcccatctctttcagccaatggttcagattaaaatatgggttctgcaggacaaagttgcgccagtctgctatgaaatcatcgcatacagtatcctttccggcttttttcttgataacaggaaaaacgaaatgcaggtcgggatgtatcagcttattgaatttcacacaagtggggcaaattccgcaggcatcttgttcaccacggttttcacagcagatgtaacgggcataagctattgccaaaggtaactttcctgtaccttcgggaccgcaaatcagttgtgcatgagggattcttccttcttttacctcggctatgagccgctgttttgcttcctcttgtcctattacatctttaaataacattgctttttatagtcatttatttactgtttaataaattgcttttgcaacttcctttacactgttcacggcacttacggtatagaaatgaatgctgggaacaccacaggctattaattcacggcactggtgtatgcaccattctatgccaagactttccgcttcttcatctgtttgacatttcatcgcttcgcttgccagttcctgcggcaagtctatcttgaacgtcttaggtatcatgttcagctgagataatttgcggaaaggcttgatacccggaataataggcacgttgattccttcttttcttactttttctacaaattcgaaatatttgcggttatcatagaacatctgtgtcacggcatattcagctcctgcttcaatttttttcttcagccaataaatatcttgttccatattgggtgattcctcatgtttttcaggatagcaagctactccataactgaatggagttcctgttatcttgataggggaaccgtctacaaatacgcctttattgaaatcattgatctgcgcttccagttctatggcgtggttgtaaccgttgttttcgggtacgaaagctgattcgtgttttgccttgtcaccacgcagtaccaacaagtcggtgatgcccaggaattgtagatctaacaatacatattctgtatcttcgcgggaaaaaccgctgcataggatatgtggcactgtcgttatattgtatttgttctgcaaagcggcggcaacagcaactgttccgggacggcggcgctggcgtgtacgttggtacagcccgtttcccagctctttgtacacatattcgctgcggtgggttgtaatattaatatatttagggtcgaattcgcgtagcgtatcaaccgttttatatagtttttcaatacccgttcctttcagcggagggagaatttcaaaagaaaaagccgtattgtccgtgctttttattaaatcaactactctcatcgttctgtctcgttctcttatgccttctcgggcggaattacatatttgggcaaaaataagaaaaatatcgtagtttatggggatgaaaaagcgatttattttatctttgttctataataaagtgaaacatacggagagaaaagcatttccctgcggttaagccgtggttttccatacttgtcagggataccgtccgtgatggtggagtaacatttctcatgattacaggcattgttctcttagaggatgacctgtcaaactttactgcatggagaataagttgcagatgggataagtcccgtccttgcaggagatgaaacaatttgtaaacctttgtttggggaagtggcagaggtttataggaacggactgaacagattggcgaaccaaccgacgaagcgtttccatccggagcgttttttatattcttccttagtgagcagagtgctgtccagcttgtcatggtcaaacatggtactcagttcatgtgtggtttctttgtcaaaaataaaagcgttgacttcatagtcatagcgtaggctccggctgttcagattcgtacttcccacagtgcagaacaggctgtccaccatcatgatcttagagtgatggaacccgccattatacacataaatctttgcccctttcttacgcagcttgtttgctgtatagaatgcggcgtcgggggtaaaaggaatatccgatttgcccggtatcatgatttctacttcaacacctcgcttcagagcccgttttatggcttttttaatgcttggaatgggagtgaaataagggttcactatttgtattttatcctgtgcggcatcaatggacttgatataagtctgcctcatcagtttgggctcttttttcggaatacggtctacaatagctacattcttatttcccttgaaagtagaatcgtttcgtaggggatagtattggcttccgcttatgtgttgtttagtgcttttgttccacatagtcaggaagatgttctgcaattcgtttacggcatttccctctatacggatatgcatgtcacgccagtcgcctatttccggcagaccctttatgtagtaattggctatgttcattccaccagtatatcctatttttccgtctatgactacaatcttgcgatggtctctgtgcagggcatgattgatatagggaaatttgaaagggtcgaatttgacaatttctatacctttgtcacggattgcttttatgtgtttcttttttaatggcttgttgtttgacaagttgccgaaggcatcaaataaagctctaacttccaccccttcttttactttttcccccaataaatcaaatagtgcgttcgctatggaatcgttacgaaaattgaagtattctaagtggatatgatgtttggcatgccgtatttcttcaaagagatcgatgaatttggcccgaccgctttttaataatttcagtttgctgttttgggtgataggaatgccggcgtcctttaagaagttgataacggcagagtcgcttgtataggctggtacagtatctgttaccgctatatggatgttggtcacttcttgtgactgcgctgtttttacagtgaagggtaagatgaataaaagtattaaataaatatgtttttttatatcaaacttcattgttttttttattaaggctgcaaaggtatttattattctaggaatgaacaagccatcggtattatttatgtttaaaagggagaaatagaacagtgtggtcattctgtttaaacagttgataaattgggcggtagaaatttaatgaagactgctttttattattctattcatatctttcttcaggttcggtataaacatctgtagtgtgtgtgaaagaagtttgtcagtccggcctttctgctgttatgacattcaagaggaggagatactgaaaaaaataataacctgtcagcgggattaaaagaatgcatatcgcatctccagccctgttgcataagccttttctgtctt

SEQ ID NO: 14537 - DNA, 1481 bp, Unknown
  gut microbiota DNA sequence
attttctacatctaaacaagtgacgctataggcgaacaaagggataattttaccgaaatttagatcatatcaaattactagtcctatgatttttttatcttaaatttgttactgttttttgaaaaggaaaagatttagaataaagagttttatgaaagctactatcgcaagtctcatttttttgctattgtcattagccgtctcatcgcagacttataaatatattggtatagaagaaggactaagtaatcagaaaatatacagaattcaaaaagacgcgcgtggatacatgtggttcctcacccatgtgggaatagaccgatataacggaaaagaaataaaacattataaattaaaagaaggcgacagggagctagacccgttattgaatataaactggacttatttagataaaacaggtacactgctggtcacaggaaaacaaggcagaattttccgttatgattcaggacacgatcgttttgtacagatatacagtatgtacaattactggaacaaggactaccatgctttcgtgagatatagttatatagaccaggagagtaacgtatggttgtgcggcaaatcagctatccacctttttaacatagaatccggacaaaagcaaagaatttctaaccggctgggaaatatcacctgcatagaacagataaacagtgaacatttttttataggtacagacaaaagaatctatctggtaaaactggaaaacgggaatttgaaagaactctcctgcggcaaactggaaatgatggatatgcacgtacacgaattatatctacaccgtacagccaacaaactatttataggcacttttgaaaagggagtctatatatatgacttaaatatccagaaaattgtacgtcccgaagtagaactaacagatgtgaatattacacggctcagtcccttgaacacaaaggaattattagtagccactgaaggagcaggagtgcacaaattaaacatagatacctatgaaaccgaaccttatatcattgcaaattatggtagttacaacgaaatggacgggaacattatcaatgatgtatatgtagacaacgagcagcgtatctggctgtctagctatcctacaggaattaccgtccgcaacaaccaatataccaactacaactggataaagcactctattggcaaccggcagtcactagtaaacaaccaagtaaactctattatagaagatagtgacggggatctgtggtttggaacaagcaacggcatcagcttatacgattcaaagcaaaagcaatggcgttcttttctaagctctttcaatcacggactaaaaaatcagaaccgcatttttatcactttatgcgaagtttctccgggtattatatgggccggaggatatgcatcgggcattttccagattaccaagaaaaacggaaacatagaatacctcacccctgcccaatctttccatctgaatgtacgtg

SEQ ID NO: 14538 - DNA, 50165 bp, Unknown
  gut microbiota DNA sequence
acttcatccggtcatgtgtgcaaaattactttttcacaccggagattggaattgtcaaacagctgaaaaacaatgaagtatggtgcgtatttatggctttttcaaaagccttaaaaaaagccactgaattggcgaaatccaacttcacaaatatgtagcggaatgcgtagtgagggtaaaaaaagaacccttgaactatctctaattcaagggttttcatgtgtgaaaagcatttatgtactttctttggtggtgccaccaggaatcgaaccggggacacaaggattttcagtcctttgctctaccaactgagctatggcaccaagtcagtggttaagcacataggaacttacttctcagcacattcaataaaaaaccttagcttctcgtttgtggttgcaaaggtagacatattttttgattctacaaattttctacaaattttctgtgaaattctttttgatttcaaaaaaatgccttacctttgcactcgcaaaacagaaacggaatgtagcgcagttggtagcgcactacgttcgggacgtaggggtcgggcgttcgagtcgcctcattccgacagaaggcgacaaacgagcaaaatcggttgtcgctttttcttttccaccttcgcaacttgctgtaaatctgcggaaaatcttaaaaacttcattctcgttttctgttcgataatcatcattttccttgtcgaagtaaattccgctgggatagactaaattttgtattttttgcctattagagaaattactatcactccacaaaccacctaatttacaggacatttcaatcgtttgattgatatatttcatcatgttcgataaatttttccctgcatcttcaagctctcgtctgatttctgctaatctcgaatttaattcgctcatagtagccgtatatatttcactattaatttctcccagaccaaaccgaactttgactgtattaattcgattttcacactctgttttccgttttaaaagaactttctttgtttcacctttattttgattgtattcttcaaaaacctttcttaaaacgtctgtaagtatcgggataagtccatctggtatattatattcatttaaaagattgatatacttctgatgcagtttctctgtgctatgattacttttacaccctttcttattgcatttataataatcccgtccacgtgctttcactgtgtatccagttaaatagccaccacagtccgaacagataatatgccttttcaatgggaacggctcagtaatttctttgtgttcatatcctgcattcgatatatcattcactttattaaatatagcctcatcaattaatatctcttgattaccttttataatttcatcacccaacaaactatgctgtatatacccacaataaaacggattatgaagaattttatttaaatgctttcggtcaatggataaccccaacccctttaaccgatgaactatttctatatctttaatcccctctgttgctttccagataaaagcattacgcagtatcttgcctttttcattcactgtaagaacgtgttctcgacctacttttagtttatcataacctagcggaggttttgaataccagttgccatttcgtaaacactccaccatacctgtgatacatttatcctttcgaaggttattctcaaactgattaaaaagaaagataacatcttccataaatccacctgccgcactatctgggtcagtagcctgcgttgcagacaccacatatattcctttagctttgagatatgcttttgtcatcatcgcctcataaccagcccgactgaaacggtcaaatgaatagacaagaattatatttatctctttatctctagccacctctgcaatcatttcacggtatagtttaccttcaacttttgcactctcattcgtaccgccataatacttttttatacgaatagcatgactttctgcatattccgtacatatccttctctgactttctaaactgccatttgtatcagcttgccgctccgttgacactcgcgtccatacagcagctactttatttgtcaatttagaaaactctactactttctctttactttttttcttactcatcaatcattaaattaaaggttaaacgtaataacacctaatgtatagaagaactccagtatctttttttgttcttctttgtctaaaatacctattgcttgaaatttcttatcataaactttcaattcatcctcatcaaacatttgttacaaaggattatttgccatgccattgcacaacttattttcacacgttcatgcaaaatccacagagcagggaagtgcatatacatgaacgtgcttcctgctcctaacttgttacaataaaattgaatttgaagtatctttcgcggtggatttacctttcttccaagcaaatatacgacttatagattattttgccaccctattacgttaatttatactaaagcgactaatttacgaagagtatttacactcgtaccagtcaatttagacacatttctcaaagagtaatttctttttaatagtttaatttcttctttatactgttctttcatctccgatacagttttacgataaccagttttacgtccaacaaccccaccattttgtatgtgatgcacatatccgctttccattcgttgtcgaattgtagtacgttccattctagcaacttccagtaaaatagtaataagaaattgtgccattggattaatattccccaagctatccagcgtttcaatattataattctttacacataaacaaattttctcatggttaagtaattcaatcactttcagagcctccagcgtattccgtcctaagcgacttatttcaagtaccaatactttatcaacgtggttttcttttacatactgtatcagttcaatgatttcacaacgttcatcattacttttagccccactaattttattagcaaatattttcactatattcaaatcgttattcaatgcataatatttcagttcattaacctgacggtcaaaatcttgtgccattgtacttactcgtgctaaaattactgctgttttcatattaattactatttaactgtacaaatatacggttccagtttcaaattggcacaacaatcatagttaataatctctagaccagacggttaatcaacaaaatcatctgtatcaaaataaaatatgcaactaaacatttataatcaaagtaaagctattatctttgcactgacatattagaaatttaacgtagaagcgtttaggatattatctcgttttcagaatctggtaaatattacaataaacaaagtttagattctgtatatcaataaaataacatttttcctatcttgtcaaaggaacaatatagaaacaaaatcaatattttaagcgattctcggtttttcgtatttcagttagtttcatcccttgcacttgatcgcattcaaagtgcttttcaaagcagttttccgattatcgacctcttatccgaagaatgccgttcggcagttcatcgatgaattgttgcagccaaaaaaggaaaaaatgggctgtggtctttgtctcatatcttcattgaaacttgtgttttctgcaaaggtagttgcttctataaaaccataggcatatagaaaggcaaatatgcctacctaaatatagtttactttgatttagcatatataaggctaatgcacaaactaaactgaattttcaacgcatttccataatctgaccacttgcaaaatatacagccaaaagagaagaaaggttcaccgcatattttctcttttcgctgtagtttttgttttatgttatatttcctacgacgtaagcctgtctgttttactttcaaggcacattctactcaagttgtaaatgaaagacatctttcaaaaagataatggacaaatacatatcgaccttgcaaatggctgattaaattgaagtatcgtaagtgtgtcaaattattaaccaatctagtatattaaataaaactggtggatattggcagaatttacataaaaaaaacagtggatattgacatgattaacaaacaaaagttggtggaaaatgcaaagagtactatatttgcataccaaaattaacgaacatggagaaaaacgcaatattatttaagcgcaagatgtacgaccgattgctcaaatggaagagggagcggaacggtgaatcagccattcttatacagggagcaagacgaatcggaaagtccacacttgcagaagaatttgcccgtaatgaatatgagtcctacattctcatcgactttgccattgcgccagtagaagtacaggaactttttaatgatatatcagacctaaactatatattccttcgactgcaacttatctatcgtgtgcagttgattgaacgcaagtctgtaatcatattcgatgaaatacaaaaggctcctttggctcgtcaggctatcaaacatttggttaaagaccgtcgatacgactatatcgagaccggttcactcattaccgttcacaagagcagtcaggatatcctgctgccgagcgaggagacgcgggtcgatatgtttccgatggactatgaagagtttcgctgggcgttgggcgataccgccacgataccgttgctgcgtacgacgtttgaaaaacgcataccgttaggcgatgccgttcatcggagaatgatgcgcgatttccgcttgtatatgctggttggaggtatgcctaaagccgtagcagaatatattaagacgaacaatctcggagcggtagatttagtaaagcgggatattgtctcgttgtacgaagaagatttttggaagttggatgacacgggcagagctaccgcattgtacgatgctatacctgcacagttgagtaagaatgcctcgcggtatcaaatagcatcggctatacccggcgaaagagcagagcgggttgcaggcgtagtcaaaatgatgaatgatttcatgtctgcaaatgttgcatatcattccaatgatccgaatgttggactggctcttacaatggacaatgaacgttttaaaatatacgcgtccgataccggaatgtttgtcacactggctttcaaggacaaggattttaccgacaacatcatatatgaaaagttgctgaatgacaaactcagtactaatttgggttatgtctatgaaaatgttattgcgcaaatgttgcgaaccgcaggtaaacagttgttttatcatacgataccatttgcagacggaaagaaatattatgaggttgattttttaatatcggatggtcataaggtgtcgccgattgaggtgaagtcctcgggttacaaatcgcatgcatcgttggatgccttttgcgataaattctccgaccgagttaaaaataaatatatcatctataccaaagacctaaaacgagagcaagggattgactatatccctgtatatatgacaatgttcttgtaagagattggatggcactatataagactggactcttcggaatttccgagaagttcaagcctaagatgaaaattattagttaagaaccaatgacctttgaatgattcataaactaacatataataatagggtgttatctgcagaggagagagccgaattctgcagaatatcagacgaatatataaacgagttttccgggtatgttgagggcatacaccaatttgcaaatgagtatcatgtatcagacaattcggattacaataagataaccaagacgataatagatattgagacttttaccagttatgctttttgtgattgcattgttctgaacaagttgtttgttagggcgacaaatctttatgaaaaaagttttgttcgaggaaaactgaaagttcaactcaatgaaagtttcaaaagactatacgggttcaaaaaaggctataagtattcatattgcgctcagttagaaagtatcgtcactatgtttcccggattcagaagagagtttgacgaactattgtcggatttagagcaaatctcgaaagattcttggtggaaagatgtgcgggatgcagaagtacatattgacatatttaagctgtatgaactgcggcacgaagaaataaatgagagcaagattgtaatggagacttggcaactaatagatttgtttaatcacattaatcgttttatctgcagattgcatagagtctatctcaattatataacagcacagttcataaaagagaatggctatatccccagtgtataatagttatagacatagaataacgaattagtgaacagtgagatatttgttcagtaactgatttaatatagcaaatgactaaaaatataaaagatattacaatggatgaggaggagaaacttgatgctttgagacaagatttcttttcctattatcgtcgaatgagaagtaatctgttttcggatacagaaattgtatatgagacgagattaacaactgaagtatttgatttaaaactccagcaactatcgcaggataagaaacagtcagaatttgaaaattttgcgattgcggtagcttctcgtttgattacaccgaatattaaaccgcaaacaggtccggatggtggcggtgatggaaaagtagatggggaaacatatcctgttgataaagcaatatcggataaatggtggatatcagaaggtagtacaggcgaccagaaatgggctatcgctatcagcgttcaaaaaagttggcagagtaaagttgaagctgatgttaagaaagcggtggagaccaaacgcggatataccaaattactttattttaccaaccagaaaataaaatccagttcacggcaagctaaagaagatgaattggcacagcagtatggaatatctgtaagcatatttgatggaaagtggttctcatttgctgtatttgaacaaggttgtttggatatcgccattgagaaattgaatttttccgatgagtaccgtaaaaagactataaaaataggacctaacgacaaagagcggaagtcggaattaaataagatagaagacgatcttattaagcatacagtcgcggacctcgatactgattatgtaaatgatcttttgaagacttgtattttaagtcgagggttagaaaaacctcgaatggagactgaagggagattcaatcgtgctttaagagaagcaaaagttcatggtacatccatacaaatatttaatattatttacaaccatgcatggacttcatttttctggttccatgatgttgaagctacctattcagactatttaaagttaaaggattatacaaaagaacatccgaccgtacatacaatagagcggctgaccaatatcctcactaatcttgaaaatgtaatatcattgggactgtttgatacaagtaagtttgccattgaggtacaatttattaaggaattaagacagtgttccaaattatctcaaccatgtcagttgtttttagacttatacatatctgagcatagattattccaattgattaatcgaaatgaagatttaacggacgagttacagacactaacatcacttatagagcagtgtgctaattatcttgatattagttttagtgcacaatcacggatcgttgagttgctgggacgagtaatatctgataatccggaatttgagcgactcgttgatatgatcgcagacatatcttcaaaaagagagtcggaagttcagggtgctatgacacattttactcgtgctaacgccttaatggaaaaaggaaactatgtgtctgctatcaagcatttgggacattgtgtacaatcatttcttaaagaagggtgtgaagaagaatatgtcaagtcttgtggcaatatgggaatggcgttatatcatttggagctgccctatagtgctgaggcgtatttggtaaaaacagcatctttccttgtccgggatttctatgaacatggagcaattcctcatttgttgattaccgttctctcaacgctgtgtgagattgagttgatgcttggtagattggtgatgtatttgaattggagagaattgctttttattatttctcgcaatggacaagaatttgaaagcgagttatttttagaacgagatactatagcagatggtggttgggcttgtcgttttgcgatggcagacacaggtaatccggaattctctatacttcctgatatccttgatagatgtgatatgcctctttctactaattatctgaaatacgctcttggatataccgatgaagtagatgaacattttgcagaacttataactgctggtaattggcaggatttattgcttaaacagcctattcatgagcagttttggggacaattatccatagctactgacgaaacaacaacactctcaacgcttgccaataactgtagattttatgtaacatatgataacagcattcagaaccaattggttgcagaaacatttttagcctctgtggaaactatgctggcaacatttgccaacatagaattggttattctgcagccaaagatacaaatccatataaaggagacgaaagaggattcatcactatgtaaaggagatacaaatacagagtacatcttttatgtgaatcatgagactttaacagatcttgtctattggaattgcttcgtttactttatcggattctttatgtcttataacactgtctccaaagatgatgttaaaaagttgttggaagaacgtcaaaagagtgaaaagataatggatcgggtatcttcattgatgcaactgaataggtctgtatattttgttcttggcgataattttaagtattctattagcaaatggcagaatgcaaatgataagatttatccatgcttaataactagaccggctgtaaagcctctaaaacgccataaatcacaacaacaaaatatgtctgtctatacgatatcatccaatatgcaatggtgggacaatgcccaatggtctggggtaggatttgttttcgacagaaatatggaacgcccgcccgttcttgcattcctatttaaggacgttgaggaagggaaaaagataatacatgagtggaaatcaagtatagggcaaggaaaacccgatatagaaatacagataataaaaggtataaataagaatcatccaacatggtaccgtgtatgtgtagctcctgtagtatctgaggatgatagatatgatggtcgttatgtaggcataatgtgcagaaaacatactatgactccaactgattcgaagaatctggatgcatttgaacagatatatcctcgcttcgacaaatgttgtatagttgcagcgttgattagtgatgatgccaaacagcttttgaggtctattgacttcaatgagtcaatagaattgaaagttattatcacggacgcgtggcgagtgtctgctatggatagtacatgtaatgcattggaatgggacgatgatccaataattccagaagaagaaagtaaaacagctccagtcctagcattgttagaaaatttacgagaaatacaatctaaacactaatgagtgtttgtctttttacaatgagaaatcaaagcatgtgaattttatttgtcatataataaaaaacgaataagttggataagggctacgttcctgcttgcagataagatgacaacattccagacagcgtgagactgtcggggtattaggctcccccgaaaagaatttcgtggacaataagtacgccaatttggtttccgcgaatggcaatgtacttacatagagatcggaatataagaatctctcatgtcctgagtttaagaagaaatataaaagcactatgtatggtttggtcaaacacagtgcttttccattttgcgagagattcctgctttatattttcagttccttgatggctctttttattccgcagatgaccgatgtcttgttgtttctgacagcggagagtgccgatgaaagactggaagcggtaatgaaccgtgtgccgtccttggattgcaggaactgccctttatccagaacggactgccagcgggattggatgaaggagttttcgagtagcacatcgaaaaggataactacatgacgaagattattcacccggatatgaaagccctccttgcaggaaaagagagcttccatatcctcgatgcaaacctctgaaacgcaaaacagatgataagtattggcacaagacacaatacctgtcatctgttcttgggtgaagttgcagccgaaagaaagcggcggagcttttataaaaccatcggtatgatgcgcgataggtggcggcaacggttccgaccggtcatacatccttcgcagctccatacacttttcaaaggagaagtcggatgcggcaaaaagaggctggataaggtgggcgcattcgttcagcagtcccttgacgatgtggatgttcatctcgtggcaattccggcaaattgcactgttgcagttgatgtaccggtgactatttatgaagtcatccacatagcggctataccgcttgtcacccacaatcacatcctgaagatagagttctctcgcttcggaaagtaactcaaacaattcctccgctacatccttttcggtagcaaagtgggttaggtgctgcttctcttcaaaaaaagagaagactttttgatttgttctttcatgtcaattaacttgctttatagtttcaattccttgataactctttttattccataggcgaccgatgtcttgttatttctggcggcagaaagtgccgatgaaagactggaagcggaaatgaaccgtgtgccgtccttggattggaggaactgccctttgtcgagaatcctggcgattctgtcctgcgacacgggtgggtcgagttcctgcgagatggtgcggataagggatttcttattcataattaaccgattcgacaactgaatttcagacaactccggtttgtgttctgcaaatcgggcatcctgcttttcatgccttcggattttccacccctcatgcttcggttcattgaaaaaacgcctgcgtatcgacttccgactcttcgggagggaacgcggtggcgcaggacacctcacgccatgcctcgacatcctttcgctgtgcctcgtggtgcgtttcgagcgtctcgatggcatccgcacctacgggcagatgcagcggagggttttcactgtcggccgctttcacgaccagtcttcccaacacttcgggattgcccggctctcgaccgttcatgtatttcacgaaaccgctcatccgctcccggaatgcgtcgtagtccgcaatgggtcgtgcgggaagatgataggcggaattgaaattcatgaaatccgtgcggaacaggccgggagcgacgatcgtaacccggatgccgaattgttccgtctcgaacgcaagggactcggagaaccccgtaacggcgaatttgctcgtgtggtaaatggatggtccgacacccgaatatcccgcagcggacgaaatattgaagatgtgtccggcatgttgtctgcgcatgaccggtaaaacggcacgggtaacgcgcatcagtccgaacagattggtctcgaatacgtcacgaatctgctgctcgtccgactcctcgaagtaggtgaattgtccgtgaccggcgttgtttaccaatacgtcgatgcgtccgaagtgcttcacgaccgcttcggccatccggtcgaacaccgcctgttcggtattcgtcacatccaacgcatacggaagcagctgcgctgccccgtcttcgatatgcgtcgttatttctccgctgcgcgagaccgccgccacgcaatgcccggcggcgagcgccgcctccataatggcatgtcccataccacgagatgctcccgtaatcagccagactttggctgtagtatgttgttcgctattcatatttaccagtttataagaagtttgcaaaaccaatcagcacgcatgccgtcagcaagacagcgattttccaaactgacgccttctccttatagagaaaaacgccgacaaaaatcatcacgagcggtgaaaatgccccgttgagcggtacgagaaagctcaactcgactcccgaatcgacaatgcggttcatcaatacgaggcatattacctgcatcagtatagacagagccgtcggtataggtcgggtaaatccctgtgtccgcggccaaattgccgttgctcccagggagaacatcgtcgcaatcaaaaatagtccgattgtagttgcaggtaggctgtccatgacgtctacttatttcattttacctgcgatgcctatcagggcgcaggccactataagcagcgtgattttcaatgccgatatactttcctcgtacacgaatattcccagcatgctcacgacaagcggtatgactgctgaacctaacggtatcagaaaactgagtgcgacacctttgtaaagcatccggcaaaaaagcgatgagccgagcaataaggccaggatggaagccagtgtgggccagaacttcgtatagccggccgtcagtggaaagagggacatgccgacaatttgtagcacgatggctcccgaaaaaagcaatacggtcgtcggcgacgccgttttttgatgttcgattcgtttcatgcggattttcatttatttttcgacaaatgtagcggttatgccaaacatactgggtaaacaaatccgtgtttgtatgatatgaatccgtgataatgatgcgataatccgcattttacattacttttgccgaatgaaggacaaaaacggaatcatacattgcaaaacaccgcaggagttcaaccgcatcatcggagtcaagacctatcatccgttgatttctgttgtcaacttctcgcaaatcgccgaatacagccatccgcaaggctggaagcaggactattatgtcatagcactctgccgaggaaactcatcgtgcggtgtgaaatacggtcgtaacatgtacgattactcggacggtacgctggtctttaccagcccgggacagacggtcgtttttcaggagtacggagagccgttccggccggcagaggacaattgggccgtcatggtgcattccgatttcatccgggggacggcactggggcgcgacatcggaaattacgtattcttttcgtatgaactccacgaggcgttgcacctgtcggaagaggaaatcggacatgtgttgagtatttttcgtcacatcgaacgggagcttcggcaacgcatcgacgaacatacacctgaaatagcatgtgcctccatcggcttgctgctgagctattgccgcagattctacgatcggcagttcaagatgaggcatcgggaaaacatggatatcgtaagccggttcgagaaactgctccgcgattatttccattccgattccctctcgaaaaacgggttgccgaccgtgaaatattttgccgaccgactgaatctttcgtccgattacctgaccgccgtgcttcaacgcgaaacgggtatgaatacccgaaaacatatccagaatcgaatgattgagacggcgaaagacaaactggcattggacgaacgcccgataagccagatcgcatacgagctgggattcgagtatccccaatactttacccgcctgttcaaacgacagacgggaatgacgccggcggaatatcgcagacgaaagtagtgccggtacagcgttttcaaggagtacccgattatatgctatcgaacctacagggttgaggattaagccaaattttgtccccaaccgctataccgagcgttcatgtgctgttggggttatttcgtccgggacggcacgaagacgatttgttttgaaccgtttgaagcggtatactctcctaaacgggcgaagtagaatcgtcggagcggaatgtccttgacgacaaaggacctgaatccggcctatttcacgggcgggtcaagttcctgcgagacggtgcggataagagttttctttgtttatgttatttatatttcctcctactcgattaaggataatcaatatctactcaatatgtttattgctttcctatattaacaacaagtgagacctctataaattagttcactttggtttttcccctatacgcactcggattaaagtaaacctaaatctggatgtaccccgactatatgtagatatgagaacagtcctactttatatcactaaaaatgcgacgatttacattgggtcaatcgaacaatccgtttaccaaattgacagcatcatccttcttttggttgatgatttttgcgtacacctgcgtcattttcacatccgcatgaccgagcagcttcgaggtagtatagagatctgctccaagggtcagcatcatcgtggcgaatgtgtgccgggccacatggaaatagagaagtaaaatgagcactggaaaagaaaagaagctataacgtaataatctgaaaatgtgttatttctccacattgttccaaacggagaaaacgcaagaatttgaggattattgcagctgttcagttaccaaaccgttagccggacagttaccgaaaggtatcaaggtaacgcgaagcggatcagataatttgaaacgacgatatattacactggttgtcatagttttgcataccaaaggacgcttgtaaaacaggtaaatttgccactaaaattataagcgtatgaaagtagaaaaattcaaggttctgctctacctcaaaaagagcggactggacaagtcgggcaaagccccgataatgggacgcatcaccgtgaacaggacgatggcgcagttcagctgtaaactctcctgtactcccgggctgtggaatccccgcgaaagccggttgaacggcaaaagcagggaggccgttgaaaccaatgccaaaatcgacaggctgctgcttgatgtcaatgccgcgtttgattcccttctggaacgaaaggctgattttaacgccgcttccgtcaaggatgcctttcagggtagcatgagcacccagatgaccctgatgaaaatactggatgccgtcagggatgaagtgaagagccgtatcgggatagaccgggccaaagggacatatccggcatacgactatacctgccgtaccatgcgcgagttcattgaagccaggtttaagacaaaggatctggctttcggacagctcaccgagcagttcatccacgattacgagaatttcatccttgacgagaaaggacacgccgtggataccgcacggcattacctggcaattgtcaagaagtcttgccggaaagcctataaggaaggtcattccgagcggttcatgttccagcattatgtccttccgaaacagaccgtcaagacgccaaaggcattgagccgggaaagtttcgagaagatacgggatgtcgagatagccccacaccgcacgacccaccgcctggcaagagatctgttcctctttgcctgctataccggagtagcctacagtgatgccgtgacaatcaccaaagaaaacctgcatacggacgaggagggtaaattgtggctgaaataccaccggaaaaagaacgaactccgcgcaagcgtgaaactgctgccggaagccgttgacctgatagaaaaatatcatgacgatgaaagggacaccctgtttccgatgatccactacccgagcatgagaaaccatatgaaggcactggccgtactggcagggataaaggagaacctgtgctaccatgtcggacgccactcgtttgcctcgctcgtcacccttgaagcgggtgtgccgattgagaccatcagcaagatgctggggcatggcaatatccagacgacacaggtgtatgcccgcgtgacacctaaaaaacttttcgaggatatggacaggcttatcgaggctaccaaagatttcaaacttgttttataaccaccaaacaacggatatcatgagaagtacattttccatattattctacatcaaccgcggcaaggtaaaggctgacggaaccacggctgtcatgtgccgcatcaccattgacggcaggagtaccgccatcactaccggtatatattgcaggccggaagactggaacgccaaaaccggaacaacacgcacggtaagggaaaacgccagactgcaagagtaccggaagtatatcgaacagacttacgaggatattctgaggacacagggtatcgtcagcgcggaaatcatcaagacccgggtgacaagacagttcgtggttcccacccatttgttgcagatgggtgagatagagcgcgaacgtctcagaatacggagcaaagagataaattccatttccacctaccgccattcccgatacttccagaaatacctgacggactatcttacctctttgggcaggaaggacattgcctttgaggagataacggaagacttcggcaaaggttacaaggcatttcttgtacggaacaagaatttcagttccacgcagaccaaccgttgcctctgctggctgaacaggctgctttatcttgccgtggataacgagatactgcgtaccaatccggtggaggatgtcgaatatgaaaagaagcccgcacccaggcacaagtacgtcacacgtgaagaaatgaaaagaatcatggccatgcccttgaatgacggacgcgcggaactgggcagacgggcgttcatcttttcatgcctgacgggacttgcctatgccgatatcaaacagcttcatccgcgccatatcgaaacgacagcggatggcaggcggtttatccgcatcaaccgcaagaaaaccggcgtggaggccgttatccccttacacccgatagctgaacagatactggcattgtacaacaccaccgacatgcacaatctcgtgttcccgttgccaagccgggattccatctggcacgagatacgggaaatcggcgtgattctgggcaggaacgatgacttgtcctaccaccaggcccgtcacgggttcggggttctccttatttcagagagcgtatcaatcgaaagcatagccaagatgatggggcactcgaatatcagcacgacccagggatatgccaggataacggaggacaaaatctcaaaggaaatggacaaactgatggaaaaaagaagcaaacaccgcacacattccggccatgacaaccaatgacagtttcgcagccgcctgtctcctcgccgtccatggaagttagtacagacttttctgaaagcggaaaggtcaggcggctgtgccgtttcgggcagaatcttcctttgcgggcaaagggtattcagcccgaaaacctttcccctttcacgtctgtacaatggacgccgacggcagcggaaacaagcgactgacggaaaagtcgatacaaaaacaaccccaaaagaaacagcatacagtctgtattatataaccagtctgtatgctgttctgatattctataataggagggatattttttgaagacagcatgaaatgggcaggcggcaaactgcgctccctccagaaaaatcaatccgctttttcgacctcctgccaatacccgcctttgtccggcctgattcgtcggagtgtcccgtccgctttcaacctggcaatctgtttttccacggctttgggggttattcctatccgccgggcaagtgctgttgcgctcagtgtattatcctgtgaaagcaaggcgatgattttctccctactttttacatttttctccctactttttattttgccatcacattatgataaaagttgcttttatccgtaatttctatactcagaggatagtttcacggaataaaagcaaccttatggggttagaaccaagtttttctattctgattgtacgcttccctgtacccgtccatcagcacccgttcaatgtcggaagccctgtacaggatttttcctcctacccggatatatggcagtatgccgttgttgcggtaatcctgtaggctcctgcggctgaccttcagtttcaccgccagctccttgtcgttgtaatagcgttccccgtccagtgacggcttgttgctgtcgcatattttctccaccctttttgaaaggtcttccagcgacgagaaaaaggctctcacacgcatgtcgttttccggtgtcagcagccggatgttgccattgtcattcataagcacgatatttatgattaactgtatcagtattacaatttcttcctttattggctacaatacaccgtttcatctccaccacgggaaagacagtcttcacatcctccggcctgtaatacaccttgtggcttatcttggtgtaagccagcgtcccattctcccgcatcgtctgtagggttctcggactgataccgagcagcctgcacacgtcatcgctgtcaagccattccctctctcccagatcctcatgttcccggtagagacgttccacctttcccgcgaaattctcgaactccgagagcatcctctcgaaagtcgccttgtctatgaccactacttccatattcctgtaattttaagtttaacattgattttttattgtaaaaacggaatggcagacagatggtatctgaaagggattcatgtgcccgtaaaccgtttcggaagcgaagaaaataaaaaaacgggaatcgcctacaaaccggacggcacgtgtctccaacagacattctttttcaccgtcaggtgaaaaaatcaaaggtggaaacctcaaaggacacccttatttctttgaagcaaaggtagccgttccccaccggggcgcaaggctgggccctgcgggtcggctgggaaaaaatcatcctcacgctccgcgctccggtattttttcctgccgagccttgacacctttccggcgggagaacggctgtaaagcatacaaagaaacaagagtgcctgcaccgcaggccggatgtctaacagataaaaatcaaaggatatggcaacaaaagacgtgaaagaattcaacggatggttcaaccgttcatacgcgagactgaaagagagcgtgtccctttatggaaagatcaacgaggacgcgttccatgacgcgtatctggcagtcaggaagcaggtgatgttctcaaacaacggaatagaggacttggaatcctacttcttcgggtgttatcggaaaatcctgcaatcgggaacaagggaagacagccgttacgacaaccccggggacgagtatttctcaagactgggtgaggcggactgcacggaagagaccgatgagcgggaagagatgcttaccgggtgcgacaggctggtaagggacatacagaaattcctcaggcggcacttctcctacgaggattacaggatattcatgctgcggttttacgagaccggcagctcgttccgtaccatcgccagacacatgggcgagaaaacatcggtggtggcacgtagggcacagaccatgatggaatccgtccgggcgaaccggagattcattgcccaaagaagactgattatggccggcgaggcggcatgacagaaaataaatgtatcactaaaaacatgattgattatgaaactgacagtttatgacaagagcaattcacatccggcactgacctacaagggaaaacggatcatcacggtatgccgtgacggcagcatgtacctgagtaagatattgagcagggaacttaaactgcacgccggaaaccggctgggaatcgccagggacgatgacaggccgaaagactggtacatgttcgtatcggatgacgaaaacggcttcatgatatggaatgacccacgttgcgcccgtttctccaacagcttcatagccggaatgatactcgatgccgcgaaggtggagaaatgtgccggatttatggtggcaagggagccggtgaaggtggacggaaagttctgttacaggataatccttgacaatccgataccgaaaggaaggagagccaccggtacgagatgaacacgggaccgttaaagagaaacggggggggcatccggctgaaggaagagattccgacagccgggtgtcccttttctcatgcggccacatgtagaatcataacggtttcaggttgatacggctgctgtatagggcattcagctcgtcacggtactgttccaggtgggccgagaggatattgtctatatagcacgagatgctgacggtcggtgctatcacggaaagcaggatgcgcacccgttcgtagttgtcactgctgacataggtctgtcggcgctcccttacaacgttgttatcaaacagatgttcgggataatcctgcaagccgttccttttctggcgtgttttctctcggaggaccggggtcggtacttcttcaccggtagatatgccggaatcttccactttgtttggtacggcaggaatcccggattgattttccgtttttggttccttgccaccttctttgggggagtcggcagcgttgtttccatgatttttttccatgaagacggcaggaatgtccccagtcatcatgtcgcgtatctgctcctcgttgattttaacctcttttctctttgccataattatatattttagatagttggacaattcttttccggcaatcttgcatttccctcatgtcgtgaatgcgaccatatgaccattcccgcatgtgagtatcgctgaacgggtatgtacatccaccaaataagtcggtcacgtacccaatccctcatgtgttccgtccggcattaagacggtcacgcattcatacatgggggagtggacgcattattatgttcttatatgtttccgttcacccgttacccaatgggcggatgcaataatacaccccgtacttgacgaacacatggataattgtgcgaccggacgcgttctgacatgcggcaaaataacgataaaatttccggattgccactatcatggcggtctgctgacggtctgtgacaccgtgtgtcatcctgttacaccgcccaagtgtctcgatggctccagttttgggtattcaaggaatgataaagatggcggtagaaggggtttattggcggaaagcggatagaatgccacattttgatttttcggaagaaaaattcatgttcaagcgaacatggcaagttgtgttttggggcacccgaaattatttccggcaccccaaaacaacttgccactcgcctgaaggctcgggacgggcttcactccgaagtcgttgcgcctgaagacggaaaatcaggaacaaaaacttgaaaaatgaccgtaataatatatacagtcggcctctcaaaaaatggccgctactgaaaagagaatgaactttattcgtgttttcaacctaccgcagtccgtattttttcatcttccgatacaatgtcgcgggatttattttcagtaaccgcgccgcttgttcacgatgtccgttgcatatttgcagggcttttatgatggattctttttctattttctcgtctttcaatggtaacatgatagaggcgatctccccattcgtgtgctccatttgacctcctgtatttaactcaggaagttccaataaaggattttccgaaaccagcacggcacgcttgacacggttttgcagttcgcgcacgttgcccggccaccggtaggcaagcatcctgcgtttggcatcctccgtaaatccccgtgtctcccttttcagttctttcgagaagcgttcacggaaaaactctgccaacgggaggatgtcttccgggcattcctccagagaaggctgccggatatcaaactcgttcagacgatggtaaaggtcttccctgaaccgcccctccttgatagccagttccatattctcgtttgtcgcggaaatgaccctgacatccgaaatccgttccctgccgctaccgatcggggtatatacattctcctgcaatacccgaagaagcatggattggatttcatgcggcatggtgcctatctcgtcaaggaacagcgtgccgcctttcgccaggtcgaaatatccgctctttgccgtatccgcaccggtgaacgcgcctttctcgtgcccgaaaaacaacgaggcggccaactcacggggcaatgcgccacagtttacggcgacaaaaggcttgccatatcgttcgctgttgtcatggatggtctgtgccaccgattccttaccggtcccgttggctccgagtatcatcacggacatctcggaaggggcgaccagtctggcaaacttttccactttcaggatcatggggcttgtgcggtgaaacaactgcctctcctgctttctcacggtggctacgggatggaatatatcttccgccagttccaacaggtaatccctgtgtaccggtttaggcaggtagtccctggctcccagtttgatggtgcgcacaacgtccgggacggaaacgtattcggtcgttatgatgaacgggatgtccttcttctccttgcgcagccattccaacagggaaatgccgtcgccttccggcaaccgcacgtccgacaatataaggtcgaactgcgttttgcgtatcagcgagcgggctatcggctcgttcatggctgtcaccgcttcataaccggcttgggaaagccagtctttctgtatttgtgacagccccacattgtcttcaactatcagtattttccgtttcattcgtcagtctttttatctcggcttccgccgccctgattagcgtggcggtgctgtctattatctgctgggtatattcatttaactctttgtcgcttgtttctctgtccttcagaaaagtacggtaagccagcaggggctcttccatccgcagtaactcccacatcggttgcatcctgtgggtgatttcacgcaacttatgccggtcgctgttttttatggcggcatcaagttcctccctatccttttccgactgggatatgaaggaaagcagtgccttgtacttgtcactgacctcggaaagtaccatgttgaaatcaacctccggcttttcctcccgcctgtctgtctttatcctcgaaaacagtccgagcagttccgaggaagaaaacggcttataaatgtagtccgtaaatccggcatggagaaaagcctccttgtccctgtcaccacgcgcggtcatggcgataatggggatcgtgcgggagttcccgatattcgaacgacgcaacagggtcagcaagtcgaagccgttggttcccggcatctgaatgtcggaaagcaacaggtcataatccttgccccgcatcgccttgactatatctttggtggttgtgcaggccgtacaattcatgccgttgcgctccagcatttcctttatcacgtccagtagcatcgcatcgtcatcaatgacaagcacattctgaggcagatgtgcagggtgtggtattgtcaggctctcgctctctattgtttcatccgtggttttcaatgggagcgtcacgcggaacgtgctgccacggtcaatatcactcgtaacgtctattgtcccgccaagcaggttgacaagaccttttgttattggcaggcctaatccgaaaccctccgcgttcctgacggaacccaatcgttcaaacggacggaatatacgagaaagcgcatctttactcatgcctatgccggtatccttgacttccaacagcaactttccttcgttataacgggcattcaaactgatcgtgccggtttccgtgaatttgacggcattgctgagcaagttgtccagaatctgctcgatacggtccacgtcaccgcaaagtttgacatcggtatcggtaaagtcgtggctgaacaggatgcctttgttgttgaccacatgggagaagccaaaggcaatgcgttccaacagggcgttcaggttgaacggcacatcgttgcgggtttcttttgcctcgttcaggcggtacacgtccagcaggttgttaagcagatgtacaatatgtcggcacacgatcctgatgttgttcaggtgcgtgtttcttcgtttcttttccctagtatccacggcaagttccgcgctaccgctgattacgttcagaggggcacggatgtcatgggagattgtcaggatgatattcttccgcatctctaacagcgcgatgttctgctctatcgtttcctccaggtgtttcttgttttttgccttgaccttaatatcccgttgtatgacaagatatgaaatgaacaacaggatgattgagaatataatcaagccggtaatgaccaaagtcgaatgttcgtaggatgctttcagacgcgcctccttgtttcggaaagcagtccatgtctgttcatccagacttgtaatcagcattcgcagtttacggttgagttctttgttacataaccgcaggctgtctgtataggcatctatgtcccgttgctgttcattcatcaaggaaatcaagtttttatccaacgaggtttgccgggttgtgacaacgggtatctgtacggtttccttgcctccgaagaatccggcgatgcctttctttttacgggtaactgtccgggtagttgtttgtttcgtcacggttggcttcagattgaacaagagagtgtctgttcttttttgtttccgtgaggcttccatgatttggaacagatgctcttctttggcggctaacaatgtgcggagcgaatcaatctgagcgagtcgtatgaaatcctcgcattgcactcgtaagatttgcagcatggaatcggtctgcacacaacgtttccggtaagccagggaatcctcattgttccacaccaagacggattcgccataagtcaccaatgcggtaacatagcggtgggcggtgttgatgtcatattgggtctggaaaatggcgattgattcgttttctatcttctgtacccggttacgctcatggagaacaatagcgaccatgctgccgatgatcgccatcaaaaggaaatatccaatgaatatcttatgttgcaacagtatcttcattcatctttgagttttttacaatccatatactcatttcataaagtacccacatcggcagggcgaccagcgaaagcgtgaacacgttcgatgtcggcgtaataatcgcagcaaccacaaggattatcacaatggcgtgtttgcggtacttgcgcatgaaatcagctgaaaggaaacccagtttggcaaacagccacgagaggatagatatctcgaagataacacccatcgcaaggcacatcataacgagtgttgagatatacgaatcaaacgtgatgagattatccacatcaccgttcacctgataagttcccaagaaacggaatgtcagcggaaagattaaaaagtagctgacgagtacccccagagagaacatcgcatagccacctccgaccatttggattacatatcgccgttcattatcataaagcgcaggagatacaaatcggaacagttggtaaagtatgtaaggagaggtacacaacataccggcacacaatgccgtcttcatgtgaatgatgaactgctgagcaaactccgtgttgataaacctgattgagaatggaggtatgctgtttcctgtccataaaattattcggttgagtaaccgataagtgatgaatttaccgtttttcggagcaagtataacatcaaacagctgctccttgaagaagaatgccgtaataacgaacacgacggttacggcgacgatcttcatgactgtcatccacagaacctccaaatgtttcctgagggattgtatgctcttatcagttgccatatacttacttcttttgttcggagtcattgatttcgtctatctctttttcgacattgttcacttcgtccttgaaggaacatactcctttacagatactttttatcagtttggttatcttctatccatcgaaaaagctgtagaacaaccaatgcaaaccatacttcttgcacatctatcccactaataattaacatagtggtgtcatagatttttatttagtgtcggctaaataaatatttcgccacacatagaggctaacagatatagcctcttatgatgacgaagttcggttagagtaaaataaagtctctttaaagaccccatcacgttcttggcaaaatagcacatgcccatcctgcatcgtactgtgtctggtaattgggggcttatgatattgtcgctaaaaattatttattaggagtttcccatttcttcgtatcgctgcattgaattatgatttgctcactgccgcaagtcattctgaattctcctttttcgagtatccattttccgtcgtaacctacaaaggcgaggtcgctgcctttcaacttcagactgactgtccgggtctcgcccggttgcaacgagactttttcgaatccgcgcaaacggatgttgtcaggtgtaagactggccaccaagtcactggagcagagaagcacgctttcttttcctgccatcttgcctgtgttggtcacatcaatactgaaaacaagttcatcatcagcggtgaaagaagaacggttcacacggaagttgctgtaacggtaagtagtatagctcagtccggcaccgaatggccattgtacatccattacagcatcgtagttgtaatttccgtccatttggcctatgttttcacaaggcttgtagtcataagtagctagtgagttaatcaaacgaggataagtgaacggcaatttaccgctgaaattcgcatcacctgccagtaggtttgcaagtgcgtcagccccatagttgccaggcaacatgatatgtaccacagcttttgctagcggaacaatttcattgataatacgcggacgaccttcgttcagcaccatgacaatcggtttccctgttttagccaaagcttttatcaattttttttggttacctgaaagatttaaatcagtcagattacccggtgtctcacaataagagttctctccgatgcaggcgatgataatgtccgctttactagctgcttgtactgccttctctatttccggttggttctcctgccaccacagagagcctttcccggtgacataggtaacgcctggttcataaataatatgatttctgccatatttattgcataaggcttcgtaaatggtatgataagcttctgcacattcatcggccttgtcaccttgccaggaatatgaccatcctccatttagtgaacgcatggaatgggcattgggtccggttagtaaaattgtttttccttgagctaagggaagtacattttcttcattcttcaatagtaccaatgactcttcggctgccttttgtgctacttgggcaaattcactgctgccaaatttattgtattcttcaatattccaataaggattttcaaacaaccccaaacggtactttaagcggagcacacggcgcacagcatcatcaatacgactcatcgatacctcaccttcttccactagttctttcagccacgtacaaaaactcacctcataaggaaccatggacatatcaatgcccgcgttgatggcaatcttgatggcttctttcttggtggcggcaatgtgatcgcgggtacaaagattgttaatatcggcccagtctgttacaatcatgccatcccagttcaaatcctcttttaaccatccagtgagcagttccttattggcgtgaaaaggcattccgttgttcacacccgaattgaccatgagagttagcgcaccgttgcggatacactccaaaaaaggagcgaaatgtttttcgcgcaaatcaatttccgaaatggaagagggagtacggtctttgcccgaaacaggtacgccataccccataaaatgtttcaaactggttgccacatggtacttgtctattcgattcggattttctccttggaatccttttactgcttcgacggccatttgggcattgacgtaactgtcctcaccatagctttcccacatacgcggccagcgcggatcgcgtcccaggtccataacaggagcatatgtccaagggatacaacaggcttttgtctcgtaggcagatatttcgcacgaacggcgtaccagttcgcggttgaaggtggccgccatgttaattccttgtggaaagagggtaccgtcaagggtataggttgtaccatgaatttggtctacaccatagatacaagggatgccaatctcttgtaatgacttttcttggatttggcgaatagtttccgcccacttttctttggtctgtgccacactgaggggaacattcaggatggaacctattttgtatttcccgatgacggtatcgagcaaggcttcgctcaacttaaagtcattcgggctgctgaaatcggttattacatcgatggtaatttcacacatctgtcctactttctcttccagggtcatctttttcagaagagattccactttcttttctatccgggcatccgaaggaatggccggttgcacttgggcacatacgtttgttgccatactgagagataatactgttgctactaatatatttttcatgctggtttaatttatttgtttaccaatgatctgttctgaatggaatgacgggcataccgcgatgattctttaaattgccgggttggaagttatgaaagcaataacgcacagccaccggatgtttcactttatccgaatgtacccggatggttttcttttcagggacgagaacggctacggccggataaaacactttatctgctccggctatctcgaaaccttttatatctttccacggactcagtccttcatctgcatggtgaaaaatcagttctactgtgtcactttgtatactcatgttccaataagaaggatattcgcaggctatgcttccatactgataggtcttgttcagtgcaagataagccaatcgtttgcccacttcttctttttggcagggatgaatttgcgacttttcgtaggcataaaccaaatcgttagtacataccataccgctattgggaatgagagaagatgcttggaactgtgcttcgcgtaataatgctccgctgattccttcaccataatcatatggagcaatttctaccaaataaaaaggaagttctccctttccccactctttgcgccaaagctcagccatgattcgcagacgttcgacatatgttttctctttacctacgttcgattctccttgataccaaagaaatccacgaatggtatagcgttgaaggggctttagcatgccgttatacataactgtcggtgtatagtaatcccattctttccctttttctggcttcttgatttccttttttaagtcaacatcccgaaaaccttccactacctcacgaggcagccagccttctacacgcgagccaccccaagcgcacgagataatgcctactggtacacgaagcacccggtgcaacatcctggcaaagttgaaagcggttgcactgaaataaggtgcgttgaaaggattgctttctttccaactacccgctacatgttcttggggagtcaatgcaccggtcttgggaatggtagccatacgaatagcgttccattcgccagaggtggctatcgtttcgttagcatgctctatcggacaattccagaaaccgttcagcggcatttccatattcgattgtccagagcagaaccaaacttcaccaattagtatgttttggatgcgagttatttctccatctgaaaactcaatactgtatggagtgaaatcggcggcaggagtctgtatgcttacctgccatcttccttcattatcggattgagcggttatcgtctgattattccatgaaggagttacgttgaccgtagtgttcggtactgccttaccccatagcttcacttctgtctgttgctgtaataccgcatggtcgctcagaatttggggtaaaactactttggctgataaatttcctccgaagaggtacagcatacaaagcgctatgattattcttttcataccttttcaatgtttaaaatcgttctcaaaaataatgaatgacagtttttaaacaaatctttccataatttccatacacatgcgtccattgtgataaggacatttccaaaatcccgctttgtcttcatttcgattcacactgccgtcggctcggagactccagtaccattctccattctcgcggtctatcaaattccgtttgacgaattcccaacactgtaaggcacgggataaagacagtttgtcatcaaaatgctgatacaaattgatatagcccacaatggtctctgcctgaacccaccaatggcggtcggcatctattgaagccgtgtccacattttgttcatatagcatacccgcagtggttagaaaaccttcggtgccagcttcggcaatgtcaatgatacgaggctccacttcgtccaatagtgttttgtcatctagcaccatggcagcttcgtgaaggagccaggacgcttcaatgtcgtgtccgtaggagatgatatggtattggctttcccaatcgtcattgaagaagagctgtagatgcgatgtgtctgtatccagtatgcgatcgatgaacaagcgaacgaggttgtacagctgatgtttcaggtaatcgtctttccataccctgaacaggttggtgtacggctcaagaatgtgcaaatgggtattcatggtcttgcgttcgttggcatccttgttgctgagacgcatatcatccaattcttcccattctcgggtcagtgcttcgaaatatccgtttttctttcggtcaaagctgtgcgcctcaatgtcgtgaaacaaacggatggcgtattccaacgcttcgttgtctcccgtagcacgatggtattcactgagtccgtagatggcaaacccaatggcatagatctgcttcttggtgtctagcgggcggtcttcggcactgatactccaataaattcctccaaattccttgtcgtagaatctgtcgatgatttcacgcttggcacgggtggcagtttccaaatattcaggcttatgcaataggcggtaagccgaagagaaagtccaaagaatacgtgcgttcaagatggctcctttctcagcttcgggcattaatacctcttgtccgttgatgcggccatagaatccgccatgttgtacgtctatcattttatccatccaatagggaaggatgttggtggtaagtatttcctccacctctttcttgagttgaaatatcgttgtttccattctctttttcataatcaaatattaatttcttcttcgttcttccagctcttccgtgatttccttcattttcttctcggacagcggatagagactgatgaacgcgacactcagcacggttcccacggcaggcaggaaactcagaaacattttaatgccttgaatggcctgctcgttttgcacggcattggcccggaaaccgaaataggcaagcagccagcccgtaacggcgcttccgatggcccaaccgaacttctggctcatggacgaggacgaaaagataagccccgtggcgcggttgcctgtcttcagttccgagtagtccgcacaatcggcatacatgctccaaagcaacgggaaaatgctgcccgcacaaatgctgatcagcacctggaaggtgaatatcagtgcgatgtcgtcgcggtcgagccagtagaacacgatgctgagcagcgtggcgcatatcatggaccacatgtaggtctttttctttccgatgcggttgctcaccggggcggcaagcatcacgccgatgatattggcggcttgcccgacggccagataaagtccgctcagcacaaaggacagtccgaacagggaaaccgtttcatggttctcttcgacgatgaagtatttgaaatagtacaccgtggcaccgtcgcggatggagttgaacaccagggcggcaatgcccgcgcccagcaatatccaccaagggcggttgtgaaacaagtccttcaagtcttcttttaacgggttttgcacctcctttatcggtttcacccgttcgcgggtcagggcgaaacagccataaaacaaagcggcgcacgccacggctatcaccaccaccgccatcatccagccgtattgttcgctatgcccccggctgaacacattcaccatgggcatgaagagcaacagggcgatgaagctgcccaggtaggcgaacagcatgcgatagacggccagcaggttgcggtcgtgcggatcggcgctgatgactcccagcagggaggcgtagggcacattgatggcagaatagaccatcatcatcagcgagtaagtggcataggcatagatgattttggcggtcaggctccactgcggagtggtgaacgtaaggatgccgatgagcgcgaacggcacggcaagaaacagcaggtagggacggaacttgccccggcgcgaatgggtccggtctgccaagatgccgactacggggtcgaaggcggaatcccatacccgggtgaccaggaacatggtgcctaccgcggcggcaggcataccgaacacgtcggtataaaatatcatgagataggaaccgaagagcttccagaacatggacgaggccatgtctcccagtccgtaacctatcttttctttgagcattatcatggtaattcgatttttatggatgattatcggagtcgatagtgcttcttccgaagaaaaagtgctgtcgattgcagtcaacggtgctttttcttcggaaaaagcactatcgacgattgtcggcggtgcttgtcgggcgtttttcattcccgcatcagccgaaggttcttttctatctgttttttcaaggtctctaccgaagccgatgaacagaatccgtctcggggcgtgttcatgcaatagtccaccagccgctccacggtagaagtcgccacatgcatacgggtatcgctggaagcataatagatgaacacttttccatcctcgtccgcaatccatccgttggtgaacagcacgttggatacatcgcccacgcgttcctcgccttcgggtaccatgaaagcgcctgcgggcgaggctatcacgcgggtaggatcatccaaggcggtcatgtacatatacaacacatagcgcaaacctgcggcgcaaccgcgcacgccgtgtgccagatgcagccagccttggggagtcttgatgggatgaggtccttcgccgttcttcacctccttgatggtgtggtaatggcgttggtcgatgatggtttcctcggttacttccgcttgcgtcatgtcatccaccaacgcccagccgattccgcctccgcttcccgcatcgatgaatccgtcttgcggacgggtgtatagggcgtacttgccgtttacgaattcgggatgcagcaccacgttgcgctgttggctgcgcgtcttcaggtcgggcaggcgctcccaattcttcaagtccttggtacgggcgatggcggcggtggcggtagccgatgacaaatcgcctgccggagcggaggggtcgtggcgttcggcacagaaaatgccgtatatccagccgtcttcgtgcgccgtgagacgcatgtcgtaaatgttggtggcgggaatcacatcttcgggcatcgtgacgggatagtcccagaagcggaagttgtcaatgccgttggggctttcggccacggcaaagaaagacttgcggtcggctccctccacgcgcaccaccaatacatactttccgttccacttgatggctcccgaattcagggtagcattcattccgatgcgttccatcaggtaggggttggtcttctcgtccaaatcataacgccaaaacacgggcgtgtgtgcggcggtcagtatcggatgcttataacgggtgataatgccgttttctttttcctgcggttcattacgacgtgagagcaacacttcatgcccatcgaacaattgttttactttatcttcgaaattcatatcttctcgtttatttaaaggggtgttatttctttgttttcatatcacggacgaacagcgtgcgcgggtcggcatggaacttcacgaagtcattggccgaagcttgtccggggtaaggggcatagtaatggttggggcgttcgcgtgcgttgcgccacaccaatacgtagcttatgggatacttgctaatgaccggcatcagcgtttccgtccaccaggtagagtcgggcacggcttcgtatcccgtttcggtaacggcggtcggcttatcgtgcgattgtcctacttccgtcagtatggtcagcgccttttccatattgttcagatattcccggcggtcgaactggtacgtgtcgaagcctatcaggtcgatgatgtcgtctccgggatagcgttccagatattcggcggtattgttcggttccgttcccggcgaataggcataaagcaaatgcttcacacctttctgctgcatgaattcataagtcatgcgccacaaggctttgtattcggtggcgctgcacagggcctgtccccaccagaaccagcttcccgtatgttcgtgccacgggcggaacagaacgggcactttccgtccgtcgcttgtggtgagcgagttcataaaatcggctattgtgcccatccagcccatgaacttatcatgttgcgctcctcccggcagcaccgaggccacaacggtagagtcgcttacatcccaagcgtctttccctgtaacaggattgtccgtatgccaactgagcgacaccatgccgccgcgttcatactgtgcgatgatttcgcggcgaaggcgttctatgggaacattgtccaggttcttgtcgccgcccagttcaatgcgtcccaagtcgaaggacatcatggcggggtaatctccgcatacgcttttcacatcgctgcggttctcgtctccatcccacccgatgccatatacagggtcgtcgtgatgaccaaacaggaaatggttctgccgagagacttctttcagttccgtaagcatctgctccgcttcgggagtacgccccgaggacgtgtttgggctggtgcaggcaagcattccgcctgccagcaccacgattgttatcatcattcttatatctttcatcatggcttattgttttttctcgattcggatattggcaaaactatgatctgtgttccagtccgagttgggctgcataatccagaagagattgttccatccggcattgattccattggtagccacttccgacagctccagccgaacggtacaccagttgccataagtattaaaacttccgttagcagagggattccaagcatattgccctccgttcagctgaatgagataaccgacagaagcggaatcgtagaacggattgccgttggcggagtttacttcgaacttgaaccaatagtccgaaggattggcagcggcttcggccgggatgtcacatcctccgcacaacaggctgttccaactccatgcggcatacgatcctttgacgcggaaataagaaccgttcaaaggagcgggctcgttggatccgtttccggtagtaatcagttcggttcccgcccaaaagccgtaggcgtcaggagtgtccagattccaaagaataccggttgtattgcgataaggaacactgactgtctttgttccgcttgcactttcccaagagaaaacgatcgtagagttatccgaagtattttcgggtatgacaatggacatatattgttcggtcaatgaatctacttccaaggccactccgttcatcgtgatggtggaggattccgtgccgcccccgaatccatagaggtcgaaataagcaccgtttactttgatggagcttcccggcagggcaaactcattatacaatcccgagatactgacttcgggaatctggaccgtaaagtctaccgaggtgtttcccaattccgtttcatagtaaagcttgttgttcacttcaccggggatggtgcggggtatcggaaaatagacggcatgagcggtggcatagacttcgctcagtgctatctctacatcattcagcatcacctttcttgcgtggctcagattctcgccggtcagcttgatcatgtcttcaaaggctgctccggtgagtggagcagtcatttccgtatcgtcggcacgataaatggcggagatggatggagcaccgtttgaagtcattccgtcatcatatccatcattataagtcactatatcctggcaggaaaccagcgttgctgtggcagcggcaaacatcagcccgcagacagctatattcagctttttcatattctgtttattttttgattgtacgacaattctttttctatgtgtttagctccagcccgggttgttgctgtcaatggcatcgttggtcgaaatctcggccgacgggatggggaaaagcaagtgcttggcttcacggtgtttgttcaccgatgcttcatcgtagttggttttcgtaccgtcttcgttggttccgccaatggagttcatgacatccagatacagtccccagcgaatcaagtcccagcgacggtcgccttccaatgccagttccttggcacgttcttcaaagatagccgaacgtaaagcgactttcgaatcaatggcaccattgcccgaagtgacagccggattggcatttgaacgggtgcggatggcattcagggctttgatggcttcgctatcaacaccgctgcccaactcacacatagcctcagcataaatcagcacgatatcggcatagcgcaggaacggccagtaggcatccgaacgctctacggtggggtcggttacatcggaatacttggtgctgtaggccaatgtggagctgcttacattgaaggtgtattgcacaccgtcgttgtagggagccacaggatctgccactttgtttccgttttcatcataaccggttgccatgagtttgtattcaggcgtattgggataatagaaaccgtaattgtcgctggcttgataagaatagcgaaaacggtgtttcacacctttggtgatacgataatccttgctgtcgaacagcgtgtaccaatgataacggttgccaatccattggccttgctgaatcagaccttgggcattttccgttccactaaaccaacggtgaatggtattgccatactcttcgtcgttgttcaaggtttgcagcatgaacatgtgctctgccttgttatagttgctgcgtttccacagttcatcataaggaagcaagtcatagctgccgtactttccacccatcacgtccttggcatattgtgcggctttggtgtaacagtctttggtgtcgaaactttcatatccggcgacttgcgtctttctgaaagtcttgctcgtggggagaaccagcactttctcaccgttattgaactcatagctggcaccggtctttactatcatttcttcgccggcagtcatggaaccggaagccatcgtgacatacactttggccaagagaccggctgcggcaccctgtgctacatgcccttcctggaaatcgacatctgtattcttgtacatcacaggtaggcggtattatccgtgcacgtaatgctaccttcctggaaatcgacatctgtattcttgtacatcacaggaatggcttcttcaagcaagcggatgatttcggcatatacctctgcaatagggcggcggggctgttcataagaagcaccttcgctgatagccacattgaacatcggaatatcgccgtatgccttggtgagcatgaagtaggcaaaagccttgttgaacttcagttccccgatggcgttggctttgaccttttcatccgctcccgtaatttggttcacatagtttaaagctacattggcccggttgattaagctgtagcaacctttccaaacggcatcggccacttcgtctccttgaaagttgccggctcccagattactgaatgcccaatcgggaccgcttgtataatcacagtccatttcgaggacacgggggaagttctgccaacggaacatgtcattggcccatttactatatacgcctgtcacccaaagattcacggcaacattgtcattacctacttggtcgggacctacgaaagcgtacggatcttcggccaaaaaatcatcgcaagatgtaaagctacccattaaggcagcagaaagagcgacactgagaaatatatggttgaatttcattgttctttttcttttaagttattgtttgctattgatatctcacaatcaaaaagtgaccttcattccgatggaataagtccggctgctcggataagaatagatatccactccacgacgggaagcatcggaaccgaaggcgtttacttcggggtcgaaccagctatagtccgtaatggtaaacaggttggtggcactggcataaaagttcaagttcttgatacccttgaaaggattggcccagttatagccaatgttcaagttcttcaacttcaggtaagagccgtcttccacataccggtcgctgataagcatattacgttcgtagcttgatacggctttcggccattgggcgattgcggttgtttcaggagtccaacgggtgtcgtaagcggcttgcggaatgttggctacattacccattttcacatccatcaagttaccgttgaaaatgtcgttgccctggctgccctggaagaagaaactcaatgtgaagttcttccaagaaaagttattggtgatgccatatacaaagtccggattcgtgtcgccgatgataacacggtcggcattggtgatggcaggattatcatcgaaattgcgatactttatttcgcctatcattttctgtcctttggcgcgaacggcgggatcggggtcggccatcacttcagccagattgtcataaaagccatcttctacatagccaaatatggtaccgatggggcaaccgttgcgttgcaagaacacctcgtcggccttataccacaagcgggtagcgaactggtcggcttccagaccgccgatctggttcttgttgaaagagatgttggcatcaatgttccacttcaacggtgtgttttgcaacaggtagaatttacctgagatttccagaccttcattggttacatagccactgtttaccatcatgttggcaaaacctgtactcaaagggatcttcacttcttgcaacaggtcgcgggttttcttgtggtaataatccaccgtcagattgatgcgtccattcaggaaacccatatcgaggcctacattgtattgtgcagtcgtttcccaacgcaagtcatcggctaccggtccacgccagtctacttgggcaaaaccgctgttgatgccaccggcaaacggataattagcaacactcagcataggcagggtacgatagctgccgataccttgattacccgtttcaccatagctggcacggaactttaaattgctgaagatgttcaagtccttgataaacttctcctcactcatgcgccatgcaaaggcacccgaaaggaaaccggcccatttgttggcatcagtaaacttactggaaccgtcggtacggtaggaggcggtaaagatatacttgtccagcaaggtgtaattgatacggccgaggaaagaagccaatgccgcatcgccacggtcgctttgcagcttgccgggcttggtaccgaggctcatgtcatagtcttgtgtcaagtcattgggaaatccggtggcgctcattgacttgctgccccaattggtcttttctgccgtgaaacctactacggcattgatgccatgcactccgaaagtcttgtcaaaagtgaacaaagattcggtcgtgattcccatgtaccaattgtccgattgtcctgctttaccgttgatgccgttctgtcccgatccttcttgggtttgctgaccgaagtaagtaccgcgattgtggttggtataactgatacctaaattctgacggaatttcaagaaagggaacaacttgacttctgcatacgatgacgtgaatacattgatggccttcaggtgatcctttgtatcattgatgtaagcgtatggattggatgccagccagctcaattcgtcattggttgtctggtccatgtgtgtcgggtcgtaattgggcgggaaaatcaatgacgaacgaatcacaccatagtcattggagtttgttttgctgaaatcggtttcagtgtgggtaaagttcatgttcattcccatttccagccatttgtacattttgcgaccgatgttggcacgcagtgcataacgggtaaaaccggactctttgataataccatcctgattcaggaagttaccggagaaggcatgccatcctttttccgaaccgccgcttacactcaagttgtattcttgcgaaaagccgttctgataaatcaggtcttgccagtcggctcctcccacccaagtctggttgccgtattcatcggtataataacccggattacggtaatctttaggagaaggcaggtatttgccgttttcataatccagtgttccgttgggcaatgaaggatagctccacattccgggataagacagttgggcataaggcttgccatcgtattggtagctgttcaggtcttgttcgtttatatagctggcgtaagtcgcagcatcaagcaccttcactttgttggctatgcgtgaaaaagaaaaattacttgaaaattccacttgctcataaccggcttcgccccgtttggttgtgataatcaccacaccattggctccacgtgaaccatagatggctgtggcggaagcatccttcaacacttcaatgctttgaatgtcgtgtggattgatgaacgacaaagggtttgaagtgttattgttgttctgattggcatcgctggccggagtggaaccggcgtcaaaaggaactccgtccacaataaacaaaggctgcgaactggtagagaacgagttggttccacgtacctgaatgcttactccaccaccgggagcaccatcggcggcattaatctgtacgccggctaccttaccggccaatccttggcttaaatcagtcggatttcctttcatcaggtcatcgctcttgatctgggataccgcaccggataaatctctcttcttcatcgtaccatatcccaccactaccacttcatccaatacctctgtatcatctttgagcgtaaccgtaagttgagtttcatttccttttaaagctacatcttgcgattgatatccgataaagctgacggtcagtacggcttttgcaggcacttccaaggtgaacttaccgtcaatgtcggtgatggttccgttggttgttcctttctgtattacattggcaccgattaccgcttcaccgttttggtcaaccacgataccggcaatcttcttgttttgttgtacaatctcgatggcatctgctgcaacggcgtaagcctgctgtacattgcccaataaaaatgcggcacaagcactggtgactaatatgcctttttgaagatttcttttcatattgtgtctttctataaaattaaatgtttcttgtttataatcccatttgcgcccacagccattggctccattgctcgtattgttcctgataccagtagtgtccggtttccagataggggtgaagttccttgggagcggtgatactgttgtaagcggcgtatgtggaagtaggtgggcacacatcgtcgttgtatccccaactgaaccagccgggcaccgtaatccggcgggcaaagttgaccatgtcatagtaatctgccgtttggattcgttgcggggtaggagtcgggaaatagtaaaaataatgcggccagcctccggctaccttctgcaagtgtgcccgatggtcgcacatggcaggatgaatggcggcatagaacgtaacccgtttgtctaatgcggctgtaaccatagacaacgcaccgccctgactggaaccggttacacccaaggccttgccgttgtattggggaagagaggttatgaaatcgaccgcccgcagggcacccacaaatacacgcttgtaataactgtagttacgattgtcatcattttgatactgataattgtaaagtgccccgtatgccagttcgtcatagacagactgctgcatggttaccggaatgccatgaataccgatttccaaagtaatggcacctttggcagctgtttccacatcgccgtagtagggacgcactcccgcaccgggtacacggagcagtgccggataattgccggaagctttaggcatgcagagaataccgaaagtacgcgagccttgacggatgttttggaaactgacctgatagacattgaccgtttcggtgcagcgtgacggtagcagttccatggtggaagacaaaggtacctggcgggcttctttcaaagtgccttcccaaaagttgtcaaagtcgcttgggtttacggcatgtgcccggatggattccggagcgtatgcggcggttgccatgccgtcgtatgtcttgttgccaacgtacgccttcactttgcaacgaagaaaaccgggagtgttcatgctgctgctgacagtcagctttccatccttcagtgatactccatctttcttttctgtgggataccactcagggcctagttcatagtccactttcacatcgggcaatacattctgcgctttgtacacctgaatggtgaaagtacatttctctttcagtcggtatgtccagtccgaatgatcgggcgagaccaccacgcggatttcatttccgcggatttgtgcaaacatggatgcggtacacaggtacagcatgaagccggcaatccaaatttttctgtttctgttcatggtataaatagttaaaatgaatgttgtttcagttgttggttggcagtacggataatggctatagtggtactgtcggacataaataccgaattcaggccttgctgctcttgcgccggatcgcccgtatagtcatctcctctttgccaatataagtgcttgggggcagccagtccgccccatgcccagaagttgcatccagtcagtccggctgattgcgcggtcctatcggttatcaggctgaatatgtattgatagtaggtatctcgtgcctgtgttgtagctgatttgtcaaaccggaacccgtcccttggataaccgaattcttccaaaaccaacggtttgccatatttttgtgctatttccagatgctcgtctatgtattgtttcgattgcaactgcgctgcctctgccttttccgacaaactgtctgccggcgcccatccccagttgtagggccagatatgaatgttcatatagtcaatgtgcttgtcggcatggattcgctcgaacagggcgaggtcttcctcacagccatgtttgccctcgctacctgttgagaccagatgattccggtcgagcgacttgatgaaacgactaacctcagccatccagatagcgaaagcctctttgttttctcccgagaacgcacgaggttcgttgcctatctgccatgacatgattgtggggtcttccacataacttatgtttgtatacctattgattcgggtaatgatatcctttacatagtcggcaaaaagtgattttgctttcttgttgtttggaaattccttaacataatccatgaatgccggccatccgtctatgcttgggacaggggcttttccttttccggcccattccagatattggctatacccgccgctccattcccaggaattgttcaggtagagaactgccagcatgtctctttttttcatttcagaaagaagaaagtccagcccggcaagaatggtatcgttgtaaacacccggtgctgtctggagcgtaggctctactttcgaggtaattccacgggcaccgtcgctgcctaccagtattcttaaattgtctatacctatactctttaaggaatccagttcctgaaccaagcgttcacgatttcctccttcaccttcggaagcaagaatgcctccataccaaaagttggcaccgatatatttataaggtttgccatcacggacaaacattcccttttcaacttgtacaaagggagatgcctgctgttgcgtttctgtacaacacgcaccgcagagtactgcggaaagacatagggttacaagggtgttcttcatgttattcattaaatttaaattcggttctttttgtgctggcaaatgtatgaggaaagatatagatcggcttcttcaattgattatcagactatccgtattgtgtatttatcaatttgggaagtgtttttactcatttgggatagtgtttgcctctattatcccatttgatttttataactttgcagcgttaaacctaatactgatatgatgaaaaagaacttgctcctgattttgatgtgttttgtctgtgggcttgtatatgcgcacgacggattaaactttagaaatcttgatgtgaagtccgggatttcggataattatgtacggtctgttctgcgcgaccagtatggcttcatgtggtttgccacgctcaacggtctgaacagatacgatggttatcagttcaagaaatacacaacgacccaattaggggcttacaacaatgacattgaatctatcgcagaagatgcggcaggcaatatttggataaaaggtcccgtcagttattatatctacgatcgggaacaagataaattggagaacaagatacagcctgtcttaaataaatatggaataacgggagaggtgagctatcttactgtcgataaggattacaacctgtggtgtaccgtgatggatacgttgttccattatgattttgcaaagagtaagttgcatacctttcaactgcctggaaaggaaaaaatgcaacaggttgtttgtcggcgttcgtgtgcctatctgctcttctcgaatggagaaatagcccgcatcgattcaaactttcaacatatccgtccggaaacacgaagaaccatctcttccggtttgcaatataacctttatatagatacggtggacaggctttggttttacgcttcgcatgcttcgggcttgcaatgttatgataccaatcaaaaacaatggatagattacgtgggtaggcaggaagtgacagatgcgttgataactgccgtaatggatgacggggacggcaatttatggattggaacggatgacaaaggagtttatatcagttacaatcaagacaagcaattggtgcggataaacaagaaatcagagaatcctttttcattggccgacaatcatatcaattgttttttcaaagacaatcagaacaccatgtgggtaggaacgggcaaacagggagtatcttttgccgctttggataaaatagccttcaacacttgtttcttgccggaacaggaagacgtgaaatgcttgcaggaagacaaggaaggaaacctgtggatggggttcgatggagaggggctaatccgacaggatgcgggcaaggcctcttatacgcgctttaaaatgaaaaaacactccatcccttccgatttgattatttgttcgtgtctggatgccaagggcaggctttggttcggaacttatggaggaggagctttttatgaacaaggaggaacgttcattcccttgcgtaatgccgctcccgcttcattgaaatacatccgacgcatagcggaagatgcgaacggaaccatttggttcggtacgtttatgcaaggattgtatgccatggatgccgatgggaactttaccgcctatacgatggattcttccatcctccaaacgaacagtatcatggatctggcttattcgggaggacgtaacctgtatgtcggaaccagcagcggactttattccatggatatctatacgcgaaagatggttcccctaacagggaataaagctgggactcagtccttgcccgattcttatatcacctgtctgttttatgacagtcgtggattgttgtggattggtactcgtaccggaatgactgtttttgacgagaaaaaggatggaatgatacacctttctatagaagacgggctgtcgcaccagtgcattcgtgccgtgacggaagacaagtataagaacatttgggtggcgaccgatcatggaataacaaatatttgggtggcggcctctccgacgggaaagtcttcatcctacttgtgttacccctattttgaagaagacggtattggcgatatgacttttaactcacattccattacctgcaccgggcaaggggaaatcctgatgggaggcattggcggatatttgaaaataactccccggccaaccgacttctacaatcgttccgggaatcctgttgtatttaccgacttgctgttggcgaatcagaaaatggaagtcggttcccgtacttccaacggacgcatcctgctccccaaaaacattcagctattagaggagataaccatggactattccgatagtaattttgcgctggaggtatcgtccatggattatcagaatcggcacaagcagcaatttgcctatcgcttgggagaacaggaggaatgggtgaagctggagggaaaccgcattcatttcaaccgtttgtcttacgggaccttccgattgcaagtaaaagtgtatgagcctaacggatacgacaatcctgtatcttctttacttattcacgtccgtcctccgttttggctttcgttgccggcgtatgggtgttatgcgctgatggtcatttttcttttccttcttatattaaggaatacccaaagaaagcacaaacgcttgatggaacaacaaaagcatgagatggagataacgcaacagcatgaaatggatgaggcgaagatgcgtttcttcaccaatgtcagtcacgaccttcgtactccgctggctttgattatcactccgctcgaaaagttgctggcttcggagtcggcccgaaacctgaaagcagacttggagctgattcatcgcaatgcggtggctttactggacgaggtcaatcagttgcttgacttccgaaaactggataagcagaaagcccaactctctctttcatacggtaacctgtcggattttgtcaaagagacttgcgattccttcaaggaactgtctcttaaaaacggcatacagttggagttaaacctgatggatgccgatatcagcatgtcctttgaccgaaacaagatgcaacgcattttgctcaaccttctgtccaatgccgtcaagtacaatcgggaagatggaagcgtggtggttacggtcgataaaatacgtgtgtcggaaaaagaacatgtacgcatacaagtggccgatacaggcattggcatcaaggacgagaacaaggaaaaagtgttcgaccgtttctttcaggaacagcacgccgccacaacgtatgtaggcagcggcatcggattgcatatcgttaaagaatacgtgaccttgcaccaaggtaccatccggataaccgataatcggccgcaaggaagcatctttgtcattaccttgcctgtcgtgggcgggacgaatgaggaaaggcagctttgccacggctcccaagaggaaggcatatcggttcttgtggtggaggacaacgacgatttccgccgtttcctagtgggatgcctgaaagaacactatcaggtgttcgaggcttccaacggcaaggaagcacttgagatcctgtcgcagcagtctgtacaaatggtaatcagcgacgtgatgatgcctgtcatggacgggctggaattatgccatgccgtcaagacggacatccggttctcgcacatccccgtcatcctgctgaccgcccgcaccgccgaagaacatgtgttgggcggattgcgcgaaggagccgacgactacatcaccaagcctttcaacctcgacatcctattgttgcggattcagaagttgctgcaatggacacagagcaaccatgaaaagttcggcaagatggaggtatctccatccgaaataacgattagcagtctggatgaacaattaatagagaaggctatccgcattgtggaagaaaatatggataactcagagttttccgttgaggagctcagcgcgcagataggtattagccggagtggtctatataagaagttgatgtctattacggggaagtctcctttggagtttatgagaatcttacgtcttaaacgcggaaaacaattattggagaagagtcaactcagtatctctcaaatagcttatcaggtggggctgtcccccaagcagtttgccaagtactttaaggaagaatatggatgtctgccatcagaatataattagtgtttaccgaataaataataataattggatactatttctttatgaaacgtatacaaactgctagtgccaaggagaaatgataatgtcaaaacttcatttaaataacagacatctattcaatgctgaagtacaaaaaaatgtcgttttgaaagattaaaactaaaggacattgtagcaaaataggcgaatatagccagttgattatcaatgaaattttcaaagtttagataagaactaagcaatcaaacacattacaatgctggacgggaatgtgctactttgtcaagaacatgataaagatagaatctcttcagaaatcttagccttgctctaatcgaatttgagcaggttatcttcaccgtcatcataagagattatgtgattgcatctctgcttggttatcatttaatacctttcatttctataaggtaaacctacacagatattggattcaccttcatcgtctccagattcagaaacagcccgtaatgttccagcattccgttgcgaaacatcttccataaaatattgcacccgagttgcgtcagcgtggagttgatgaacagccctgaatgggatttgctacattaattaggaaaatatgaaataaggtttatcaaaattgcctgttgaacctgctgtagcacctgctattgccagttaaaattacaatcagggaaattgcagataaacaaaaaaatactatctttgcagtgtaataaaagtgttctttagacttaatgcaaaacatgacaaatatacgtagttcgctcgtttctaaatcgttacctattatagtatagatattttccaattgtctgtatttcaattagaaaagaaaacttgaatgtcttgctgtgtgaaatgtaaatcgcttgtcaattcctgcggctttcgcccacggtttgataagcaggttcatcatcgacgggcttggcaaatcgaatacatgatcatctgctgtcttatctcctcgttctggcatccacttcaacgcttcgggagaaagcggcaggtaaatcggttctttggtcttctgcatggacacagccaagcggtattgccctctatcgacgaatacgtctttccatttcaatccgacaatatcactcacacgcaatccgcagaagcaggagaacaaataggcggactttacagcctcattattcatcggagtggcaatcaatgcccgaacttcctcgatagtcatatacgaccgtttactctccggcaggcgaatcttatccgagttattgattttggtaaacggatttactttgataatctccgcacgcacggctgcattcaaagctccgttcaggatacggtagtaggtgtggagtgtaaagttcgacacacgtttccctttgggacggtattccgtcatcaaataatcgaggtagtcctgacagaatgttttgtctattttatccatagtcattcgttctcctgcataatctttcaagatgcgaatggtaactgaaatttggtttccgtcttttttccctcgctttgcctgattctctttatacgtattcatccaatcaagcaagaataccttttccctattttctataccagcttccccattggtcaattcgatgatacgtttcgacttgattgcattggctgcatccatcgtaacttgattccgtttccgggcattattgtccgtttccgggatgatgtacattttgaggtactcgtatgttcgctttccgtcgcggtatatatccaaatacaaactcttacttccgtcactcaatggtttcatccgaagacggattggctctttgactttcgtcggctttttcactcgtggcataagcaattcctttattcgttatttatgttgcaaaggtagaaataataatccgaaatgaggaacaaataagaaacaaaaatgtaccgaataagaacctatcaattgaaaacaatgaaagcaattgaaaagaaatatccatttataaatagctacaaaacagcatatttgttttcatttatttggctgttgttttcatttcagacatcactgctgggcacttagtcccagctgattttcaattgtttataatttagttctttgacatttttgtaatcgcaatcggtaagtatctctcttacaggtgtttt

SEQ ID NO: 14539 - DNA, 248 bp, Unknown
  gut microbiota DNA sequence
tttcctccttgtcggtcagggcaactcccaatccgcagttttcgcaccacccgtaataaaaagcttcgtccgtgaagtggtcgaactcttttgtgttggggtttaccattgcctcacacctgacattggccgatccgcatctgctgcacactatattattttccattgttcttctgctttacgggcgactcacggccgcccttgtcatacaattcggttgttattctcttaatttatctttacccggt

SEQ ID NO: 14540 - DNA, 216 bp, Unknown
  gut microbiota DNA sequence
taatatgacaatccaagatgtaaagcaaatcaaactggcagactatctgcaaagtctgggctatacgcctgtaaagcaacaaggcaggaatctgtggtacaaatcaccgttacgggaagaaacggacgcatcgttcaaggtaaacaccgagcttgaaaaatggtatgacttcggcatcggcaaaggcggaaacatcctcgcattggcagcggaact

SEQ ID NO: 14541 - DNA, 495 bp, Unknown
  gut microbiota DNA sequence
tattatgttctgtctggaaggacaagaccaggccgacagtactgtattcaacaaattcatccccgacggtactccgatggaggctttttacgatgccggtttgttgaatggcgtaatggtgctgagcggtacagctaaagaaattgacaggaatggtaaggtaaaagatgttcccttcaaagcaattccttattctacatggaacaaccgcggtgccgaccagatggctgtatggattcccgaagcggccgagtatgcccgccccactccggaagctactattgccagcaaagcacgtactctgatgatacaggctcctatacagaaagatgctcccgaatcggcttcggtggaaacatgggcatggggggtaaatgaccaatgggaacctaaacgctcatcggatatctcgaaaccttaccactattggtggctgaagaacggtactgtcgaaacactggcttatgaattcgaccagccttataccgtatcgaa

SEQ ID NO: 14542 - DNA, 1475 bp, Unknown
  gut microbiota DNA sequence
gttacgcttaaaaaaattacagaatgagaactaggaattgtttgttaatcgctttttgttttattatcttgtgtggaaaactgtatgcccagcccacaggtagtgaggaccgtatgtactgggtgcagactttaacaaggattgctgatcctgtgttggtcaatctcagtcagggcacgttgaaaaagaatatgccgtttgagtcactgtctgatgaacctttacgtagaagtgtttcctgtctggaagcggtaggaagaaccgtttgcggtattgctccttggctggaactgggacctgatgatactcaggaaggaaagttaagagaaaggtatattcaactggtggttaaaggactgaaacagactgtcgatccgcaatcagctgattatttgatgtttgataaccgtcattcccagcccttggtagatgcggcttttcttgtacaaggtttgttgagagctcccagacaactttggggaaatctggatgtggatattcaaaaaaaactggtgtatgagttgaaaagaacgcgtggcataaagcctaatgagagtaattggttgcttttcgcttcgatggtagaagcggccttgttggaatttacgggggaatatgatagtcagagattatattatggtgtaaaccgtttcattgatgaatggtataaaggagatgcctggtatggagatggggcagaattgcatctggattactataacagtctggtcatccatccgatgttgacggatgtattgtctgtcatgaaaaagcatggattggaacgtgccgagttcttggaacgccaattggttcgtcaacaacgaatggctgcccagcttgaacggatgatctctccggaagccacttatcctgtagtgggccgttctatcgtgtatcgttttggcgtttttcatgcgctttctcaaattgctttgttggacaagattcctcagcctctttccaaaggacagatccgttctgctctgacagctgttatgcagaggcagatatctatgcccggtacttttgatgaaaacgggtggctgaaaattggcttttcaggcagtcagataaatatgtccgaaccttatataaatacaggcagtctgtatatgtgtacagcggtctttttgccattgggacttccggcaaatcatcctttttggactgagccttatagtgaatggactaacctgaaggcatggaaaggtgtcgatgtaggggcggataaggctttgagaaaagggtaggtgtctatgaaaagaaaagtaacttaacttacttgcccaagtaagtcaacttaaatgccgaagtaacttaacttacttggcctatgaagatagcttacttttcattggctggcttgcctgattttaaagagcatggagatttttccatattaaaggaaaaatctccatgctttatgtttgtatgtcaatagaatagctgccggtctttccctttttttattt

SEQ ID NO: 14543 - DNA, 700 bp, Unknown
  gut microbiota DNA sequence
ctacgggttaggatgtttaaaataacagattgacgtaatggatgatagagaacatagtgtacagtattttttggatctgataaagaagtcccaccggggcaaattcaaggtctatatcggtatgatagccggtgtgggaaagtcatatcgtatgcttcaggaggcacatgaactgctggagaacggtgtgaacgtgcaaatcggctatatcgaaactcatggacgcgccgggacggaagcattgctgcaagggctccctgtcattccgcgtcgtaaaatcttctataaggggaaagaattggaggaaatggatctggatacgattatccgtgtccatccggaaattgtaattgtggatgaactggctcataccaatgtagaaggtagcttgaacgagaaacgttggcaggatgtgataactttgctggatgagggaatcaatgtgatttcggcaatcaatattcagcacattgaaagcgtgaatgaagaagtgcaggagattacgggtattgaagtgaaagaacgggtgcccgacagtgtgcttcaggaagcggatgaggtggtgaatattgacttgacggcagaggagctgattgcacgtttgaaagcgggtaagatatatcgtccggaaaagattcagacggcattggataatttctttcggacagagaatattcttcagttacgtgagttggctttg

SEQ ID NO: 14544 - DNA, 403 bp, Unknown
  gut microbiota DNA sequence
ccatctttgccttgcacttcccgtgcaggatagctcatttcccgataaaccaacatcgtcatttccggattggcttcctgctgtcctttgcttgtcgtctttctgttcatacctttatttttttaagtttgacatgatcggctccatggagccggattttcgttttcttacttgcctggctgtcttttgtcggggattgagcaaggcttggcaaaagaaaataccgcagcgaagcgaggatgattttcttttagccaaccagcccctgaaaggggccgccttgcgcaatcaacccgacaaatggctatatttgcaggtaagaaattgaaaggacggcaggatattgtgaattatagattacaaaaaaagccatccctagggggacggcttaatgactgaattt

SEQ ID NO: 14545 - DNA, 69498 bp, Unknown
  gut microbiota DNA sequence
aaaaagctggacgaagtggtggtagtaggatacgctactcagaagaaagtgaatttgacaggatctgttgcttccgtatcagcaaaagatattcaagatattccggtggctaatacaactactttgctacagggacgtttgccaggtttagtactaactcagaacggtgcacaagctggtaatgataatccagaaatcaggattcgtggtattggtacctttgggaataataatccgatggtgttgattgacggggtggaaggtagtatttcacaaattgcagaaatcccttctgccgatattgagagcatttctgtattgaaggatgcggcatcggcagctatttatggtgtgcgtgctgctaatggcgttattttgatcactactaagcggggacaggcatcaagcaaagtgaaggtttcgtattcaggtagttatactttgcagaccccaggtattgttcccgattatgtggatggttataattgggctttgatgaaaaacgaagtgagcactggaactttttcaccggaagctttgcaaaagttgcaagacggatcagatccggatcattatgcaaataccaattggctggatgctgtattgcgtaatgctagtatgcaccagcatcatctgtctgtatcaggaggtaatgaaaatacccgttttatgacttcggtggcctattccaatcaagatggtatcatgatgaagacaggagtagaacgcttttcttttcgttcgaatattgatactcgttacaaacgttttacttttggattgaacttatccggtaataagaataatgtgactactcctgctgtcgcaccttccggcgaaggtggaatcatgcgttatgtatcctggtttactcgtcctactgtgccggtgatgtattctaacggacactacggctatgtagatggttcgtcattgagtgccgaactgatgaagaatcctgtagagtcaatgtctttagggcaccgcagcaatgagtattggcgttttaacggtaaggtttttgcaggtattgatttatgggacggattgaagttccagaccagttttgcttatgcttttgatttaaatgcaacgaaatcttattctcccaaatctcctgcccgttatgatgcagaaggaaatattagaaaagcggcaggggaaacgaataaggaggaggattattggtatcgcaatgcaacatggacgagtgagaacctgttgacttataacaaacaatttgataaacataatgttaatgtgttgttagggcactctgttattggctcgcgcttttataaaacgactgcttccatacagggctttcctacagaaaatatttatgaacttgatggaggaacaattaatccgggtgcaaaaggcaattcggaagaatataaactccagtcattttttggtcgtgtgaattacggttatgatgaccgttatttgtttgagttcaatattcgccacgatggttcatcacgtatgcctaaagccaatcgttacgctacatttccttccgtatcaggaggatgggtgttttcgaatgaagaattaatgaaagactataaaaacttctcccttggaaagttgcgtttatcatggggtaagttgggtaaccaggaaatcggtaattatgcttatgcggctactttgggcgcaagcggaaattatttctttgaccaaggtggggacaaacaggctggtatggtacagacttctgttccaaatgaagacatcaaatgggaaacgacccgctccatcaatgtggcccttgatcttggattctttaataataggatacagactacttttgaatggtttgataagaaaacttctgatatcttgatgcaattagctatgccaggcatattcttaggttctcttaatgctccttatcagaatgtgggtgctgtccgcaatcgtggttgggaatggaatgtgaattactcggatagtaaaggcgattgggtttggaatgtaggtttcaacttgtcacacgtgaagaacgaaattctggaaatgggcggtttggaagaaacaataagtgggcaaacaatcaatcgtattggcaatcctattggcgcttattttggatataaagcgattggtatgtaccgtacagaagctgatttacagcgtactaattcaaaaggggaaatcattaaacaaaatggtgtggctcctaaattgggcgatattatgtatgctgatttgaatgatgatggtaatattactgctgatgatcgtgatattattggcaatccttttcctaaatattcttatagcttcaatttaggagcttcttggaagaattttgacttgtctactttttggcaaggagtgggaggtatttaccgttacagttgggaaacttctaccgatattcgcggtaacttaaccgaacgttggttggatcgttattctgccggcaacgtaaatgcttctatgccagcattgggtaatactatgaatgattcttattcttcattctggttagaaaattccagttacttacgtttgaagaacttggaattcggctatacattccgtcagcctggacttgctaagatgggtgtttccagtgtccgtgtttattttgccggaagcaaccttttgacatttacgtctttgaaaaactgggatccggaaaaaacatcgggtgatgctagaaatgacgtacatcccaatatgcgcacttattcatttgggctaaatattcaattctaacttataaggaggatatacattatggtaaaaagtacaaaaaatatatgcagagttttatttttttctggagtgttattggttaccagtgcatgttcagatagttttttgcagacggattctccgaatcagccttctcaaaccacttattggcagaccgaatcggatgcattgatggctttgacagcttgctatgatgccatgcagagccagaatttatatgatgacaatattgatggctggaagtttggatttctaggacgtgaaaccagtacggataatggagaccacacatggggtgattggatgctgggaagttctatctcgaaatgtgcttcttccactaccgatgaatgcttttctatgtactggaatgctaattatgaagtgattaagcgttgtaatatgttggtagagaatgtggaacgtattccgatggaggctgaaaagatagatgcatacaaggcggaagcaatagcattacgagctttgatgtattgcaatctgacctccgtattccgtgatgtcccttatctgacgaaacctttaactttggctgaagcacaggctcccaaggcggaacgtagccagattatttcgtccttgctggaagatttgaagacttggattcctaaaataccagttatagggaaagcgcaaaaaggacgtatgtcccaagaagcaggttatgccattatgggacgaattgctctttttaatcaacgttgggacgaggcaataacggcttataaaaatgtagtaggaaaagtgcagctttttaagtcgggtgacggaactgattatgctgccaattatgctgatttgtttaaagagcaaaatgaaacggcagcagaagtattgttgagtgtccattttaaaggtccgggattaggtgaaggaagttgctttggggtttgttggtctgctccaatgaatgctattgaaggttctatgaacttgtgtgatgatttttattgtatagatgggttgcccatcgataagtcacctttatttaaaggaagtcttgttcaaggagcccatacgaaggctaatccggatatgggacgttatgagaatcgtgatcctcgtatgaaaggtacattgatgttacctggtatggaatggaacggaaaactgtttactaataatttgccggcaagttctacctgttgtattcgtaaatggtacactccagaagatacagttaatgaatatgacggtagtcttgacttctatgttatccgttatgcagaggtacttttgtcacttgctgaagctatgattgagaaaggtggttatccacaagccgaaataacaggatatattaatgaagttcgtgctcgtgttggtatgccagcggtagaagtagtggaaggaactaatttgaataaagaagaattgcgcgccattgtacgtcacgaacgccgtgtggaattggcttttgaagatttgcgttttgcagatctttaccgttggggagaatttgaaaatgctcaaaagcgtatgcagaaagaccagtcattctatggctttggagtagtttcgcggggtaatcttcgtggtgcgcaagatttggtttggcctattccgcaaggtgagattgatacgaatccgatgttggagcaacatagtgaatggaaataagaatgattgaattatctattgtaatataactgtgatgaggtaagagattgttaaaaggtattttcttgaaataaaggacaagtatgtggtgataaggctgcaacttgtcctttatcgtttgtttcctattatatatgttctatttcataacgtagcatattttgttaaattacaatgtgatgttatttatcttttcgtctctttgttttatctttgtcgttgaatattataagtaattaagtatatgaagaaaaagaatgtttttaaatggtggggagttgttttgttattatgtatgtgttctgttcatgctgaggcgcaggatttgaaatctatattgacaggagtggcaaaggcggcaattggtaacaaggctactacggctcattctattgtggggacttggtcttatcaggctcctgaatgtcagttcgagagtgatcagttactggcaaaggctggtggagaggtagcggccaaagaagtggaagaaaaattacagactatatatgataagattggtttgactagtattaagtatattttcaaggaggatggtacttattcatatatattgaaaagacgtacggtaagcggcacttatgtttttgatgaggaagctaagacgattattatgaaaagtaagttgggcatacagacggtagcttatgtgacagtgacaggtaatagtatgagtcttgtgtttaatgccgataagttgatgtctattctaaaggtgattactggagcggcttccaaagtaaattctacagctgccactcttaacagtgtagctgaagcttatgacgggctgatgttaggatttgaattgaaaaagtagatgctttttgtaaaatatgggatacaagtcttttataaaagttgaaaaattgtgattggaaataatgtttaaggataaaaccgttttaaccttattattatggttaaaacggtttttttattaacatgtattgtttttgtatatactggtcatgaatgtaatatattgcatatatgtgagaacggtttattcttgctctttcagtgctgcgaaaatcaaaccttccagttcttccgccagttcggggttatcctgaatcacttgtttggaagcgtcacgtccttgtcccagtttggtttcgttgtagctgtaccatgaaccgcttttcttgatgatgcctaaatcagcacccaaatcaatgatttcaccagctcttgagataccttcaccaaacatgatatcgaattcggctttacggaaaggaggtgccactttgtttttcactacttttactttagtctggttgccgattacttcttcaccatctttcagttgagtggagcgacggatatccaaacgtacggaagcatagaatttcagagcattaccaccggtagttgtttctggattaccaaacatgacaccgattttttcacgcaactggttgataaaaatacaagttgtattggttttgctgatggctgacgtaagcttacgcaaagcctgagacatcaaacgcgcttgtaaacctactttgttatcacccatatctccttcaatctcagcttttggagtcaatgccgcgacagagtcgataacaatgatatcaatagcggatgatcgtattagctgctcagcaatttcaagtgcctgctcaccgttatcgggttgtgatatccataagttatctacatccactcccagtttggccgcatagaaacggtcgaaagcatgttcggcatcaatgaaagctgcaatgccgcctgccttctgagcttcagcaatggcatggatagccaatgtagtcttaccggatgattcgggaccataaatttctatgattctacctttgggatagccgcctacccctaatgcggcgttcaaggcgatagacccggtaggaatcacttccacttcctgtacgttgtcatcacccattttcatgatagagcctttaccaaaagttttctctatcttatccattgcagcttgcagtgctttcagtttttcactatttccggcacctggagctgctgagaatggaatttcttcgttatctttttttgccataaatctgttggtttataaaatttgttgtgcgtgttcttttgttttcacctctttgggagagatgatacgttcaatcacgccttcttcgttgatgatgaaagtcgtacggaatatacccatatatttacgtccgtacatacttttttctccccatactccgaattgttctaccaacttcttgtcggtatcggcaataagagtaaagggcagctcgttcttttcaatgaatttctgatgcgatttggcatcattcacactgacaccgattacttcataaccatgggcgcgcagttccgcataattatcacgcaagttacatgcctgggcagtacaacccgatgtcatatctttaggataaaaatagagtactatcttttttcctttgtaatcacttaaacgaatttcttctcctttttcgttcaagcctaatatttctgggactttatctcctatgttcatttttttagtggttaatgatttatggttattgtggccgcaggtatgaattacttaccatgggccgttaatcactttttaaagttctaaatcaccatcaaatacttcatgccaaggcagcccttgtttgttcagttgttccataaatggatcgggatcaaactcttctacattccatactcctggacgtttccacaatccttgcaggaacatcatggctccaatcatggcaggaactcctgttgtatagctcactccctgcattccagtttctttgtaagcttcttgatggctacagttgttgtaaacatagtaagtacgttctttgccatcctttacgcctcggatgcggcatccgatagaagtttcgccttcataattttctcctagatcctgtggattggggagtacggcttttaggaattgtaacggaacaattttcactccgttataatctatttcgtcaatacgggccataccgatattctggatgacacgcagatgagtcagatattcctgaccaaaagtcatccaaaagcgagcacgtttgatagtcgggaaattcttaactaatgattccagctcttcatgatacagcaagtaggaatcacgaggaccgatattgggataagtcagatccttgtggtattccaatggtttggtggtcacccatttgccttcttcataataacgtccgttctgagtaatttcgcggatattgatttcaggattaaaattggtagcaaacgctttgtgatggttaccggcattacagtccacaatatccaagtagtgcatctcgtcaaaatgatgttttgcagcgtaggctgtataaataccacttactcccgggtcgaacccacaacccagtatagctgtcagtcctgcgttttcaaaacgtttcttataagcccactgccaactgtattcgaaatgagcttcatctttcggttcatagtttgctgtatccagataattcactccagccttcaggcaagcttccatgatggtcagatcttgataaggcagagctacattgatgacgatttcgggtttgaaactattaaacagggctaccagttcgtctacattgtccgcatctacctgtgcagtcttaatagctggattgccgatagcttttacgattgcatcacattttgattttgtacggctggcgatcatgatgtcagtgaatacatccggattctgagccactttgtgtgctacgacagtacctacaccgcctgcaccgataattaatactttacccatttgctgttttttattcttgttaaaataaaatgcccggcaaacattaccgttcacagggcaaagataacaaaatattttgggtattagttgatatgatctagtttcttattggtgaaatctaatgtttttctttcgtaggaccatgtttcatggccacccgtgactatatgaatgcgtatgggattacccaaagccaaacgacattcgtcggttgtcattcctttccgtaccttaccgcggcttatcatgttccaaacttcttctgtgatattcggatacttggctcgtaagttgcctatgccgaatagatccgtaaaataattgtctgattgtaaaatcacatcaactacactcgtatgggtgaatgcagcttttatcttataattctttccatctatgttttccaattctaaaaagacgtaaggagagttgttttgtgagattatatttttgatggtgaattgtgtatatcggggaagtctcaccggagtgtctgtttcattcagacattccgtttccgctttcagatagacagtttttttccatatttactcatcagattctttgatttttttgtatttgcatcactgaagctaaatgaatttggaaaatatttatttttattttccataataaaatcactgtctgccatgccacaattagtctttgatatagctaccggctgatagtaggtgtttcctctcttgtcttggaatacgatttttacagggtatgcgcggctgcccactccgacagctgttactgttacttcttcatttataccaatcgggacctctttatagcccgatatgctgttgggatcatctatatgtactttattggtacgcatatatagggtttgtccttccagcagttctttggctatgtccacatcacccaggtaggcaagggtagggataccagctttgggctttaggcaatattgttccaaagtggtgtttttaagttcgtgataatattgttgcccttcacattcaaagttaaaatgtacaaaaccccgttcggtaatttccgaacctagatattcaaaaattttatgttttaaatctcctgtatccacctccttattagtctccgtcgatttaaaaggaggaataatgatgtctttacgttccggtatcaccatgaatttcatgcctggtgtccagtcacacaggttgtaatgcttgaaatgatcgtttataaactgtttttccaaagactctacggaaatacttgtttgttgtgaagtagtcgtgactatatatccgttttgtgcataagtgcataagctacagcttgttgccccaattaaaatggttaaaaactttttcatcgctttaagtgttagtatatataaattgatacaaaggtataaaatttttgtgtataattgctatagtgaaaaataaaatggttagttttgcacactaaactaacagatttaacaaaaaaataatatgaaaaaactagtattagaaatgatggctatttgtgccggagcattgattgtatcttgtggtagtggaaagaatatgttgtctgtttcttctctggatggggaatggaatattacagaggtggatggacaaaagatatctacagagagaatgcctttcattggttttgatgtagctcagaaacgtatttatggaaatagcggatgtaaccgtatgatgggaagttttgaagccgactctctgaagccaggtacattgaagtttggacagataggaagtacccgcatgatgtgccctgatatgaagactgagcagatggtattgggtgcattggataaagtgacttctttccagacggtttctgacaagcctagtgtgataactctatgtaatcaagatggtcagccgttgatgactttggaaaagaaggcggctccggaagtgtcactgtctgatctttcaggagaatgggttattgaattggtgaatggaaagaaaattgtaggtacggctgaggtaactccttttatcggttttaatttggatgaaagccgcatttacggtaatatgggctgtaatactattaatggtgcattaacgcaggaagatggaaaacccaattctttgagatttgacaatgttgctactaccatgatgatgtgtcctgatatggaaactgaaactattgtgctgaatgctttgaatgaaacaaaaagtttcagcatgaaagataataaagtatacttattaggtgaaaatggaaatgaattgctggtgttgaagaaacgataatccatatacattcaaatagatatggtcggcctattttctcataaacgagaaaataggccgattgcatttatggcattatggtaggatgctgacaagtattctgtttggtggaattctgacattcttgccttatataaatccatctaaaagtatcatataacaaataaatcagtcattttgtcagcctttgtcacattcttatttttggcataccgtttgttttatgaaggacgtgcggttggtgcaccaaagaaaaaaagaaatccttcgtgaaccattcgccaagaaatcagtttaattgaaaacaaataaataaagatatataattatgggaaagattattggtattgacttaggaaccacaaactcatgtgtttcagtatttgaaggtaatgaaccggtagtaatcgcaaacagtgaaggtaaacgtactactccgtctatcgttgcatttgtcgacggtggcgaacgtaaagtaggtgatcctgcaaaacgtcaggcaatcactaacccgcaacgtactattttttctatcaagcgtttcatgggtgaaacctgggatcaggtacagaaggaaatagcccgtgtcccttataaagtagtgaaaggtgacaataataccccacgtgtagatatcgacggacgtctttatactccgcaagaaatttcagctatgattctgcagaagatgaagaaaacagctgaggattatctgggacaagaagttacagaagccgttatcaccgttccggcatacttctcggactcacaacgtcaggctactaaagaggctggtcagattgcaggtttggaggttaaacgtattgtgaacgaaccgacagccgctgccttggcttatgggcttgataaggctcacaaagatatgaagattgctgtgttcgaccttggtggtggtacatttgatatctctatccttgaatttggtggtggtgtgttcgaagtactttctactaatggtgatactcatttgggtggtgacgatttcgaccaagtgatcattgattggttggtgcaggaattcaagaatgacgaaggtgcggatttgacaaaagacccgatggcaatgcagcgtttgaaagaggctgcagaaaaggcaaaaattgaattgtcttcttctacttcaactgaaatcaacctgccatacatcatgcccgtagacggtatgcctaagcacttggttaagactttgacccgtgctaaatttgaagctttagctcacaatttgattcaggcttgtcttgaaccttgtaagaaagctatgagcgatgcaggtctgagcaactctgatatcgatgaagtaatccttgtaggtggttcttctcgtattccggctgttcaggaattagtagagaaattcttcggcaagactccttctaagggcgtgaatcctgatgaagttgttgctgtaggtgctgctgttcagggtgctgttttgacagatgaaatcaagggcgttgtattgctggatgttactccgttgtcaatgggtatcgaaacattgggtggtgtaatgactaagttgattgatgcaaacactactatcccggctcgtaagagtgaaaccttctctacagctgccgataaccagactgaagtgactatccatgtacttcagggtgaacgtccgatggcttcacagaataaatcaatcggtcagttcaatttgactggtattgctccagctcgtcgtggtgttcctcagattgaagtaacgtttgatattgacgctaacggtattttgaaagtatctgcaaaggataaggctaccggtaaggaacaagctatccgtatcgaagcctcctctggtttgagtaaggaagaaatcgaaaagatgaaagccgaagctgaagctaatgcagaagcagacaagaaggaacgtgaaaagattgacaaattgaatcaagctgattctatgattttctctactgaaaatcagttgaaggaattaggtgacaagttgtcggctgataagaaagccccgattgaaactgctcttcagaaactgaaagatgctcataaggcacaggatttggctgctattgatactgccatggctgaactgaatacagcattccaggctgccagcgctgaaatgtatgctcagagtggtgcacaaggtggcgctcaggctggtccgggtgcaggtgcaggacaacaggctaatcaaggttcttcttctaataacaaagaagatattcaggatgcagattttgaggaagtgaagtaattcagacaaggacataaataataagcaaaagcgtgcagtttatcagaactgcgcgcttttgtgttttttattgttatatacttgttgatataaggacactgagttctttctctttaattcttaagaatctatttgccattacaagtatttaagtcctcattaaaatataaatcatgatattatatttttctttgatgatttatttaattaacctaggtaatggcaaatatgagattagtaaaattaaagtatcgtccgagtaagggcgttttcgtttttgaatacatgcaggagcagatagagcgtcttagagggcaaggaaaagaacggacagtcgaaacatatcagtccgcattgaacagcttcatgaagttccgtgacggcatagacttatgttttgatgagatggatgcagatttgatggaacattatgaaacggagatgcgctccactcaccatttaagtcgtaataccacttctttttatatgcgtattttgcgttgtgtgtatcgcaaggcagtgggtgagggactggcccttcctgcagatccctttgagaatgtatatactggtgtggacaagacctcaaagagagctgccaccctgacagatatcaaacacatcaagcagttggatctttccgatcataaatcgttggaatttgcacgagatatctttctcttttctttctatatgcgaggaatgtcttttatagatcttgcctatttgcgcaaaaaagatctcaatagtggctttgtgagttatagccgtcgtaaaacaggtaagaaactcattatacggtgggaaaaacagatgcaggagattattgacagatacggagattcggaaacacaatatcttttacctattatagaacgagaagatggcacggagcgcagacaataccggaataaaatgttgctggtgaaccgtaaattgaagaagattgcagcccgggcaggattgaccacaccacttactatgtatgtggctcggcattcctgggcaagtatagccaagacgaaaaatatctcgattggtattattagcgaagcgatggggcatgattcagaaactactacacaaatctatctttcgtctatacagactaatcagatagataatgcaaatagaaatattttaaaagatctataagaaggggaatatttgaattattttgaaattaggacgcactcttatatagagagcgtctatcggctgcaaaggtatagatttattttcattttctagcatttacagactgtaaactgataaaaaagttttttttctctctatatatatcataaacttatgggctgatttaattcatacaacttactacattaatggaaatcagaaatttaagaaatcggacgctctctatataagagtgcgtctgttttagtcggattattccactatgagtattgtaaataacaagggcaaagacatgccacaacaaattttgggaacgatggttcaaaagaccgacgacgccgtaggcatattccgaaatgatcaggaaaaaaagcattggtatgtggctgttgtaaataacagaagtgaaaaagcctgtcaggatagattacgaaaacgtttgaagaacgaaactgatagtgagaaagcttatgaagtttatgtccctatccaacaggagatgagtattcgtcatgatggtaaacgtaaaaaagtggaccgtattgtttttcctgctcttgttttcattcgctgcacagattcagtaagacggaaagaaatagtctgccttccttatataaaacgtttcatggttaacatagccggttcttcccgaaatacttgccgtcccgtagctattattccagatcatcagatgtacagcttgatgcgtatggtcaatgatgccgaagaacacgtcactattgagtcatgccctctgcatttgggcgatcgtgtccgtgtaaacggtggcaaactggtaggattggaagggaatatatgtcgtgagatagatggttctactagtctggttgtaaaaattgatattcttggatgtgctaaagttaccattgctagagaattgctggaacctatagcggaaaaaaactcagttaacatataaattatatattgacagacaatgaccatagcagtagactttgacggtactattgttgagcacaagtatccggcaatcggcagggagttgccgtttgccattgagacattgaaaaaattgcgtgacgaacatcacaggttgattctatggacagtgcgtgaaggacgtctgcttgacgaggctcttgccttttgccgtgatcgcggtcttgaattttatgccgtgaaccgcgactatccggaggaggagaaagggcgtaacaatcattactcacgcaagctcaaagccgatctttttatagatgaccgcaacttgggaggccttcccgattggggtactatttatggaatgattcatgacggaaccactttttcggatttgatacgtagtgccggtgaatctcctgtttcggagaatctcggcagaggccttttctcgcgcctgtttggcagatgattgaataataaatgaaaaaactgatatgaagactttaaagaaactattattgtttgttgtggcgtccgccttgttggcaggctgcacctcctataaaaatgtaccttacatgcagaatcccgaggtcgtgaacagttacagggaagatcttcccctttatgatgcaaagattatgccgaaagatctgctgagtataactgtgaacacgagtgaccctcaggctgccgctccttttaacctgacggtacagactcctctgaatgcagccctgaccaatattaatactaccacacaacccactctccagcagtacctggtaaataacaagggtgagatagatttccccgttatcggtcgtctgaaggtaggcggccttacgaaaaacgaggcggaagatttgatccgtgagcaattgcagccctatctgaaagagagccctatcgttacagtccgtatggcaaattacaaaatttcggtattgggagaggtgaaccgtccgggtacttttaccgtaggaaatgaaaaggtaaatatccttgaagcccttgccatggcgggagatatgactgtttatggcgtccgtgacaatgtgaaactgattcgtgaggatgcaaaaggcaagcgtgagattatcaatttgaatcttaataatgcagagctggttgtatctccctattactacctgcgccagaacgatatcatctatgtaacgcccaataagacaaaagccaagaactcggacattggcagcagcaccagcatgtggatcagtgctacatccattttggtatctcttgcaagccttctggcaaccatcttgaaataaaactcataaatataattgttgattacaaactgttgatatgactgacgaacagaagaacaccccttcgggtaccgagcaacgtgaggagaacgttgatctttatgccttgttttttaaatattttgcctattggccgtggtttgtagccagtgtgctggtttgtattatatctgctttcatctatctccgctatcaggcccccgtctataatgttgatgcggccgtactcatcaaagaaggtgacaagaaaagtggaagcagcaataatcctatgggagcccttcaggatctgggtatgttctccatgactaacaattttgacaatgaggtggaaatcctgaagtcaagaaccttgattaaaaaggtggtgaatcatttgaatttgtatatttcagtggctgaggaacgtatgttcggctataacactcctttatataagtccactccggtaaaagtttatatgactcctgaagaggcagacaatctggaagaaggagtcgagcttcatctaaaatacaccatgaatggaaaattggatgtaaaagtggaatatatgcttgacgaggagaagcaggaggctgaggtaagttttgacagtattccggctgttttccccactccagtaggagttttcagttttacaaagaatgactcggtcccgcctttggaagaagatatgaatctggtggcatacgttaattctcctacagatgtgacggaaagttatgtagagaatttgtcagtggaacccacttcgaagactaccacaattgctgccatcagcttgcagaatacggtaaagcagcgcggtatcgatttcatcaattgtttggttgacttttataatctggacgcgaatgacgagaagaatgaagtggctcaaaaatctgcagagtttatagacgaacgtattggcattatcaatcgggagttaggtactgccgaaacggaacttgccgatttcaagcaacgctccggattgaccgatttgaccagcgatgcccgtctggctttggaggagagttcgaaatatgaacagcagctgaccgagaatgctacccagttgagactggtggagtctttgcgtaattatgtgaacaacccgaagaatgcaaacgaggtgattcccgctaatgtagggttgcaggatcagaatttgggttctatcatcaaccaatataacacgatgctgatcgaacgcaagcgtttgcttcgtacctcttccgaaaacaatcctgcggtaatcaatatcaatacgggcatcgagtccatgcggcacaatgtgcagactaccgtgaacagtgtactgagagggttgcagatagcgcagtccaaccttgaacgtcaggcacggaagtttgaaggcaggatcagcagtgcgccgcagcaggagaaagaatttcttactatctcccgccagcaggaaatcaaggcgaccctttacattatgttgcttcagaagcgtgaggaaaacgcaataaccctggcatccactgctaataacggacgtatcatcaaagctgctcttcctagtaaaaagccggtttctcctaagaagatggttgttatgttggccgctcttgtattgggtatgggtattcctgtaggtcttatttatttgaaggatttattaaaatataagatagagaatgccgaggatgtggagaagataacggatgttcctattttgggtgaacttcctttaagtaagaagccggagaaaggtgccattgtggttcaggagaatcagaatggtatgatggaggaggcttttcgtggtctgcgtaccaatatgttgttcatgcttggtgccagtcagaaagtggtgctttttacatccacacagccgggtgaaggtaaatcttttattgctggcaatacggcagtcagtctggcctatatgggtaagaaagttgttattgtgggtttggatatccgcaagcctgggctgaacaaggtttttaatctgtcccatcgcacggaaggtattaccaattatttggctgatcccgagcataccaatctttttgatatgatacaacattcggatgtaagtcctaatcttgatattcttccgggtggtcctattcctcccaatcctacagagttgatggcgcgtacggtgctggaagatgcaatagagaaattgaaagagcgttacgattacattattcttgatacggctcctattgctattgtgaccgatactgctattgccagtcgtgtggctgatatgtgcgtgtatgtgtgtcgtgcagatgttactccgaagttggggtatcagtatattaatgtgctgcgggatcagaagaaattcgataaattggctacggttattaatagcattgatttgaattcaagaaagagtggctatggatatggtcataagtatggttacggctatggatatggtatgaaaaaataacaggagatcacttttataatgtgatctgataataacaacctaccatgaaagacaaattagcatcctacaaccacttgatcgagacctttgtgattgtcaccgagacctttctttacggtctgctattcctgcttttcagcaagctgtccaatgagatgcagtgggatagcctgcaggttggtgaaaccaccgttctgcaagtcatgcttacactgatgttatgttacgccctttgcgtcgtaagcactcaatggcttccttgagcttataaaaaagaaatatgacctaagtaaaaataaagataggcggaagtatatttatgacatttgggacattataggaagtaagtactcaatttaggcaggtactcaatttatagctataaattaaaaggcttattttcgctgcaatcaaaatttaagaactaaagaatatccgtgtgtcatttttaacaagtgattgtgaatttgaaatgcttaaaggagttgtcacatctaacgaaacggctttcaaaacaggcaaaaaagacacataccattatttgaatgattttcaagaataattagaggatttttttatatagaccccataaaaacaactcgttggaatatgataagaaatgactttttaaccactgtagaaaagattaattgtcaaaataaataataaagttaacatgttaatttgcaaatgaatttattcaaatacatggtgacaaataatgaaaaatccggcagaaaacaataagcgtgtagccaaaaacacgttgttcctttatttccgtatgattcttatcatgctggttaccctttatacgtcaaggggcgtgctggcagaattgggtattgatgattatggcatttacaatgttgtaggaggagtggttttaatgttctctttcctgaacagttgcatgtctaccgctacacagcgttttcttacattcgagcttggtcgaggtgatacggacaaattaaaaaatgtgtttgctgcagccttaaacatccatatagctatcggtattttaataatatttctggccgaaacgattgggctttggtttgtcaatgaaaagctggtcattcctgataacaggattgctgcagccaattgggtctatcagttttccatattgactttttgcatcaacatcattcaggtgccgtataatgcagtcttaattgcacatgaaaagatgaatgtatatgcgtacataagcatattggaagccttattgaaattaggcatagtctatttgcttgtaattgtatcggcggataagcttattgtctatggaatgcttgtctttgctgtgcaattgattatacggattgtctatcagatgtattgcaggagacattatgaagagagcaggtttaaactgttttgggataaagctctgtatcaacaaatgtctggctttgccggatggaatctgttcggcagtgtggcatggctcgtgcgtgatcaagggaccaatattgtcctcaatctttttttcggtcctgcaattaatgctgctcgtggggtggcatcccaggtctcaaatgccgttatggggtttatctctaattttcaagtagcattaaatccccagattaccaaggattatgcaaccggaaatataaccggaatggaacggctttcttatttagggataaagtattcttttctgatattgtttatgatggcatttcctctttgcttgaacattgattacgtgttgcatttatggttggtcgatgtgcctgactatgctgctttattcattatattgataatgatagatgcattgtgtggaacactttttgggactccttttatgacatctttgtcagcaacggggtggatacggaactaccaaattgttgtaagttgcatcatattgtgcatttttccgatcgggtatattgcattgaagttcggctgtagcgcatcatcggtgttttatatttcaatattcttcacactcattgcaggttttgttcgttttctgttctgtcggagtctgattggctattcattgaagaaacttataaaggatgttttatctcctgtagccggagtgacggttctttctttgccgttgcctgttttcataaaatatcatttccttgaagctcaaactcttggtaatttcatttcactatgtataattaccgctattgtcactatgaccatttcatggtttatcggcttgaaaaagactgaaaggaatacgcttatttccgtcgtaaaaaacaaacttcataaaaaatgaaattgatttgtgagaaagagttatgtacgggatgtggactgtgcgccgcaaggtgtcccaaacattgcatatccctggttgctgaagaattgggacatctttatccgtccgttgatcagaagaaatgcattgattgtgggctttgtcaaaaagcatgcccatcgttgcatgatacggtatgtctgtatccgtcagtggcatacgccgcatggtcgaaagacgaagaagactatagaagcagcacttccggcggtatggcttctgtattgactcattattttttagccaatgtaggtatcgtttatggatgcactgtaataccgggcattgaaattaagcatatccgcatagataatcttaaagatgcatataaattgaaaggctctaaatatgtgcaaagcagtatcgttgatgtcctgtcacaaattagacaagatgtaaaagatggaacaaacgtattatttatcgggacaccttgtcaagtgacagctgtcaagcgaatgtatgaggaacaacctgataatcttttcttggtagaccttatttgtcatggggtgccttcaaataaatggttggttgactatatagcaaatactctcaaaataaaagcagataaagtttctagcattggttttcggttatttgaagcttttagtctatgtgtatataatgatgataggttgatttataagtccggaaatctatggacacaccgttatgaagatttatattataacacttttattgacggttttacctatcgagacagttgttttaattgtcattatgccaaaccggaaagagtatctgatataactatcggagatttttggggattgggtaatgaaactgacgataattatattcccaaacatccgtatggcatttcctgtgttcttcctcttacagaaaaaggtaaaagactcatttcgattgtaaaggataagctgaatatttacgaacgtccagttacggaagccataaacggtaatgaccagctcagatttcccaaaaagaaaaatctaagaataaagttttttagaagaatccataaatacataggagtagatgctgcctacaaactatgtgtttgtgataagattgtaaaatataagattagaaaaataataagatagtagcattataatatggaaaatagaaaaaagaaatgtggtatcgttacatttcatagctcacataattacggctctgttctacaggcttatgccatggtaagagtcatgcagaaaatgggacttgatgcagaactgatagattttcgccatcccagaacaacagatatgtatgagtggagactatggtctacgtataaaaactggaaatggaatttgcgagaattggtattgcgtggcttattcagttttgggaaaaaacgggaacaggtattctctgattttattgaaaatgtgctgaaaaaatccaaaagggtaaaagataaaaatgatataccggatatctatgatattttagtttgtggctcggatcaaatttggaatccaaaggcatctggtgaaaacgaccctatatattatcttgattttggcacgactacttgtaaattctcatacgctgcgagttccggttcggtcagatttggtgatgaaaatcctgaactgtttaaaaagtatttgcaaaacttgaaatcaatcggtgtaagggagcgatttatgcaggaatatattaaagaagaattgggattagtatcagagattaatccggatcctacttttttattaaatgcctcagagtggtcagaaatagaaaaaccatataaaggattacctgataattatttattgatttatacaataaaaagaccgaaagagacgataaattttgcgcatcaggttgctgtttctttaaatttgccaactgtacaaatttgcaatgatagagacttgaacgcattaatgcataaagatgttgattatagattaatgaatgtttctccacaacaatttttatggctgtttcatcatgcttcgtttatcgtaacaaacacatttcatggtaatatgttttctgtgatttaccgaaaaaactttgttcattatggaataaattcaagtgatacaagaatctctacgttacatgatgaaataagactgaaaaacaaaatcgtttcttcattcgaaatagatcaaaggattattgattacaatttaatagaagaaaatgttgcatattattgtaaatgtggattgaatttcattcaagctaatataaatgatgattaaatcgtttaatcatatcttttataaacagtagtaaaaacgtttaagtgtacctattatatacaatgagttatcaactgatttctttagttttttacaatttgatcttattattccttttgtttgtttggattaaaacaaaagggtggcagttaaatggcacattatatattctattctttttgttattttcaggaataatttctgctttttattggaatgtttcaaatggaactattcgtaattattctaatctgacgctaattccatttttctatttaatcattggctatcttataaccttaatgcctatagtaaaatatgacatcactcctaggaaagaactatctataactaacaagcaaggtgtgtttttacactattttactctttttttaataatcatttcttttgaaccttttggggagaatttgttgcatctaccttctgtgatagctaattccgattatgctgcaaaaatgtatgatagtagagtcgagtatctttcttttataggacgaaaattaaatagaatttcgacttcttttgagctgatttaccctccattactattttattttttgcaaaaaaaaataatatcaaaaaaaatcgtatatggacttataatggtaattttaagtttttggattcatgaattaggattaggagggcgttctaaattagtgcaaaatattttatatttagttgtttgcttttttttgatgagaccctatataaatgcttgtataactaaaaaaattattttatatggaagtgttgttattgggttaggaatttgtatggtattgctcatttctatttctagatttacaagtatagaagcagaaggtagcaatatagaaaatatttggatatggctaggactttatgccggtgaaggagttcttaatttcaattctctaatgtggtatgtagaaaaaagcactgggggcgattcaacatttatttttttaaaagatttacttggacttacgaaaggctctggggttgaagacaattgggcaacagttagcaaattggggatacctggaaatatattttatacgtatataggatccatttttgaagacttcaataaaataggcacattaatatttcttttagtgttttctacaattactatcaaattaactaaaataaaaaacggattaataacatttcctcaaataataatattatgcttatgcgcaagggtgttggttattcctacattttatacatacacttccttaatggcacaaacaaatttgttatgtgtcctttgtttttctatggttatctatttaaaaaaataatctgcagctatgaaaaatccaactgtatccattattattcctgtttacaatgcagaaggtactattacacgctgcctagatagtatcatacatcagacatattcaagcattgaagttataattattgatgacggtagctcagacttatcaggaagcatttgtgataattatgcaacaaaatataattatatacaagtaatacataaaaaaaatgaaggagttagtatagcccgtcaaataggagttaaacattcgaaaggattatattcaattcatgttgatgcagatgattacattgataaatgtgaaatagaaagaatgatggatatagcattaaaatttaatgcggatatggttgtttgcgattatatattagaatataagaaaaataagtttgtataccagaaaggtatgaaggatgcctgcgatgcatttgattttcttaaacaaatatataatggaatattcattggaacattgtggaataaattgattaaaacatcactttacaataatgtcatttttctaaagcaatgtaattattgtgaggatgtttatattttaactcaaatactttcaaataacatatcaattaattacatcaatgaagctctatatcattactgttatgatgcatcatctttaacacgggaaataaatagaaattatataataaatcgtataatttttatccaagaaatcgagaaaatacttcctttagaccttgatctcagccgatttaaagcaggtataaaattgtctatactgaaatctggagaatatacatataaagaatatattaatttatacccaaatacaaacattccgaaagaactattgaataaaagaaatttactgtttttatcaacagcaaatttctttattggctatcaatttctaaagatattattcaatttgaaaaaaagattcaaatcatttcacttatgacaatcatccatatcacctatgccttcggtcttggaggtatagaaactatgctgcgtaatattgcgaatgagcaagctagattcgggtataatatacatctgattgttatcaataataatgttaacgatgagcttcgcacaagtttgaatgaaaaaatcaaattctactgcctggaaaggcgaaaaggttctaaaaatcctctgcattatattaagctaaacttacttcttaaaagaatcaatgcagatgttattcacttgcactactcatctattgcgagattcatttttttatcttcattggagcgcaagctatgtgttacacatcatgatgtatgtaacggaggaaattttgtaaacttatatagatgtaaaagggtttatgcaatttccaatattgttaaagaagatatttttaaatggaccggtctgaattcagaagtcgttcttaatggtgttgatgtgagtaaaatcagatactctactgctcgtcaagttgatattttcagaatcgtacaagtgagtagactcatgcatgaaaagaaaggacaacatatattaataaaggcttttcatcaattaatagatcgtggacatactcagttgcaccttgactttataggtgaaggtgaatctcgtgagtatttggagaatcttgttaatgagttgggactgtccacatatgtcagtttcttggaagcaaaaaatcagtcgtatatctatactcatctgtgtgaatacgacttgtatgtacaaccatctatttatgagggttttggactaaccgtagccgaagctatggcggcgaaaatccccgtacttgtatcggaaaatcaagggccgttagaaatcatagattatggtaaatatggctattcattcaaaaatatggatgtaaatgactgcgctgataagattgaaacctttttgaaagggcataataatatttctatgattgaaagtgcttataaaagagttacggaactttataatgtgcggattacggctaaaacatatttagaaaaatacaaagaatttatagaatcagattatgctccagtacattgacaatagaataaactacaactattccctatgtcagcaatgtggcatttgtgaggcagtatgtcctaaacaggcaatatcattcaagttgttgaaaaacggcatacacaaggttgtcattgatgacgagaagtgcatcaggtgtctgcgatgcgtaaaaagttgccctgctaataagaaagaaggttatgatggatatttcaataacttttcgattaaaaagtattttttagggtataataaggacaacaagataaggtgtgaaagctcgtcgggcggggtgtgcaagacattgattattgagagcctgaaaaacaacttggctgacggcgtgtacacgttgaggaagaccggacgttatccgtatgccgaaggcgagttttacacgaaagagaatatacctcgatatgatgacattccgaactcggtttaccactctgtacttgcgtgtcgtgaggtaaagaaaatacagcggtgcgagcgtctgattgttatcggtaccagctgccagcttagggccatgaataccatactgaaagggaaggcgaatgagattatcagaatttgtattttttgcaagcagcagaagactttggattcgaccagatttctcgctaaaattatgggtatggaaatctctgaaaatctaaatttctcgatccgttatcgtgggaacggatggccgggaattgttcgagtgaacgaatctgaactgtcttggaatagggcagctcagattccgttcggtagaagattgtggactattcctggctgcaatgtttgtggtgactcgttcgggacaaatgtcggagcggacataaccttaatggacccttggaaaataagatctgaaaacgatttgggtgaaaccttagtcatcgtacacacagacaaaggacttaatctgttgaataatatcttatcgttaaggtcagaacagaaagcatataaagaagtagcacttgcgctcgacttgaaagacatttggcgcaaacagcagcttgtgccgttcttccgtggcgaaaattgtacggagactgtcctcaaggcaggtaaggctgagcaaagccagagaaagttcttgcgctctgtggttgagacactgccaagaatgccgattctcttctaccgcattttatgcaaaatttctgacaggcgaaataacatattaaaataacgtttatggatataaaagtaattacccgacatgctccgtctaattacggttctttattgcagtcaatagccacaataacgacattggaacgattagggcataaatgcgaaatcatagattacatacgcgatgacgaacacggacttagtgccgtaaaaacaaaccttaacaacaagcagagatggtccggtaattcgttgaagaaattggcatatatagttttacgttatcctgaagaaaagaaggctgaactgaacttcagagaaatgcgcaggaagtatctgaaactgacgcagctatgcaggacacatgacgatctgaaacgtcttgatgccgatatattcatgaccggcagtgatcaagtatggggacctactctcaacggacactatgatgaagcttattttctctcattcgtaaaagacaaaaggaaaatagcgtatgcggcaagtttaggcagaactgattttacggcaaagatactttctgaatacaaaaaactgttgtcttcatattcaggcatagctgtaagagaaaatacggctgtcgggttgctcaggcagatggacattgaatgtgcaggacaagttcttgacccaacactccttcttacaggtgatgaatggagcagaatgataaaaaaagatatgggcggcaaatatgttttagtgtatcagcttcataataaccctgcgttaagtaaatatgcagttagattcgcagaacatgttggactgcctttatatagagtgtcccccactttccaccaaatccgcaggggcggcaagtttatatatctgcctgatctacctgatttcctgtcatacataaagaattctacttatttcataacagactctttccacggaactgccttcgcgttgaatttcaataggcagtttattgagatattgccaaacaataagaccggaaacagaaatcagagcatcttgcaactgacgaggttgcaagacagaattgttacggattatgctgactgttcaataagcgaacgcatgattgattatgaaagggttaatgatattttaagaaaggagcgcattcgatctttgggaatactgaaacagcttcttcgtcaataggttacctcacctgagtagttacgtcaatagcatctttttatatacacactttatgagctttgactagaataaaagaatctttcgacttttgctggttttagtgagcctgttgcagtttgcaaagggaaatgtttctcaagattcaacctatctgatgttctatgtctctatgtttcatcctcacaaggaagtaaagataaaagtgaaatctatctgttggaccgagattcgaaaaaggacaggaagatgaaacaggatttgttaaaacagatagattataaacctgtctggttggttcttgacaggcatatacattagaattttacagactcaaaccgaaaaggttgagtgacaataaccgtctaatatctttttatttaatgaaaattctgcaaattaacgtctttaactatcgtaagggtggttctgaggtcgtgtatttcagtacgatggagttgctgaggatgcatggcgaagaggttgtcaattttgcattgagatggcctgagaattatccttctgaatatgaatcgtattttcctgaatcaaaggaaacccgaagtgaactgttgaagcctgtaaaaaacatcatcaattatttcaataacagggaagcagcccggaagttggaacagctgatagagaaggaacgtcctgacctggcacatatgcatttgatctggggacagattaccggttccattttgcctgtcttgaagcggcataatgtaccaatcatattttccattcacgattatcgcatcgtatgtcccgcctatacgttcaggaacgggaaaggtgagatatgcgagcagtgcaggggaagaaacttttatcattgtgtgatcaacaaatgcacgaaagacagttatctactaagcgtgatgatggcgatagaacaatgttacaggaatcgcttcttcaatcccgccgaatacattgacggtcttatctatgtaagtcagtttgccaaacagatgcatgaaaaatacatgcctgaattgaaggagaaaaggaacattgtcctgtataatctggctgataaaatactggatgcacctgcccaaaagacagatagatatttcctatttttcggaagattgtcctacgaaaaaggcgtaaaaacattgatttcagcttttaaggatatgccaaatagcaatctgaaaatagcaggtaccggtccgctggaagatgaattgaaagattacaccaaatccaacaacgttaccaatgtggaatttttaggatataagtcaggtaaagaactgacagatttggttgagaacgcttatttcatcatagtcccgtctgagtggtatgagaataacccgatgactatcatagaaggatacgcggcaggcgtgcctgttatcggcacaaacatcggcggcatacctgagattatagaagaaggagtaaccggatacttgttcactccggccaattccgttgatttgacaagagttgtgaaagcggctgattcattaccagcagaacaatattcaaactatcaacagaatgcactgagttttgccagaaagcattttgacagggaaaaatactatccgcaactgataggcttctataatcagcttgttaagtaatacatttttttcaatccgatattgctccaataatatattatagttcaacaagtattccaatataaccatttgggaatactctctaaaattatattccaatatttatgaagatagcatttgtcagcacccgtggtatacctaataactacgggggattcgaacagtttgctgaatacatttccgtaggaatggcacaaagaggtcatgaagtggtagtctattcacccaagtttcatccatatcaggaaagcacgtacaaaggtgtgcggattaagcatatctacagtccggaaacatggatgggcagttcagtcggcagtttcttctatgactttgcatcgttacgtgatgctttgaagaaagaagatttcgacatcatctatgaggcaggatatacgagcatcattcctgcttacatttggttcaacgtgaaaaaacggaaacgtccaatattcaccacgaacatggacggattggagaacaagcggtcgaagttcagcccgatggtgagacgctttctagactgggaagagaagatggcggtgaaatacagtcattacctgatagccgacaacatgggtatccatgattactataaagaaaaatatggcaaggaaagcaagttcctagcttatggcgcagacatacacgatgattttaaggcggaatacttggaggagttcggattgaaatcggaagaatattacatcctgatagcacgccttgaaccggaaaacaacatcgtgatggcgatagaaggttatctgcactccaaagagaacggacgcagaccgctgattgtggtcggcaagacaaacacgcctcatggtaaagaacttgtagagaaatacgggaacgagagaaacgtggaatttgtcggcggcatctatgatttcaaaaagctggattcagtccgtcatttctcaaaggcctatttccacggtcacagtgtgggaggaacaaatccttccctgcttgaggcgatggcggcaggctgtttcatctttgctcatgacaatattttcaaccgtgccgtactgaaggagaatgctttctattatccttcggcagacaaagtcactgaatatcttaaccgtattgacacgattgcggagggaagcaagattcaatatacagcccgtaatattgaagtaatcaggaacgaatactcatgggaaagtttgatagataaacacgaaaaatatttttattggttactttctcagaaacaataaattgctacctttgttcatgatatcatcatgaataattaggttttggcaaaaaaagagtatagacaactttccgcacaagaggaaacggcattcatcctaatggtgttgttggatgaaggcaaaagcaatttgccttatagattgttgcgttgtttgacaagtgtacattttgccaatcaatattatttaaaaagactgttctccggataccgttctttaaactataatttttatcgtgataaatttgaaaaggaacaaggttgattgttgtttttcctgccttttgttttaatgaagaaaattttatttgtttttctgctgtgtatgatatggcaggaaggtttttctcagtatgtgtatggaaccaccggacttctgcacatgcctactgccgatatgcaacgggataagacattcctgttcggagcttcttatttggatgtggctgctactcctgcccattggaattatcatacgtttaattactacattaatatcaccatttttccttggctcgaaatcggatatacttgtaccttgcataaggcagaacacggtagtacttatttcccaccttccgtttgggggaaatattgtaaccaggaccgacagttttcagggcggttgcgtatatggaaggaagggtggtggaaagaatggactcctcagattgtattgggtgcgaatgatccaagtaccaatgatatattaggaaattctgataaagatgattatggcattggtggagtaggagagatgggtaatggacattggaaccgatattatatagctggtactaagcatttttatttcaaaaataggggagagctaggcattcatgttgcttatttatacaataaacggaaagactatcatttaaacggtccggctgttggagtaaattttcatttttatctatcgggtacaaatttctttgtgaaggcattaaacaatcttaatgtaatggctgaatacgacagtcgtaccataaactgtgggttaaaatatagtttttggaaagattatattaatgctgtggtagaaatgacagaatgtaagcatttgtcaggcggagtgatatttaaagtacatttaaaataacaaacactataacttattcgtatgaaaggaattgttctcgccggtggtagcggtacccgtctgtaccccatcaccaagggagtaagcaagcagcttctccccatctttgacaaaccgatgatttactaccctattttagtcttgatgctggcaggcatccgtgagattctgattatatccactccctatgatctgcccggctttaagcgtcttttgggcgatggatcagactatggtgtgaagttcgagtatgccgaacaaccttctcccgatggtcttgcacaagcctttattatcggagagaaattcattggtaatgattctgcatgtttggtattaggcgacaatatcttccatggtaacggtttcagttctcttcttcgtgaagccgtgcgtatggcggaagaagaacaaaaagccactgtattcggttactgggtgaacgatccggaacgttatggtgtggcagaatttgatgcggaaggtaactgcctgagcatcgaagaaaaaccggaacagcccaaatcaaattatgcagtggtgggcctctatttttatcccaacaaagtagtggaagtggccaagaacatcaaaccttccgcacgtggcgaactggaaataacgacagtgaaccagcgttttctagaagatcgtgaactgaaagtacagacgttgggacgcggttttgcctggctggatacggggacgcatgattcattggcagaagcttcgacttatatagaagtcattgaaaaacgtcagggtttgaaagtggcttgtctggaaggaattgcttatcgcaagggctggataacggcagataagatgcgtgaccttgccaaaccgatgctgaaaaaccaatacggtcagtatctgctcaaagtgattgatgaagtggaacgtacaggcaaagaaaatctagattaagatatggaggttataaaaacaggaatagaaggtgtggtggtcattgaaccgcgcatctttaaagatgaaagaggctatttctttgaatctttttctcaacgggagtttaatgaaaaggtgatgcctgtcaattttgtacaggataatgagagtatgtcatcgtatggcgtgatgcgtgggttgcattttcagcaaatgccttatacgcagagcaagctggtgcgttgtgtaaaaggtgccgtacttgatgtggcggtagacatccgcaagggaagtcctacatacgggcagcatgttgcggtggaattgacggaggagaaccatctccaattctttatcccccgtggatttgcccatggttttgccgtattgagtgaaatagcggtttttcaatataagtgcgataacttctatgcaccgcaagctgatggtggcattcagctgcgcgatgaaagtctgggtattgattggaaaatacccgttgccgaggccattttaagtgagaaggatttgaaacatcctttgttgaaagactatgactctccgtttgactacactattaatctatatgaatgatgaatatacttgttacaggtgccaatggtcaacttggcaatgagatgcgcagggtgtcgttagacagccggaatcgttatctctttacagatgtaaatgaactggatatcacagatgcgacagctgtctgtaatatgttgaaaaaggagcagatagatgtgattgtaaattgtgctgcttatacgaatgtagacagggcggaagatgattttgctatggccgatttgctgaataacaaagctgtggagaatttggctgttgctgccgcagaaacaggtgccacgcttattcatgtatctacagactatgtgttccgaggggataaaaacattccttgccgtgagtcttgggaaactgatccgttgggtgtctatggaaaaaccaaactggcgggcgaacagtctttggtaaaagcaggatgtaaatatcttattttccgcacagcttggctttactcgcctttcggtaagaacttcgtgaaaaccatgcggcaattgacttcaacaaaagattcactgaaagtggtttttgatcaagtaggcactcctacttatgccggagatttggctgctttgatctataacataatcgaagagaacttgctggatcgtcaaggtgtctatcatttcagcaatgaaggggtatgttcttggtatgattttgcgaaggaaatttgtgaattgagcggaaataattgtgacatacagccttgtcacagcgatgagttccccagtaaggtggaacgtcctcatttttcggtgctggataaaacaaaagtgaaggaaacttttggtatcactattccttattggaaagattctctaaagaaatgtatgctagaattggaaactcaacaataactaattaaaacaatattttaaattatggattcatttaaacgcaatataatcattaccggtggtgccggttttatcggcagccatgtggtacgtctttttgtaaacaagtatccggaataccgcattataaacttggataaactgacttatgccggtaatctggccaatttgaaggatatagaggacaaaccgaactatatttttgtaaaagcggatatttgtgattttggaaccattcaggaattattggtgcgatatcaagtggatggtattatccatcttgccgccgagagtcatgtggacagaagtatcaaagatccgtttacttttgcacaaaccaatgtgatgggtacattggctttgcttcaggcagccaagttgtattgggaatccctgccggaaaagtatgaggggaaacgtttttatcatatttctaccgatgaagtatatggggcattggaatttgacgggactttcttcacggaggaaaccaaatatcagcctcatagtccgtattctgcaagtaaggcaagtagtgatcactttgttcgtgcttttcatgacacatatggtatgcctaccgttgtaacaaactgttctaacaattatggtccttatcagtttccggaaaaattgattccgctttttatcaacaatatacgtcatggaaaaccattgccggtatatggtaggggagagaacgtacgcgactggttgtatgttgtggatcatgcccgtgctattgatcttatttttcatcagggcagaacagcggatacatataatatcggtggtttcaatgaatggaagaatatagatttgataaaagtaataatcaaaaccgtggatcgtttgttgggaaatccggaaggcacttcagagtgtctgataacttatgtgaccgaccgcaaaggtcatgatctccgctatacgattgacagcaataaactgaagcacgaattaggatgggagcctagtttgcaatttgaagaaggtatagagagaacggtccgttggtatttggacaatcaggaatggatggatcatattaccagtggcgaatatgaaaaatattatgagtcgatgtataagaacagataatgagaatcccagttggggataacacggcatacatctttaaacttaccccccataccactatgaaagacaaattagcatcctacaaccacctgatcgagacctttgtgattgtcaccgagacctttctttgcggtctgctattcctgcttttcagcaagctgtccaatgagatgcagtgggatagcctgcaggttggtggaatcaccgttctgcaaatcatgcttacactaatgttatgttacgccctttgcgccatccattcaggagtagtgcttcaccggaggaaagtgcattcccttcagatatggaaacgtgtgctcgagaatatgttcctgtttgtcctcctgggcggtctggtcctttctgtaggaaactatgcggatatagcctccctgttcatgctggagtacctttttctcctgtttatgtgtcttgtttcgttccgtttcactcttcgtcttctcatcaggctttaccgtatgagcaagaaacatacgcgttttgtggtactggtaggaagtacggacaacaacttggaaatctaccatgagatgtcgggcagtgaagatacaggttattcggtcgtgggctattttgacggtcaggcgaatcctgcttttccggtagaatgtccgtatttgggccagccggcgcaggtacaggaatatctggagaaacatgattatgtacattacctgttctgctgcctgccctcaaaagacagagaggtcattgtttctctgattaattactgcgagaaccatctggtacatttcttcagtgtgcccaatgtgcgcaattatctccaccaccgtatgtcgttcaacatcatggggaacgtcccttacctgggccttcgccccgatcccttaagttggccggggaaccgcctgctgaaaagaacctttgacatagtagtctcatcggtgttcctttgtacgctttttccgattattctgattgtggtggcgatagtgaccggattgaccatgcccggcccgctgttcttccgccagaaacggaacgggctgaacggcagggagttttattgttacaagttccgcagtatgaaagtaaatgcagatgccgacaggatacaggccacagagcatgatccccgcaagacgcgctggggcaatataatgcgtaagacgaatatagatgagctgccccagtttatcaatgtgctgttaggagatatgagtatcgtgggacctcgtcctcacatgcttctccatacgcaggaatattcaaggttgatcaataaatatatggtgcggcattttgtgaaaccgggtataacgggatggagccaggttacgggtttccgtggggaaacgaaggaactaaaagacatggagggccgtatccgtggtgatatctggtatttggagcactggagcttcggtctggacatttacatcatgtacaggacggtggcgaatgtcttccgtggcgagaagaatgcctattagtaaaacgggctgttcttaacgatccttctcgatgagggtccttagtaatttagcagttaaaaaactttgtttttgcagcctgttatttccgtctgccggccggaaatggaacatagccggcactaatgttagatcagaacccttgtcctttgtgaaaagtgcagggggagctccgggaacgagagcgcttgttcccggagttttaataataaagaagattatccgattaggatttattcagctttaaaaataaacgcggattatacaataacccgtaacaggaaggattttttattttctgatattactatatttactcctaaagaatttttatctatatgatagtctgtttcggtgtgtcggtaccggccggatgatcttagtaaaaaacttccctctgccagtagtatcactctctacttgagagcagaaacgaacactggcaaaaggaaaccttgggaaaagaaattacctttccaaatatccgaacaccccttccgcgtcaaaacacggacaagccttcgggatgcttccgctcatatccctatgtccccttatccgggcaccgggaaagagctttgccagacgcatcagcaacaagataagctgttctgtctgctctgcggtccgggtgtctgccggatgtccgtccgcatccagaccgccctcgtagcagatgccgatgctgcaacggttccagggacggcagtgtgcccccacttccagcagtttgcggtgctgggtgatggtgccgtcgcgacggatatagaagtggtaacctacagtccggaaaccacgggtcttatggtcacgaagtaattgctcggcagtatagtctttgtcacaacgtgtggcgctacagtggaggatgaggtatcgcactgattcgcgtccttgcatcagcgctccgtcctctacggtgaggagttggcgttcgttcttcatttcttcctcaccgattatcattgggaatgtttcttgtatcataataaattgagatttggaaaatgttgtgtttgttctttagatgagggatgcgcaactggtaatgcccaaagcggtgagtgccgcgatggctgcctggataactgcccggagaatttgtgtccaggtgattttcttggattcgtggttggatttattcatggaaatatctgttttttgtcagtttaaaatgcgaatggaacaaaaggaggttacggaactggcggacggacacgggggagtgaaagaagaatccgtgtcgcccgtgttccataatcacatcatgctatctctgtggagcggaacaagccggtcagctattctcgtctgccggttcaccggaagcggctggaatgcgggaggcgtcagcatcgtcagcggcaatgccggcggcagaagaattgcctgtcaggtctaccgtagtctttccggccttcaatgccttcactacttcggcggctgccttgcgtgtgggaaccagttggaattcggcatcttggcgcaggttgttgaaacggacgcccggagcccacagtacgttcacctcggtgatgttctccacagtgaactctgccatcgaatgggcgccgaggcttcggatactgttcgaaaatacgcccagatcgcccatctgtatctgctgtccgttcaacaactgctcgcgcaggcagtccacggcaagaataaggatggcctggatatcggcgcgcgaatatacacatccgtggctggcaatgtggtaacagaacttgtccagtgtcattacttgtgagtactgggcgttggcatacgccttcttggccgcgtctttgtcggtggggttaccacgcatgcaggtgctgtagttaatcatgataaatagggttttaagagatgaaaaataaaaaatgaatttcgtcagtgaagaaggagaatactttacttttcttgcggattgcacgtaggtaacgtgtaaggctgaaggttagtaacgtatggggttacatgttagtaacatgctagaccgaaggttagtaacgtatcggctccctcattgttgacattgcaaagataggtactgtgaaatgcgtgctgacgctttatgacaccttgtggcactttatggctttcatcctgttccaaagagcttgcagggctatccggggctgcccagatgccggttgatcagtgtcacctggcggctcgtgaagactttttgcgaggtatagtaacccgttgcggataactcttccatcagagggggacagccgtttatccacctcatcagatgccgggtggctatccggggatttgaaccgggaaaatagagcagagccaggctaccctttgtcatggatgggaaataaaggaaatctttcatatttatacattttaaattcaggaatcttgcaaacttgcagaacttgcactctctctcacacccacacacgtacgtgtgtgcatgcgcgcgttgaattcgtattcgccacgccccactttgaccagctgtccgcgttcggtcatacgtttcagcagcgagtccaccgagcctgccggaactcctacctgttctcctttgtcgatggcttcgttgcgggtgaagcgcaggggaaggcagtcgaacagggtttcgggagtcatgttcgccgatggtgcggtgggggttcctgcgggcaggagcgagagaatgtggcatgcatggcggtacagaggttccaccaaggccagcacggcataaaagtcgtcggtgcggatggagaggttgaattgcggcacgattccgtctgctatgttttcttgtggaatatgggccgacggggtcagtccgggacagttcagcagggtacgcacgatgttttcctgtggttcgccgctcctttcgcctcccggcagcagggattccagagagcgcagcagggcgataatgcttatgatgcggaagatattgatggcaatacgggttacagcgcttttcatctggttaccgtgaatggcggaggctcgtccgaatacacgggcaaagtggaagttgaatatctctttttgctcgtgggtgagcttcatgttgatgttgctcaccgaggcggtgatggcgttcagcacttctttccattgtgccccccattccagaaaacgggagtcatagtctgtatccgcttcgttgaactggtcttcccattcttcaatggcaggcatatagtagaacagctggcgcgagaacaatccgttttcggccgatgggataaggggcttgatttgtgcaggcgtgccgctgagaagcacgcagaggaacgtgacgttacattcgcggtattcgtgattggtgcgccggttgtaggccagccggtcatggtcgaaacatttccggaggaggtcgctccagtgtccgtgatcgcctccaatggcggtgctcacggtgtcggcctcggtttcgcatatcagtcctacgcctccggagtccatcaggttttcctgtatgcctgtaccggtattgtcaccggctatgaggagcattttcagctggggctgttcgggttcaggggtatttaccttttccttccccaaagtgtcccattttgtcttttccatgcggtaggtctttattttttcccggtaggtgtccagcagcgcgttgtgtatgggttctgccagacggcgtacccaggtcagtgcacccttgccggaagcgggaggcgcggtgacgaacacttgcagacagggatacttgtgttttcgtccgtacacaaaacttaccagtttgttgagggtgcttcccagcacggttgctgcacccagcagcaggatatcccgttgggcgggagagttaccgcagtctatgatcccttgcaggaaggcgggccagcggtagtcggggaaagagggaagtcgggcagggaggatggctttgggcacgccgtcggacaggggggaggctgtgtccgtgaaaacagcgtcgggcggagtcccgtcggaggcatccggatgggcattataggatacgcgtgcacgtgtgtgggtgtggagagactgcaagttctgcaagtttgcaagtttcgggtccattttcaccccggccacctctgccagatggaagacggttcccagggaatttctgcctgttcctttggtcagagcatgtccgtacagtttgtctgcttcatcgtggtggtacttttcggatatgcggcagatgcggtggaaccgggtgcgtccttcctcgccgcaagtgttggctatggcaaaggccagcggcatatattcctgataggtgggggccacattgactcccgcttgttcgatggctgttaccagctgttccaagatagaaatagaatcgttcattttttaatatttatggttattgattttcgcttctccgtcgtgcgacagaaaacaggctctggacaagtcggcattggccctgtccactttcagctcgtatttccattccagatactcccatgcggtgtgcagggcattgtcgaaggattcttctacgctcaggaaagggtttatgcgataagggataaaaagttttactccctgatttccggggctgacaaaggaaagtacggggtgcagcacttcatcggcaaagagacggtcgcgccacattgccgcttcttcggtggaagccagttcgtcaatatctatgacaaagaggcccgaaggaacttgcatgcattgttctttgcagtaagagaagatacctgccggagtgacatacggtaaaagggtctgtttattctttcggaacgcttgcttgtctccgagtccggctctgactttatgcgtcagttcttccagttgcggattggtgctgatgtaggtatgaagccctgccacactgcatatacatgtgggtattttattggtgacgggtgcattgaaaaatgacatgatgtattctttcataaaagaaattgattttgatttatctgcacaaatatacgggtagggaatgacgtatggaaatcgattcataaccgtttactatctgtttactattggtgcatgctattgattatatattgatgaaatatggattttgattaacgatctgttgataataattaaagaatagagaaaagaaatagtatatgaatgaaaaacctgatatgatgataaatatttatggcggaaataatctgattgctcctgtggcatcttccgccattcagaacttttatggcgaccggggtgatgaggccgccgaccaaccggaagattctgagaaaacggagaatacagaaagtgtggcggatgagaagccggcacaggaaccggcggaactgtcggatgatgaattttacgtatcggtctatatacccgatataaaggtgatgagggcttacaagatacttttgggagagtgtaccacggcacgcgaactggcggtggtggtaggaaagatgctggccgatgagaactgtaggaatgtagacaaacacacggtggtgaaagcggctttcatcaagtcgttgctaccttttgccaaacgactcgtgtcgggcggtacgatagccaatatacgggcgcagattaataatatgctggctagtaaataattttttcgattatcctcttactccattggcacgttagcaaatcggcaaattatttatgttgcgggattatcagatagagatgaaaacacgtctgatggaagcgtggaaagctcaccggagtgtgatggtgcagatgcctaccggtacgggcaagacacatctgctggcatctgtggtcagtgagtttgtgtcttctgcaggcagtggggtatggcttattgcccatcgtagggaactggtggcgcaaatggaggaaacgctggctaaatatggtatccggagggaggatactccggtcagggtaatgtctgtccaatggctatcccggcactggaatgaggcgggtgatgctccgggactgattgtgatagacgaggctcatcatgccttagccgcttcttacacggagatgtggaagcgttatcctgccgcaaagaaactgggtgtgactgccacaccttgccgcttgaaccgtagggggttcacggaactgttcgaggtgctggttacttcgtggagtattgccgagtttattgaaaaaggcgtgttgtctgtgttcgattatgtatccatccgtcccggcagcgaggagcagcggctcattgacggtctggagaaacggggggccgatggggattatcaggtgaaagagatggatgcggtactgaacaggcgtcccggtatcgagcgcctgtaccgcagtgtcaggcagtttgcttccggcaagaaggggatggtgtatgccatcagcattgaacatgcccggcggatagcggagtattacagcaggcggggagtgaatgcggtggctgtggacagcaagactcctgctatggaacgcaagcggatggtggaggagttcagacatggaaaaatcgaggtgctggtgaatgtggatgtatttagcgaggggttcgactgtcccgatgtggagtttgtacaactggcccgtcctactttgtcactggctaaatatttgcagcaggtaggacgcggattgcggagatcggagggcaaggaggcgtgtatgctgatagacaatgtgggactgtaccgcattttcgggcttcctacacagcgatggaactgggatgctatgttccggggacggatggcgggaaaggggagtttgcccggacggatgaactgtgatgcttccgttaccgcttttccggtggtggaaaggccggctgaagccggtggggacttggtggtggttatggagcacgggcgtttgctttcttccatcagagagcaggctttgccggatgagaaggagcagtcaccgtcatgcaggctgagggcatttgtagataaggaaacaggtctttggggattggaaaagggagatgagatgctgccggacgcttcgtttaaagaggttttgagtatcaaaggacgttttgccgtggggaggcttcggaacgggtgtgtccgggtactggatgatacgggggctttggtggccgaaacggggcattgccgtgaggtgagattgctgaaagatgatttgttacaagtccgtcatgccgggaattcggtgtcttatgtggatttacggaacggccggtgttatgctgtccgcccgcgtgtcctcagatacgggagcatagaattgttacaggtgaaccgtacttattacagcaggacaaggcaggtgtatgccaatacatgcgggttgccttcttcgtccattgtgtggatggggttttatgtgaagatgtacgatggcagagtgccttcccgatgccgccgcatggaagatggaggcttttgttgtgaaccgcaggtttgtctgttggagggggatgaggagcgtgcttattacctgagcggacggttgccggatcaaagtattgtggtgatggatgaggaaggacggtattatcatgtggagaaagggcatggaaagcgttatgtggcctgtaaccgtccgtcggaccggagtgaggattttgatgaggcggtggcattgctccgaaggcaggcggacgagcgtgtggagaaacatttgcaggaggaaaagtgcgagactgaacggaaacggcagcgtataatcagcaggagtgtggaggccgtaccttttcagataggagtgaaatgggggctgaggacagcggagcagattttgattccacctgtctatcggagaatattgcgtccggtgggtggttattgcgcctatcaggacagctcctgccagtggggggtgctgactgtagacggaaggatcattatccgggcccggtatatggaggtggagatagacagggatggaacggcgcgtcttactttggttccggggaagatggaaacggtgaagctgacggattaataggataaaaagcaggggataactttttgtcagaccgatatttagcgatggaatacggatcattatgaaaagttttgtaactttgcatccgattttaaaaaaggagatattgatatggaattacctgatgacccgatgatgcttttcagcatggtgaatatgaaacttcgtgactgctatcattcgctggacgagctttgtgatgatatgaatgtagacaaggagctgttggtgaaaaaattgaaggcggccggatttgagtatagtaaggaaaacaacaagttttggtagatagagggatcagcccgttccggaagaatgcttgggacgggctgatttttttattgagatacctattgttgattatttttgtataagtcctgtttccggtattgcaacagggatgttccggtatgccgcttgaagaaacgtcttaaggtggcaagattggcaaaccgggttctttgaacgatttcctgtatgctgatggatggattctccaataatgcgtaaatctcttgcagggtataatgtataatccattctttgggggattttccacttaccagagtcaaggcttcagtcaggtatttggaggaaacatgcaacttttcggcatagaacgccacttctttgttttctttgtaatgctttaacagcaaatccagaaaaaagtatccgatttcttctttatgcaaggtggtgactttatgttcttttactgtgctgtaatagtctgcataaagttccagaaaaggtaatttcagcagattggtaatagattcttttgtaaataaataagttggagaagtagctctgttgtatagtaaccggaaatagagggagaactgttccgctttctcttgggatagcgaatagatgcagtgggtttgggtgtaggtatgaaaaccggtcggaaaacgtttgatacttccattgatcacgtcataaaaaagggcatttgaaaaagtacaataatcgatggtgaaagtcagactggattttataaatgaaaccaagaatcccggcatgaaaataagaatgtcgtttgcacaaataacatatttccggagaccaatctggatctcggcattcccttcagtacacatacccaaaactccttccggcagataagaggggtatttgctgaaaggcactgtgtgcgcatccatataaatactgaaatcttgatcggacagtccttctttggtatcctgtggttttggggtattatataacatactttgtatcagctctaggttcacaaaattagaatttaatgatacattccgccggaagtagtggacataagggaaaataaaacggaaaaaaactacgtgtatttgatttttttaatataatgataggagaacaattttagcttcccgtaagttgtaggagaacatggaaaattattcttttttacagaaagaagggtgaattcaaaaagatcgtttgatttgtttttgaattcaccctttatgaatggagcggagttatttttgcgccagtaatttggctatggcacggtcgggtttcccggtttctgtcaggggaagtttgaataccggaacaaaacgtttgggacgccagtagggaggtaattgatgtgtgcaggtctgttctatgtcgtcgggcagttgcccttcggcaagcagcacaatgatttctccgaatttttcgtcgggagcggaggtgatcaagaaaggaacggacaggtgttctttcaatacggcctctacttgttctatctgcactttcactcctccggtattgatcgtattgtcttttctgcctagaatgcggaattggttctgtccgtttatctcggctatgtcattggtcaccagttcttttccgcaaatttcgggagcgtatatcaccaaggtgttttctttactcagacggatctgtatgctctcgaaaggggtgtaccagtctgaagcttcaggaccgttcagtctgcgtagggcaatgtgtgataaggtttcggtcatgccgtaagtagaccatacggcatgggggaaatcttttaacgcagcgttcaattgggagtcgataggaccacctccgataatgaggtgcctgatttgttgcaatatcgctctctcttcgggaacttgcagtgagttatagacttgcatggggatcatggcggcaaagacgggggcttttgtcaggtcttttaaaggatgcccggatggagtgacaggcagcaagtccagtcccgctaccaaggcacgtactaccaccatttttccggcaatgtattgcaagggcatacagagcagggcggaatcttctttttgtagtccgaggaaggaacaggtgaggcaggcgctttccatcatgcgttctttttctacatacagttccttgggtttgccagtggagcctgaagtatgtaccagcagggtgtctgccgggtcaaaccattcggaaagaaaggagaaaagttcctgccggaaacttcggttgtcggcagggatattcattcttaccatttcaatttcccaattggagtaggggatgctttctatcagaatggtttgtttgtttctattggtgcagaattttgtcattgtttcagccagtttagtaaatcgggttcttgttcttcggggtcgaaccaaaggcagtccccttcgatgtgaagcggatagtctatattgtcggtaaacagcaagccggtacctagtccttgggggagggcgggctgcaaggtggcacaccattgtgcgatggcattcagtccgatattggactccagagcggaagtgacccatgagccgatgcctctttcagccgccagttccatccattcttcggagccgctgattcctccgtgcagagaaggtttcaggataatgtactgaggacggatggtttccagcaattctattttccggtcgcgccggttgatgcctatcagctcttcatccagtgcaatgggaaagggggtggcggcacagagtcgggccatttcatcccattgtcccgcacggatgggctgttcgatggaatggagctggaattcggaaagacgatgtaacttttcgagggcatcggtaggagagaaagcaccgttggcatctacacgcagttcgatttgggttggggtgaaatgccggcggatgtgcgccagcagctccagttccttttcaaagtcgatagcgcctattttgagtttgatgcagcggaaaccttgctgcatcttttccccgatgcgccggtacatctcgtcaaagtttcccatccagatgagtccgttgatggggataccctctttgcctttgctgaacggggtgtgccagaattgcaggctgcgtgcccggaaatgcagcagggcggtttccataccgaacaggatggacggatagggaagcaaggcttcccggtctatttccccgttcttttccaggttcttgcaggcagtggccaacacctcgtcgtatgaggggatatcatcacagctcagggcagggagaggggcgcattcacccacgccatagtggcggctgccggtgtcggtgaggaggatgtaccatacattccgggtagtatatactcctctggaagtaccggcaggttgcttgaagtgtaattgtttttttataatttgggtttggaacatttttttttatgtgtagttggtttggtatatttatccctgacaatctcaaaggcgcgttggacccatgtgtatatgctcgtgtcgggaatatcaccatcaaaattaagttgaagccaatgtttcagactttggttgatgggattgccgactgaaacatgtctctcttttatatactcaatttcgtccgaagtagatttgacattgacaaaagtgaaattgtcaatgtctataaaacagaacatgtgtccataaacataaaaggcaaggatggaatcatatcttgcagcaaatttgccaaatggcatcttttcggaaacgtcacctaacgaaagacaatattttctgaattcttcaatgtccatgctttgaatttgtagtttgtttatgggaacttcggataatcctggaaccgtggcttgcgtttttccaaaaatgccttccctccttcctgcgcttcctctgtcatgtaatacagcatggtggcatctccggcaagttcttgtatgccggcttgtccgtccagttcggcattcagtccggctttgatcatacgaagagcgagcgggctgtgctccatcatcttttctgcccatgccacggtttcgtcttccaggcggtcgaaaggaacgactgtattgactaatcccatttccagtgcttcctgtgcggagtattgacggcagaggaaccatatttcacgggctttcttctgccctacgatgcgtgccagataggaagagccgaatccggcgtcgaagctgcctaccttgggacctgtctgtccgaaaatggcattttctgaggcaatggtcagatcgcataccacatgcagcacatggccgccgccgatggcgtaaccgtttaccatggcgatgaccggttttggcagtgaccggatttgcttttgtacgtccagcacattcagacggggaactccatctgtgccgatataaccgccatgaccttttacgtgcatatctcccccgctgcagaaggctttgtcgcctgctccggtcagaaccactacattgatatcctggcactcgcggcagtaatacagggcgtcgctgatttccgaagtagtggtgggggtgaacgcgttgcggtaacgcggacggttgatggtgattttcgctattccgttgtaaaagtcaaacagaatatcttgatattctttgatggttttccattttcttgtttccattattcatttttatttttaagtccgtgataatattctcttaatagggtggtgtctttttccttgtcagtaaacacctccagcagcatgggttgcatccttgtctcgggtgaggtgaatggctgcatcgcttcttccagctcttcttctccggtcactttcatgtaaataaagccacgttcttccgcccagcctttggcggtggtgtaatgctcggctgtgataaactcccgggaacggcttgatttgtccattccaggcagggtatggaatatttctcctccttcgttattcagtaacaggatgcggatgttggcaccgtaattttgattccacagtgcgttcatatcatagaagaagctcaagtcgcctatgatgatgaaattcagcttgctggaagcggcggcataaccgatggcggtggacagggagccttctatgccgttcacgccccggttgcaacagatttccacccggggaggaactgtaaataactgtgcatagcgcacggtggagctgtttgccagatgcagggcacagggttcgggtaatgcctgaatgagttttccgataacggagatttcggaataagcaagatccggcatcggaatggttttgcaatagttttcccacatcagcggataatgggtcggtttgttgtccagcaggaaagctattttttccaagaactcaaacggatccatctcgatgacggtggtcaggcaaccgtataaatcggctatcttcccgtcggcggcaacatgccaatgttcgcgcgggggatgattgcgcaggtatttcttcaattgcttggatacgatatgtccgccgtaggtaatcagtatttcgggggccatgtcttcctggcgctccggcgtcatggaataaacggcggcgtcgaaattcttgataggaatgccggggatggtctggttgcccagatgttccgtcaaccaggcgaaatgtttataaagcggtttcacatattttttttcgaacaggtaaatcagattcatctggcctaccacgaccatgcgcttgttgtacttgttcagccgttcgatcagttccttatagtcacggtcgtacacgctcagtccctgataacgggtgatgacacgtgcctcgggaagtgttttggcggtgaagcggtagatgggttcggaaatgggtacattgatatgtacgggtcctttgccgtggtgggtggtttccagtatggcttcgttgatgaggcggttgcaaaaccattcgtcttcctctgtatgtacttcgggcaggttgacagacatcttgactaacgttccgaacacatggggctggggcagggtttgtccgtccatttgtcctatccaggcggcggggcggtcggcagaaatgacaatcagaggtacttgttggtaaaaagcttcggctacggcagggtgcaggttcagcagggccgaaccggaggtgcagcatactgcggcaggacctcccccttgtaaagataggccgatagcaaaaaaaccggcactgcgttcatcggttacagaataacaagtgaagtcctctatattggccagagtgtgtacgatggcagcattacggctgccgggacaaagcactattttccgcacaccgtgcgctttgagaagtgccaccaactgaagtatgttctttttgtctgaatacattattcttctactttaattgtttccatttgtttacttataaagtcaggatgaaggatgctccgcatcgtattcatcttgtctcccgtttccacccattccgattctacttccgaggaagccagtattcctcctcctgcatacaggatggcttcacccggctttatttccatgcagcgcagattgacgtagatatcggtatgcccctctgtgtccagccatccggtgaatccggaataataactgcggtcgtacccttcgttgttcagaataaaccggaaagcctcctctttgggcaggccgcagacggcgggagtgggatggagttcttgcaataaatcgcctatatggtctgtatttttcaacaagaaataaaaatcagtcttgaggtgtaccaattgtccggcacgggcggtatagggacctttctccgtcatcttgttgccgaattttttggcgatccggcggatataatcagccacatagccctgttcttcttggttcttcttgtcccagtttgtcggcatcacttcgtcctgcatcggcattgtaccagccagggccacggtgtgccattctttgccttgtccgcttaataagatttccggtgtgctgcccagccaggttccggaagcgggggtgtggcataggtaaatcatcatgcgcggataattgttacaggcccggacaaaagcgccaagtggtgaaaaatcatctccgatatgtctggcggaagaacgtgacagaaccaatttttgaaactgcttctcttgtaagggagtgatgaaacgcccgaatgcgcgggtatattgttctttatccgtttcttcggaaacaaaaggagagagttcattctgccggcttttgcaggtgagcagggtatccacacattccagtgaagacagtgcttcgctgatttcgttccagtcgtatgccgtgacatccggacggataagtaccaagggatgttcctccgatatccggaaaggagccatgacaaatccctttttttcattcagttcttgaatgtccgctaattgttccacatcgcctgaggtttgcaataccaggtagcattcgtctgtccaaggtaaccggtagagggcgaaaccgaggtggctatgtgtcaggcaatccaataatttttgcgtatgtatatctggtagattcatttctttttcagtatgaaattaacgacacgaacagtagaaaccagttctccctgtggagtggtgatatctatattccatatatgcgaggatctgccgcggtgaatcagtttgccggtggcgaatactttgcctccgacgggtacggccgacagatgatttccacttacttgtactccgcaggcatattcgccttcccggcatagcgacatggagccatgtcctgccacaatctcggccagagccagtgacgcgccgccgttcaacataccaaagggttgtgaagtacgatggtctacaggcatttcggcatgtaccgcattctcggtgggggggagaaaccggatacccagatgttccgccatcgaattcgaataatcaggtttgcaggttatttcttccatcatttgtatgtctgttcttttctatagggctacaaaaatacataaattttagatgaaaatgtcgctaatgttgttcttttaagaacaaaaacattcggggtttgtttctattttcggaatatattttttattttgcaaaaagaattcgtacaaatgcaacaacgaatgaataaaacaataatttaatacctatgctcattacgattattatccttgtactgtccgcagtattttttgtaaatggcaagatacggtcggatcttgtggctctttgtgctttagtggctttgttgatttttcagatattgacgcctgacgaggctttgtccggattctccaattcggtcgtcattatgatggtggggctgtttgtggttggcggagcgatttttcagacgggacttgccaaaatgatcagttcacacattctgaaattagcgggtaagagtgaattgaaattattcttgcttgtaatgttggtgacttctgctatcggggcttttgtgagcaacacaggtacggtggctctgatgttgcctatcgtggtcagtctggcagtcagtgccaacatgaatcccagtcgtttgcttatgccgttggcgtttgccagcagtatgggaggtatgatgacactgattggtacgccgcccaaccttgttattcaaaatgcgttgacttcggccggttttcctccgctttcgttcttctctttttttccggtagggattatttgtgtggcagtgggtactttggtgttgcttccgctcagtaaatggtttctttcgaaacgggggaaaaacggagacgacaatgttcattcgggcaaatccctgaaacagttggtgaaggaatatgggctatccagtaatttgttccggttgagggtggtcggtgactcccggctgcatggaaagacgattatagagttggatatccggcgcaagtatggattgaatatactggaggtgcgtcgtggggatatgtcacaacaccgcttcctgaaaacaattactcagaagctggccgatcccggtacggttcttcagaaagaggatattctgtatgtgacgggggattttgagaaaataaagttgtttgccgaagattatctgctggagatgctggacgagcatactaccgaagaagcgaaaaactcagccaattcattggatttttatgacataggtattgctgaaatcgttttgatgccttcctccaatctgataaaccagacgataaagggggcgggctttcgtgataagtttaatgtgaatgtactgggtatccgccggaagaaggaatatttgttgcaggacttgggcaatgagcggattcatagcggggatgtgttgctggtgcagggtacatggaacaatatcgcccggctgagcaaggaagatgccgactgggtggtactgggacaaccgctggccgaggctgcgaaggtcacgctggattacaaagcaccggtagctgcggttatcatggtgctgatggtggctatgatggtgttcgacttcattccggtagctccggtgacggcggtgatgattgcgggtatcctgatggtactgacaggatgtttccgcaatgtggaggcggcttacaaaaccattaactgggaaagcatcgtactcattgcggccatgctgcctatgtcgctggcattggaaaagacaggggcttccgaatacatttcgaacagtctggtcagtgaactgggaacatacggaccgttggcgctgatggcgggtatttatttcactacttccctgatgacgatgtttatcagcaacacggctaccgcagtgcttctggctcctatcgcgatgcaaagtgcaacacagataggggtaagtcccgtaccttttctctttgcggtgacactgggggcaagtatgtgtttcgcttctccattctccactccgcccaatgcgctggtgatgcccgccggacaatatacctttatggattatgtaaaggtagggctgccgttgcagattattatgggcattgtcatggtgctggtacttcctttgctgtttcctttttaagttgtttataatatatgatgccgatgacgtccgctataaaccatccgataggaatagaccaccagattccgatgaccccgatggcaggaatgccggcaagccaataggaaagggctacacgggttcccaacgataccactgtgagcactacggacattcccggcatacggatggcacgataatatccgtataacaggaacaaaatcccgattccgcaataaaacgctccctcgatgcgtaaataactgataccgatgttcagaatttccgtttcgtgggggcggacaaaaatcagcatcaatggtttggcgaataaaaagaccagaatggaaatgaccagagagaagagaacggtggtaatcaaggcacttttcactcctttgcggatccgttcctcttttctcgctccgaagttctgggcaataaaggtggaaaaggcatttccgaattcctgtaccggcatataggcgaacgagtctatttttattgctgccgcaaaggcggccatgactacagtgccaaaactattgaccaatccttgtaccatcagaatgcccagattcatcaccgactgttgtacacaggtcagtgcggagaacgaagtgatctctttcaggcagtgacggtcgaaatgcaggtcgttgcggtgtaatctcagttcggggtatttcacgtaggcatatcccataattcccaaagcggatactccctgtgcggctaccgtggcgatggctgctcccttgattccccaatccaactgcaagataaagaataaatccagcccgatgttcagtacaacggaaaccgccagaaaccaaagaggagtaacggcatctcctatggcacgcagtaatgccgcatagaaattatagataaaggtaaagccgattccccaaaagataatccacaagtaatcatacatcatgccataaatatctttgggaatctgcaataacctgagaatgggatgaatccagacgaaagccgctatatttagaatcaatgttactgtaccgatcagcagggcggatacatagatgttacggcgtagggaatccgttcgtccggctccatattgcaaggaaaaaacggttccgcttcccatggacaatcccagcaggatggaaatgaggaaaaccatcagcgtataggcggaaccgacggcagccaatgcgccggaacctatacattgtcctacaatcagcgtgtcggctatattgtaacactgttgtagcagtgagcctataatcataggtaaggtaaaacgtagcagagtgccggtgatacctccctgcgtcaagtctattttagataacatgatgcgtgtctgttcgattcaatttcttatttattttgaaatttattgcgaaggtagggaataaaatatcaaacaacaataaagattgtctatttaatacccggaatgttctttctccttaaaaagagttaacttgataatattttccataggaaactttttattataagaaatatcatgtatgtttgcataaagtttccattggaaaatattaaatcaaataaaatagtttaattatgaagtatatagtaataggaggcgtagcaggaggtgcaactgctgccgcacgtatcagaagaaacacggaacaggcggaaatcattttgttcgagaagggagaatacatttcgtatgccaattgtggtctaccttattatataggaggtgtgattgcggagcgggaaaaattgtttgtacagactccggaggcttttgggaaacgttttaacatagatgtgcgtacccggtccgaggtaatagccatccattctgccgagaaaacagtggatattcgtacttccgacgggaaaacttatacggagagttatgacaaattattgctttctccgggtgcgtcgcctgttcgtcctcccttgccgggcattgacaatgaagggatttttaccctacgtaatgtgaatgataccgatgctatcaagagttacttgcagcagcataaggtgaaacgggcggtaatcatcggggccggattcatcgggttggagatggcggagaatctgcaggaagccggtgcggaagtggcggttgtagagatggcaaatcaggtcatggctcctattgatttctctatggcttctttggtgcacgagcacttgttgcagaaaggagtacatctctatctggaaaaggcggtggcttctttcgaacgcacggtcaacggactggaggttgttttcaaatcgggcgaaaggctgcctgccgatatggtgttgttatccatcggggtacgtcccaatacctcattggcgatagaggctggactggagataggggagatgcgcggtattaaggttaatgattacttgcagacttccaacgagcatatttatgcggtgggcgatgctatcgagttccgtcatccactgactgatagaccgtggttgaattatctggcaggtccggccaaccgtcaggcgcgtattgtggcagataacatggtctttggaaataaggttacatacgaaggggctgtcggtacttccattgccaaagtttttgatatgactgtcgctgcttcgggccttccggcaaaacggttgaaacaggcaggcattgattatttgtcggcaaccatccattccggttcccatgcgggatattatcctgatgctttacagatgtccattaaaataactttctctcctgtgaatgggaaattactcggagcgcagattgtggggtataacggagtggacaaacgtattgacgaattctcgcaagtgattaagcataacggaactgtttatgacttgatggctttggagcaggcatatgctcctcctttctcttcggctaaagatcctgtagcagtagccggatatgtagccggaaatatactgagcggaaagatgaagcctctttattggcgcgaattacaggctgccgatttgagtaaagttacgttggttgatgtccgtactcccgatgaatttgcactcggtgctttgaaaggggctgtcaatattcctttggatgatatgcgcgaaaggatggaagagattcctcaggataagccggtctatttgtattgtggagtagggttgagagggtatttggcttctaatatattgttacagaatggttttggggaagtaaagaatttaataggaggtttaaaactgtataaagcggcaacggctcctctgcccgagccggaggagttttcaaattctggctcttcaagttctgattcttcaaaagttgatcattctgaacacagtaaagattctgctggagcttatactattgcctcttccgtcattccttctatgaaagcaataaaagtggatgcttgtggcatatcttgtcccggtcctatcatgaaactgaagaagagtatggaagaactggcggacggcgaacgtttggaaattgtcgctacagatgccggttttccccgcgatgccgaggcatggtgtcaaactaccggaaaccgttttgtttcagtaaattcaggagcaggaaagtatcaggtaattgttgagaaaaatactccgcaatcttcttcctcggaagtttgccgggaggataaagggaaaacttttattctgttcagtgatgacctggacaaagttttagctacttttgtactcgcaaacggtgcggcggctacgggaaagaaggtaaccatcttctttactttctgggggctgaatgccatcaagaagctggacaaacctgtggtgaagaaagatatctgggggaagatgttcggcatgatgctgccttccagttctttaaagttgaagttgtctaaaatgaatatgggcggaatgggagctaggatgatgcgatatattatgaataagaaaaatatcgattcattggaatctctgcgtactcaagccattcagaacggagtggaatttattgcttgccagatgtcaatggacgtaatgggtgtgaaacgtgaggaattgctggatcatgtgactattggtggagtggcaacttatatgaaccgtgccgaacaggcgaatgtaaacttgtttatttaaatttgcatggagaaaataaaatcaatatgtgtcatgagagagctgttcaaggctctctctgaacttgaaacccgcttaatggaacaatatgaagtgtcattgaatgaggcaatggcactttgttgcattggcggagatacgctgacggctagtgtgatatcggaaaacacaggtctgtctgcttcgcatacctctaaggtcatccgttccattgaagagaaagaattaatcgtccgtaatttgggggataaggataaacggcagatgcattttactttatccgataaagggcatgaatgtttggaagcgctgaaagcaaatgaaatagaaataccggaactattaaagccattgtttaaataaacccttctcttttccatttgtttattccggatatgaaactggagaaatggaaaaacaaatggaagaagtggagcaatctgcgcaaatggcaaatatggaaactgaagctgattgatgcccgtctgtatttcgtgagcatattcgtggggctgcttacgggactggttgctgtgccttatcactatcttctttggtatttctttgatgtgcggaaaactttttttacggcacattatccgtggtattggcatgtattgttgttttttatcttatgggggattctgatctttgtcgcttctttggtaaaacgtatgccattgatagccggtggtgggattcctcagacacgtgcggccaataacggtcgtatccgttatgagcatccttttaaagaactggtagctaaattctgcggaggggtgttggctctcagtgcggggctgtctttgggacgcgaggggccgtctgttcagatagggtcttatataggaacacttatctctcgttggggacatattctgaaaggggaacggaaacaattgctggctgccggagctggtgcgggcttgtctgccgcttttgctgctccgttgtcttcttctttgttggtgatagaatccatcgagcgttttgatgcacctaaaaccgctattactaccttgttggccggcgtggtagccggaggagtggctagttggatgttccccacgactccttatcatctgattagtgcggtcgttcctggtttatcttttatccgtcaggcggagctttatattatctttgccgcccttatggctgtcattgcaaagttttattcgctcatcgttcctttctttcaagaaaggatacctgccatgaaactctccattcctgtcaagatgttgtatttattaaccatagcttatgccatatcgttaacagagacgaatctgacaggtggcggagagcagtttttgatgatgcagggaatgaatggaactcatgatatccagtggcttactatcatgatgcttattcattttgtttttacgctgttttctctttcttcaggtttgccgggaggaagtttcattcctaccttggttacgggaggattattgggacaaatcttcgggttggtattggtacaacgcggatggatagggtatgagaatgtgagttatatgatgctgatcgggatggtggcttttttggtggctgtggtgcgtactcctttgactgctattgtcctgataacggagattaccggtcatttcgaggtgttctatccttccattgtggtaggtggattgacttattatttcaccgaattgttacagataaaaccttacaatgtattgctgtatgacaggatgttccgtagccataatccggagtcttccgaagaggctggtgctcgctatcatctttttgtcgagataatggatgggtcttattttgacggaaaggaagtggatacattggctttacctaatcattgtatcattcgtagtatacatcggaatcgtaaaaacttacttcctcaggggcaaaccctggttcccggtgatcaagtggagatagaaatagatgcgcaggatatagaaaaattatacgaaccgttagtcagtatggcaaatatctattaaaagatgagtctaaaaaagcccccgttaaaggacgagggcaacctaaatgttttcacaacggaataatccttattgtgacttgcttcaaattagtattgcaaaactatgaaataaatatgtaaaggacaagtgattattagaataatttgataactttgaaaagttttgataaaatagttgtcttatgaaaaatatagtgggtcttgatttgggtaccaatagcataggttgggcagtagtaaatggaagtgtcaatgacgatggaagtgaacaattggttaagatacaagcttcaggaagtcgcatcatacctatggatgcagctatgataggagattttaataaaggtaattccatatctcaaactgctgaaagaaccagattgcgtggagttcgtcgtttaagcgaacgatatctgcttcgcagagaacggttgcatagaattcttgatattttaggatttttgccttttcattttgctcaagatttagataggcatggtaagatagttaagggcaaggaacctaaattggcttggcgtaagaatgaagctggtcagtttgaatttatattccaagattcatttaaggaaatgctggaggattttaagctaaattatccgaatctgataacagatgataaaaaagtaccttatgattggactatctactatctccgtaaaaagggattgacttctaaaatttcaaaagaagaattggcgtggatattattgaattttaatcaaaagcgtggatattatcaattacgtggtgaggaagaggaggaaaataaggataaattggttgaattctatgctcttaaagtagttgcagtagaggattccggagaaaaaaagggaaaggatatttggtataatgtgcatttggaaaatggatgggtgtatcgaagaacaagtaatatgtctcttgattgggttggaaaaactaaagaattcattgtaactacggatttagagaaggacggaacgcctaaaaaagataaggaagggaatgtaaaacgctcttttcgtgctcctaaggaagatgattggtcattggtcaagaagaaaacagaagcggatattgatcaaactcataagacagtaggtgcctatatttatgatacgcttttaggaaatcctagtcagaaaattcgtggaagactggtgagaaccattgaacgcaaatattataaggaggagctgaaactgattttggagaagcagaaggagtttcacctggaattgcaagacagagcattgtatgctgcttgtattgaagaactatatccaataaatgaagcacatcggaataatgttggtaatcgggattttacttatttgtttttagaggatatactcttttatcagcgtcctcttaaaagcaaaaaatcattaatagacaattgtccttatgaggagaatcagggtcttgataaggaaacgggagagataaaatcttttcctgtaaaatgtattgctaaatcacatccgttgtttcaagaattccgcttgtggcaatttataataaatctgcgtatttataggaaagacctggcacaagatgtggatgttacaaatgagttattgaagacagaagaagattatgttgctttatttgactggttgaatggtaaaaaagaaattgatcaaaaggcttttttgaaatatccggtttttggactgaaaaaagagatagagaattatcgttggaattatgtgcaagacaaaccttatccatgtaatgaaacccgttcattgatgttggcgaggctggagaaatgtgatatttctattgaattcctgacaaaagagaatgaggaagctttatggcatatattatattcggttgaagacaagaatgaaatagtaaaagctttgcagaaatttgcggataaacacgacctgaatgcttcttttgttgatgtgtttcagaaattcccaccttttaagaaagaatatggttcctattcggcaaaagcaattaaaaaattattgcctttaatgcgtatgggaaaatattggagtgagaattcaatagataaaggaacgcgtgaacggattgataagataataacaggagaatatgatgagaaaatagaaaatagagtgagggagaaagcaattcatcttgctgatgtttctgatttcaaaggtttgcctctttggttagtgtgttacattgtttatggtcgtcactctgaagcaaaagaaataatccagtggaaatctcctgctgatattgattcgtatttaagatcttttaagcaacattcattgcgtaatccaattgttgagcagattattattgaaacactacgtgttgttcgtgatatttggaaacaagtgggaaatattgatgagatacatgtggagttggggcgtgagatgaagaatccggctgacaagcggaagaaaatgacacagcaaatgtctgaaaatgagaataccaacttgcgtatcaaatatttgctcacggaatttttgaatcctgaatatgaggttgaaaatgttcgtccttattcgccaagtcagcaggatattttgcgtatttatgaagagggtgttttaaatagtgtttccgatttaccggaggaaatatcggatatattgaaaaagtttacagaaacagacttgaagaagcgtccttcaaggtcagaagttttgcgttacaagctttggctggaacagaagtatcgttctccttataccggtgaagtgattccattaggtaagttgtttacgcctgcatacgaaatagagcatgttattccccaatcatgttattttgatgattcttttagtaacaaggtgatttgtgaagcggaagtcaataagcttaaaagcaatttattgggacatgagtttatagtgaagcatcatggggagatagtggaacttccttttggaaaaaaagtaaggatcttcactgtggatgaatatgagcaatttgtgaaagataactattcgcgtactcgtagtaaaatgaaaaaacttttgatggatgatattccggaggagtttgttactcgtcagctgaatgatagtaggtacatcagcaaagttgtaaagtcccttctttccaacatcgttagagaaaaaggagaggaagaagcaatttcaaagaatgtaattccttgtaccggaggagttacggatcgtttgaagaaagattggggaataaatgaggtttggaataaaattatacttcctcgttttcaacgactcaatgagttgaccggcacaaataaatttacaactaaaaatgttgggattcaagaaattccgacaatgcctttggaattgcaaaaaggttttaataagaaaagaatagatcatcgtcatcatgcaatggatgccataataatagcgtgtgcaaataggaatattattaattatttaaataatgagtcggcaacagctaaggctgaattatcccgatatgatttgcagaaaatgctgtgtgataaagctaagactgataataacggtaactataaatgggtgatcagaaaaccgtgggcatcgtttacacaggatacatatttggctttggaaaatataatagtcagttttaagcaaaatttgcgtgttataaataaagctaccaatcgcttcttgcattataatgaagaaggcaaaaagatctttgtgaaacagggaaaaggggacaattgggctatacgtaaatccatgcataaagatacggtatttggagaagttaatttgcgtaggataaagactgtagctttaaatgaagcgatgaaaaatcctcaaagcatcgttgtgaaagacttcaagagaaaattattggaactttggaatttaggatttgacgcgaagagaataaagaagtactttgaagataatagagaaacttggagtgatataaatctgtctaaaatagaggtttactattttagtaaagatactaaagatcgattctttgctactagaaaaccgctggatactagttttgatagaaagaaaatagaaaataatattactgatacgggtatccaaaaaatattgttacgtcatttggaactgaaagataataatccggatattgctttttcgccggatggcattgatgaaatgaatcgtaatattattcagctgaataatggaaagtatcatcagcctatcattaaaattcgttggtatgaacaggctgataagtttgcagtaggtcaaacaggtaataaatcttctaaatttgtagaggctgcgaaaggaacaaatttattttttgctgtatacgagtcgaatattctagataaaaaaacgaatactataataaagaaaagaaattatgctaccattccattgaatgttgcaattgaacggcaaaaacaaggtttacctgttgcaccggaagatgagaatggtaatgaccctatttttgtattgtcacctaatgatttggtttatcttcctactgatgatgaattagctaatggtattattgcccagcctttggataggggaaggatttataagatggtaagttcctcaggtgaacaatgctttttcataaaacatattgttgcgaatgtactagttgacaaatttgaattttctcctttaaataagatggagcgggctttaactggtgaaatgataaaaatgatatgtatacctataaaagttgatcgtttaggaaatgtcttagaatcaagtagttcatataaaaaataatatattcttattttatggaagaaaacaaaggacaaattcttttatatcaaacggtagatggtgagtcaagaattgaagtaacactatgcaataatacagtttggctgacattagatcaaatggcagaattatttcaacggaacaaatcaacgatttcacgccatataaagaatgtttttgagagtggggaattacaggaaagttcagttgttgcattttttgcaacaactgcttctgatggtaaaatatatcaagtggcttattataatttggatatgattataagcataggctatcgggttaaatcttaccgtggtgtgcagtttcgaatatgggcaacacaaatactaaaagagtatttaataaagggatttgtaatgaatgatgagctgttgaagcgtgcaggtggtggaaattattttgatgagttattatcacgcatacgtgatattcgttcctcagaaaagatattctatcgtaaaattcttgaaatttatgctttgagcatagattatgacccaagtactgagtctactcgattgttttttgccacggttcaaaataaaatgcatttttcagtacatggacatacggctgctgaggttatttacggtcgtgcagatgcagggaaagattttatgggattaactaattggacaggagcagtgccaaagcggaatgatatagaatatgctaaaaattatttgacagatgatgagttggatacattaaatcgtattgtaagtttgtatcttgactttgcagaattgcaggctaaaagtcatactcctatgtatatgaaagactggattcaaaaattggatgattttcttagattgtcaggaaaagaattgttacaacatgctggtactatttcggctgaattagcaaagaaaaaagcaaatcttgaatatgatgaatttaagaaacgcattagtaatcagttatctcctgtagaaatagatttcattgaaaatttcgaaaaagagcagaagaaattgcgaggtaagtaatatattaacctttaaaatatgatactatgataaagaaaacactttattttggtaatccggcttatttgtcattacgaaataaccaattagtcataaaacttccggaagttgagaaaagtgattcattgccggatatctttaaagaacaatcggaaataacgaagccgattgaagatataggtgtcgtagtactagatcataagcaaattactatcacttccggtgtattagaatctctattagagaataattgtgccgttatcacttgtgatagtaaaagtatgccagtgggtttaatgctccctttgtatggaaatacaactcagaatgagcgtttccgtcaacagttggatgcatcattgccattgaaaaagcaactttggcagcaaacaattaaggcaaaaatagataaccaagcatctgtattgagagtttgtgtaggtgaagaaatgaaatgtatgcgaatttgggcgaatgaagtgaagagtggtgatccagagaatttggaagcacgtgcggctgcttttttttggaaaaatttatttgcagatattattggctttactcgtgacagagaagggatttctcctaataatttattgaattatggttatgctatacttcgtgctatcgttgctcgtgctttagtggcaagtgggttgcttcctactttagggatccatcatcataatcgttataatgcatattgtttagctgacgatgtgatggagccatatcgaccttatgttgatgaattagtatttagtttagtgaaattgtatggtgcaaatttggaattaacaaaagaaataaaatcacgtttgcttgttattcccacattggatgtacgtattaatggtaaacgtagtccgttgatggtggctgtcgctcagactacagcttctctatataaatgtttttgtggagaaattcgtcgtattagttatcctgaacgataatggaccgttttagtgaatatcggattatgtgggtactagtattatttgatttgccaacggaaactaagaaggacaagaaagcttatactgattttagaaaaaatctacaaaaggatggctttacaatgtttcagttttcaatttacgtccgtcattgtgctagtagcgagaatgcaactgttcatataaatagagttaaatcttttttgcctgaatatggacaagtgggaataatgtgtatcactgataaacaatttgctgctattgaacttttttatggaaagaaactacaaggtgtaactactccaggacagcaattggaattattttaaaaataagaaatcccgtctgaaacgggatttcttattagataacaactttgtttttaattcctgaatatgtgtgtaactaattggtaattagtttgtaacatatattctgttgtttccaatggttcaaagatactaatttgaaagcaaatcacaacgcgatgaacccagccaacacgacgtacccggttgtttccaatggttcaaagatactaatttgaaagcaaatcacaaccatcgagcccaagaccggcgtgtactggggttgtttccaatggttcaaagatactaatttgaaagcaaatcacaacaatgtattagcaggtcaactttctggtgtgttgtttccaatggttcaaagatactaatttgaaagcaaatcacaacgtcattatcccattcgtttgtatccttatagttgtttccaatggttcaaagatactaatttgaaagcaaatcacaactggtaatgaaagaacgatgctgacaatggtgttgtttccaatggttcaaagatactaatttgaaagcaaatcacaactattgagcctcagaaagagcaccttgggcggttgtttccaatggttcaaagatactaatttgaaagcaaatcacaactattgagcctcagaaagagcaccttgggcggttgtttccaatggttcaaagatactaatttgaaagcaaatcacaactagtaatggcagcttttcccgcattggacggttgtttccaatggttcaaagatactaatttgaaagcaaatcacaacgagagccggaagtgctgtaattggaacagtgttgtttccaatggttcaaagatactaatttgaaagcaaatcacaacgcacgcaggtgcgtcaaggcaagactaattgttgtttccaatggttcaaagatactaatttgaaagcaaatcacaacgcacgcaggtgcgtcaaggcaagactaattgttgtttc

SEQ ID NO: 14546 - DNA, 872 bp, Unknown
  gut microbiota DNA sequence
agagaagaagatcgagacgtgtatcgccgaggcacgtgaatcattggaaagcggaaaagcattggctacattccgtaaatttatatctttgaaccaaagataaagaaacatatcctatgaaaaaggacatcttacaagatattatcgccaataagcgcatcgaggtagcccggcagaaacaggccgtaagcttacagaccttattggctttaggtagcgaccgtatggagcgtgacacacgttccatgcgtgcggcgctggaatcatccccctccggtattatcgccgagttcaagcgtaaaagcccctccaagggctggctgcatccgggtgcgaatatcgccgacgtggtgcccgcttacgaggccggaggagcctccacctgctcgatccttacggacggggatttcttcggaggttccttgggcgacttgcaaaaggcccgcaagctggtggatctcccattacttcgcaaggacttcatcatcgatacctaccaactcttccaagcccgggtgatgggcgccgacgctgtcttgttgatcgccgccgcccttacggaagaagaatgccggatactcgccgagaccgcccatagcctgcaattggaagtcttgctggaagtccatagcgaggacgagctcaaatacatgaatgcggatatcgatatgctcggcgtgaacaaccgtaatctcggcaccttccatacggacgtaaacaactcattcaagttggtcgataagatgcgaggcttctcccctcttttagtgtccgagagcggaatatccgagaccgataccgtacgccaattgcgtgaggccggtttccgtggattcctgatcggagagaccttcatgaaaaccgagaggccg

SEQ ID NO: 14547 - DNA, 580 bp, Unknown
  gut microbiota DNA sequence
cactggttcggatgtgcctgctgtccgggcaacataacccgtttcatggcttcagtaccttattatatgtatgccactcaaggcaatgatgtgtatgtcaatctctttatccaaagcaaggcggatattgaaacggaaagtaataaaataaatgtggaacaaactacaggctatccgtgggacggaaagataagtattgccgtcactcccgaaaaagaacaggagtttgctttgcgtgtgcgtatccccggatgggcgcaagacgctcccgtacccacagatctctactcatttacagacaaggctcaggcttacagcatttctgtgaacggttccaaagtcaatgcgaagcaatatgacggttatgccacccttgtacgcaactggaaagcgggtgatgtggttgaaatcaatcttcctatggaggtacgtcgtgtgaaagcaaatgaccaagtagaggatgaccgtggcaaactggctatagaacggggtcctattatgttctgtctggaaggacaagaccaagccgacagtactgtattcaacaaattcatccccgacggtactccgatggaggctt

SEQ ID NO: 14548 - DNA, 9395 bp, Unknown
  gut microbiota DNA sequence
gttatatttcaactgaataatgtattaatgaaaattgctttatggttcaggtattgtgaattccctgtcagcaaagagttccattaagccggatatctgtttgagtcgtaaaagttcgtcggcatccataccaatattcttttttatccattcgtcactcattccggctttggtcagttctgccacgatatctaccatcaattcaatgctgtgagtgccgcgggcgcggttgtggcggatagtgcttgccattctgtttgaaaggtctttttctataacgaccacgggaagtaaacctttttctcgttcgaacacacgttttgaagttttaagcacacaataacgatgatacccgtctaccagttcatatatatcttcatcgggaatataataacatacacaaggcatagtatagccatcttcccaaatgcttaattccagcaacttcatttcaggagcagctacgtggtttggattataactgttggcacgtaccttttccaccggtactctgtgcacgtgatacacaggactttcgaattcttctttcatctgataatgtttttatatttctgcatcactctgtctcttcttaacttttcttttttagttagggcaaatcccatatatttacatacatggtcatttttcagaatgcaaatacacatacgtttataagtggggatttctttgaactctgcgatgtctatatcgtctagataatccatttgaacaggaagtttgtctgtcttgtagtttgttttcttttgtacgtagaattttatgcccaaatcagttaacttgcgtatagttgataaatctaggcatcctcccttgtatttccagaattcccggcttactcttagtttttccaaataagactgtttggtttcttcgggtaacgtatctaacaggaagtacatatactctttccatgtgtagccttctggtaatttgatgttttgccatcccatggcacgggttccaccatagattccggtaaagtttactccgtttactcggcctaacattctcccccaagtattgggatcgatggctttgtacaatttcaaggtttcctgtgctgtgctgaggaacggactggctacacgttgtctgtccaaaggtactccggctttataataaagctcgtacatttggttgaatggccatttgaaacgggcgtatgctgtccatatatcttcggtagtccagtcatagatagggtaggcattgtataaatcgtatcctagtctgcgggtccacatcaggttgtgatagctgttcagacgattgttaccgtgaatagttctccatcggtctaggctctcttgagttcggatgccaaccaggcagcaagtgcgtactgcatcatgctttttatggtaccacgaggcgaatgaagtttggaaggtgtagtcccacatttcctcattgtagaatgggaaatcttctttcttataacagtttttaggcataggccttacccagtgggcgtgcatgctttcgtcccaagggcgccaataagtttggaacatagaagcacaagtcactactttgaaagggacacagacatggtagatttccaatatatcctgattttctctgaacgtttgttccacatactctgtggtcatttgatactgtgcttcatagtccatgtggtatactccgattttcctgtccagattatgctctctgatatattggatacataaattgagcaagacaccactatcttttcctccagaaaaagaaacatagatattatcaaattcgttgaataagaatttgagcctcttttgaacgagttgataaacattttcccctttagttcttttattattcatttttgttcgtgttgtaaatcattttaatataattagtccagcggtgttcggtttgaaaaccacagttggaaaaaattgcttcgtgtttggtttgaacaattgcatacaaattgtttttaggctttactgcttccaacaatccagctaacacttcctgatcatcgttatggacatagtagttgttaataacataaccgccacttttctgctctacagggacaaaaccggttacgtcactatcttcgacagcaatgtaccattgaaaacgttcggtcgttttaaagggataattgttatttgccctcaggactttaggattcatagccaatggtccaattaaattaaataattgaggttcaaggccatctagttgtaatatttccataacttaaattttacatacgtttacttgaagctacaaatgtataaaaaagattggatataccataaaaaaacgctgccataccttcacaggcgggcagcgcaagctacaatacaaaatacaaatacaactaaacgagatatttttatgctaatagaatgcttttaaacaattccttgggccatcatggcatgagctactttcataaagcctgcaatatttgctccttttacatagttgatatatccatcaggttcagtaccatatttcacacattgttcatgaataccatacataatttgatgtaacttatcatctacttcttgtgcactccaactcatatgcatcgcattttgactcatttccaaacctgaggtagctacacctccggcatttacggctttacctggtgcatacattagtttgttttcaataaacgcatcaattgcttccggagtacaacccatattagaaatttctccaatgcaaagaacggaattttttattaaattacaagcatcttcgccgtttaattcgttttgagttgcacacggaagtgcaatatctactttaacttcccacggacgacgtccggcaacgaatgttgagtttggatatttctctgcgtatggagctacgatatcattgcctgacgcacgtaattccaacatataatcaattttatcgccacttacaccgtccggatcataaatatagccgtcgggtccggagatcgtgactacttttgcacctaattcagttgctttagtcacggcaccccaagctacattaccgaaaccggaaacagctaccgttttacctttaatatcaattccttttgctttcagcatttggtttacgaagtaaagaccaccaaaaccggttgcttcaggccgaattaacgaaccgccaaattccaagcctttaccagtgaaggtacctgtaaattcacgggttaactttttatacataccgaacatatatcctacttcacggccacctacaccgatgtcaccggcaggaacatccatatcaggacctacgtggcgccacaattcaagcatgaatgcttggcagaaacgcatgatctcagcatcgctcttaccacgtggtgagaaatcggagccacctttaccaccgcccataggcaatgtggtcagtgcatttttgaatgtttgctcaaatcctaagaatttcagaatggagaggtttacagaagcatggaaacggataccgcctttgtacggaccgattgcattattgaattgaacgcggtaacctaagtttacctgtacttttcctttatcatctacccaaggcaccttaaatgtaaagatacggtcgggttccaccaatctctcaatcaaggacgctttctcaaattccggatgttgattgtatatatcctcaatagaaagcaggacttcttttacagcctgcaagtactctgattcaccagggtgttttgcctccagggaggtcatgatttgattaatatccataattattatgcatttaaggttttgacaaaatgaaaatcatttctgatgcaaaggtatgttttttggtgaattggcaaaatattttgggctaaattttagtttggtggtgataaaaagttaatcgttgtggtaagaccactctacccaaaagttcttttttattgcgaataagttgcataaaacaatattattgacgtattttgctattacattatccatgtaaatcgaataaccatgctcagcaagttaaaattaaatcagttgtatttcaaggatacctcgtttgtaaacctcatgaccaaacggatttttaatgttcttttggtagcaaatccgtatgatgcttttatgttggaggatgacgggcgtatagatgagaagatatttaatgaatatatgaacctcagtcttcgctatccgccgcgttttacacaagtttctactgaggaggctgcctggaagcaattggagaatactacatttgatttggtgatttgtatgcccggatctgataacagtgatacatttgaaattgcacgcagcataaaagaacaataccctcatattccgctggtggtactgaccccgttctcgcatggtattacggcacgtatggagcatgaggatctgagcatttttgaatatgtgttttgctggttggggaatacggacctgttagtatctatcatcaagctgatagaagataagatgaatttggaacatgatattaaagaggtgggagtgcagatgattttattggtggaagattccatccggttctattcttccgtgttgcctaacttatataaatttgtgttgaagcaaagtcaggaatttgccacagaggctttgaatgctcaccagcgtacattgcgtatgcggggacgtcccaaaattgtattggcacgtacttacgaggaggcgatggatttatataataaatatcagaataatgtattaggtgtgattacggatgcacgttacccacgtggtggtgtggtggatccaatggcaggtattaaattgctggcggagatacgttccagggatccgtttgttcctcttattttacagtcggccgaggtagataacaaggtgtatgcttcccggtatggtgctagctttgtggataagaattccaagaagatgaatatagacttgcgtgaaattgtgtctgatgattttggtttcggggatttcattttccgtaatcccgatacattggaagaagtggcccgtgttcataatttgaaggaattacagaatgttatttttgctattcctaaagaatctcttctttaccatatcagtcgtaatcacgtatcccgctggctgtattctcgtgccatgtttccacctgccgagtttttaaagcagataacttgggattctttgcaggatattgatgctcatcgccgtataatctttgaggctattgtgaagtatcgtaagatgaagaatcaaggtgtggtggctgtgttccaacgtgatcgttttgaccgttattctaattttgcccgtatcggtgaggggtcattgggggggaaaggacgtggtttggcttttatagacaatatggtaaagcgtcacgtggaatttgatgagtttgaaaatgcgacggtagtcattcctaaaacggtggtgctttgtacagatatctttgatgaattcatggataccaacagcctatatcaagtagcattgagtgatgcggatgatgacacgatattgaaggcttttcttcgtgccaagttgcccgaccgtctggtggaagatttctttgctttctttgatgtggtgaaatcgcctatagccatccgttcctctagcttgcttgaagattctcattatcagccttttgctggaatatattctacttatatgattccttatttagatgataaatatgagatgctccgtatgttgagcgatgccataaaaggggtgtatgcttctgttttcttcagagacagcaaggcgtatatgcaggcaaccagcaatgtgatagaccaggagaagatggctgttattttgcaacaggtggtcggtacacagtatggtgaccgtttttatccttctatttcgggggtggcacgttcgctcaactactaccccataggagatgaaaaagccgaagagggaactgtgagtcttgctttggggctgggtaaatatattgtagacggagggctgactctgagggtgtgtccttatcatcctaaccaagtgttgcagaccagtgagatggaaattgctcttcgtgagacgcagactcagttttatgcgcttgatttgaagaatacggggcataacttttctttggatgacggttttaatttgttgaagcttccggtgaaagaagctgataatgatggagccttaactttcattgcttccacgtatgatccgtatgatatgattatccgtgacggaatttatccgggaggtcggaaggtgataacatttgccaatgtgttgcaacatgatgtatttcctttgcctcgtattttgcaattggtacaggaatacgggcaaagtgagatgaggcgtcctgttgagatagagtttgctgtgacattgaaccagcaaaagaagaatggtactttctatttattgcagattcgtccgatggtcgatgtgaaagccaatcttgaggaggatttgaaccttattaaggataaggatgttcttttaaagagtaataattcactgggacatggcattatggaggacattcaggatgtgatttatgtgaaaacagatggttatactgcttccaataatccgaccattgcttatgaaatagaaaagatgaaccgtaaattcttggatgaagggaaacattatatattggtaggtccgggacgctggggaagcagcgattcgtggctgggcattcctgtgaaatggccccatatttcggccgcacgtgtcattgtggaggcggggctgactaattatcgtgtggatcctagtcagggaactcacttctttcagaatctgacttccttcggagtcggttatttcacaatcaatgcctatatgaaggatggtatctataaccaagaggtactggatacccggccggctattgaagaaaccaggttcattcgtcatgtacggtttgataaaccattgatagtgaagatggatggaaagaagaagctgggggtagtgatgttgccggaataatgttctaaattacgtaaaatgtgtcctaattttcgataaaaatagttatacgcttaactttttattatatttgcacgatttttcgagtataaattaaattaactaaacaatgaaaaagaatttgttttattacctgtttgcaatgatctgctcagtggcattgttcgcatcttgtagcgatgatgacgatgaggtaacaggattgactattgatcaggtggtgggtactttcactggccaattggaagtgttgaatcaatcaattcctggcacttctatctttgtaactaaggtagatgccaatacagtgaaagtggaattgaaagattttaaattcagtggattgacaattggtgacattagtgcagagtgcaaagttgctttggatagagaaggggatgattttgacctgaatggacaggctactttgactgtggcagctttggggaacattgaattgcctatttctattacaggtgaggtggatgccaaagaactggatattgatatcaatatcaccaatgtaccggcacttaacacgttgaaagtggaatttgaaggaactaaataatcgggttaaggagaaataaaaaaaggtaggagcttgcaaggaaaggtttctgccttttgtttgttgatgacaaatactatttaaagaataattagacaatgaaaaaaaatttattttattacctgtttacagtgatttgttcggtgacattgtttgcatcgtgtagtgatgatgatgaaaaagtggtaaatcctgtgcctcagacaacttttactggtgaaaacggtttgcaacttacatataatggtgcgccgatgctgggtaagaaagttacttttactcccgatgcaaccaatgctcagaaggcaactctacgtttggaaggggaatttgacttaaatggcatcttggggaaagcaaagagtgctgcagctcgtgaagaggtatcgatgcctactgctcccggtgtgttaccaggaagtccggtggttaccttgccggttgatttgactatcaatggtgatcaatgttcttttgccggtacatcagaaacagattattgtactttctcttataaaggtgaggtttcagccggagctatggagctggctttgagtgaagtgaaattgaagaatgcgaaactggctggaatgacttggaagttgaaaccgtataaccaggaagtagaagagcaggatcctattcgtctggtatgggagtcagaaaaaggaattcctcttttcggttcttttgaaataccggttgagtcggttttgaaaatcgcattacgcatgccgctgattgctgttggagcagaaaataaagtttccgctactgatatgttgggaacagttttgcaggatgtcactttcatggaagacggtaacatcgtggctacttataaagatgctgctaatggtggtacagaatggacgaagtctcctgtaaacttggctcaatacgtagtagagaatgacaatcagataaaggtgtttctgaatcctgctgctatcatcgctgctgtcaataatgcagggagagctgttgatattcagacagttatccagcaggccattcaaatgttgtatcctatgttagtgaatggtgtacctgtagcttttgaacaaacagaggatgctttaagtgtatatctgaatacagaattactgttgcctttgttgaaaacactggttgttcctttgctgtcagacgaagaagtggttgctatgctggtggaattgatgaaaaaagaccctgatttcggtgatatggctggtttagctgagccaatgttgaaagcttttcctgagatcatagaatctactactaaagtggagattggtttgaactttgttaagtaaagaagaaaagctgaaattatttgtatagtagtaaggcgaagagagctacctctcttcgccttttttcatagttatttttatttttgtatttcaccttcgattacctgagcaaagtttttttattttctactacaactaggatcacctgtaaaaatatgagaagtgtaatggacacactgtttttctcatatcagaaaatggatttttgtacgtatatctgtatagaattatatagacgtatgtgaaatcttatatgtctcaaataaaattctacatcaaagataaggacgttttttaaaaagatcaagagcttttaaaaaaagacaaagagcttttttaaaaacgtcttgatcttttttactactactgggactttgtaagctatcattctgtggaagtacaaagtctttatgcgtattattgcgaggaaaaatcctgaaaatatctactttgtatcaagtcgaaacaacttataaaaaagaatatatagctgaaaacaagtagattacgagaatatctgtttcggaacgtaatgagggcatgagagtataagtgagagcatatattattactatttatgtataagtcatttataat

SEQ ID NO: 14549 - DNA, 5525 bp, Unknown
  gut microbiota DNA sequence
cacatcaaaattgatccctaccttcaccacttgcaatccactgaggaaaaagcgttcgggatacgcacttccacatcgacatacatcccaaacagggaaaagatgatgtagaacagttgctgtaatgtccctcataattcgtgttatcacaatacggaacagtagaaaggaattcccgaagaagacgcaaggcaccgtccatatctcccccggctatcgcaagatacatacgggcaatagtcatattgcctttcagcgtgttatgggccaaatatcccgctatatccccctatcggaacttcaacacatcctcattatctccctcacttttcctttccactcccccagttcacgttccgcctcccgtgacagcggcggattgacatacctgtaaaactcgatacgcctctcatagtgttcttctataaccgccttcacctcgaaaaaaagaagaagcgtcatgttattttttttcttccaggctggtaaaaaagccattagccacatggagcttacgctccaactcccgtctgtgcagattcaactggcccagacgtttcactacctcggcagccaattgccgggcctgatcaacaggattcaaatgttccatcggattaaatcgtattttttatatgaataatcatttatatgtccccgttcaggacaaaaacacacgtatctcagttattatatcgaactttgtaacattgaaaatcaataacctgattcataaatatcagggcttgcaaatttaataaataaaaacgaatgaaccaatttaaaatgtcactgtttctgccacctatatcaccggtaaaggacagtaccaccggacgaatcatccagccgcccaccttaacgccctacaaggaaataaccttacaggaagtgtacaaacttatcacatccagcgaacgcctgaagacactgaccgagaccgtgcgccgggcaacggaaaacggggatgaaaaagtctatcgtatgctcaagcaacagacgctaccctacgttactccctgcggcgttttttcctaccgtaaaagcgacagcctgaccggaccgtcgggcttgattgtggtggacatagaccaccttgattcccgtcgggaagcggaaaagctgaaaagacaattgttcgacgacctcctcctgcgccctgtactggcattcaccagccccagcggacacggagtaaaagcgttcatcccctacgacctggcacgcatacccgacaccaaacaaaatacctccgaaaacatccactgggcgatgaactacgtacaagcaatctatgatttccacagcagccacccggacagggaagataaaaaaacaaaccattccggcaaaggcgtggaccgtaccggcaaggacttggtacgggcctgtttcctctcgtatgacgaggaagcattgatacgccgggaaatttaaaacgaatagaaaaacatactcaaaagaatgccggacaaaatttaaacaggcactcaaaaaacaacaaatatcatgaacatgaataatcctttagaaaacttgcggcagctgaccgaagctgtccgcatggcaggcgcagacattgcccctacctatattgaatatgtacaactggctttcgccatcgcaaacgattgcggagaagcgggacgcaatgatttcctctccctctgctccctttcctccaaatacgacgaaaaaaatgcacaagcactgttctcgaacgcgcttcatgccgataaagaagatatacatctgggaaccgtattccatctggccggacaatgcggagtgaagatttccggcagcgccggcttccacaaggcagggacaatggggacagcagggacaaccccagattttccacacacgtgcgcgcgatataataaggtggaaaatgacgtttccgatgataccgacgaggaggaacagctcaccgaaggctccgagccttattcccccctgcctacctttccacaggactatgtgtggccggagctgctggagaaaatcatctccttcggtaaaaagcccgaacagcgtgatgtgttgctcctgggagcgtttaccgtactgggtgcctccctctcccacgtagtgcggtgccagtacggccggaagtggcaggccccctgtatgcagactttcatcgtggccccgtccgccgcaggaaaaagtgcattgacgtgggtgcggctcctcatcgaacctatacacgacaagatacgcaacgaggtgaaagaggcgatgaaaacttaccgccgggaaaaggcggcctacgattctctgggtaaggaacggagaaatcaggaagctcccgtattgcctcccaaccggatgttcctcataccgggaaacaacaccggaacaggcatcctgcaaaatatcatggattccaacggaacgggcctcatctgcgaaagtgaggcggacaccgtatccaccgccatagggaccgaatacggaaactggagcgacacgctgcgcaaggcgttcgaccacgaccgcctgtcctacaaccggcgcaccgaccgcgaatatcaggaggtgagcagaagctatctctccgtgctgctctcgggtacgcccgcacaggtaaagcccctgatccccacggcggagaacggtctgttctcccgccagaacttttattatatgccacgcgtcacccagtgggcagaccagttcggcgaggatgaggtggatgtggacgaggaattccgcctgatgggcaacgaatggaaaaacacgctggacgagctgacgcttcggggattgtttaccctgaagctgactcatgcccagcataaacagttcaacttcctgttcgacaagctgttccatcgttccggcaagatcaacggagacgagatgggcagttccgtcatccgtcttgccgtcaatgcgtgccgcatgatgtcgatagtcgccatcctgcgaagcctggaagattcttctctggtgaaacctgacgcgcatatttcttccgataatctgaaggaccgtatcatcccacgctggaacatggtgattacagacgatgattttcatgccgtgcttgccttggtggagccgctttatctgcacgccacccatgttctttcgtttctgtcctcctccgttatcaagcgccggagcacggcggacaagaatatgctctttgccgaaatggaggacgagtttacccgccggctgctgctggaaaaagcgcacgacaggaggatacctgaatccaccgcgcttacctggctcaaacggctcaccaaacagggggcgctggtaagtgtggacggcaaggggacgtatcacaagaactgacccggctttctatatgtacacgtatgtgtgtgtgaggaaaaaagggggtgtccccactgtccctgtgtccccgtcgctgctccgtgcggctgttgttcccggatagcaaaaatcgtttatggcagtttatttggattgttcagaaaactccggataaactttattatcatctatcaaactcacgttaaataagaaaccattcatgaataagaccgaaacagcccttctctattttccggacagtacgccgaaagtagccgtgcgtcatctgatgcgctggatcgcccagtgcgcaccgttactccacgccctggaagccacgggataccatccctgccagaaatccttcacctgccgccagttgcaactcgtctacctccacctgggagaaccgtgattccccctgaaatctgccacagactgtccgagaactcttcctctctctctgagacgtggattacgcggaaagaataaagagggaaccgtgaaatccgcgcctgaagtcaccacatgacgcaagcgctgaccgagttcccggacagtctccccaaagggtcaaaaggggtcggaaggggtcacgccgcacggacgtgaggttatctttgcagtgtcagaaggaagaagccgcaacccggcacaagattacaaaaatcctggtacaagattccgcggatcttgccccaagtttcaccggatgccgcagcagtgtgcgccttgctcctacctgacacttttccgataataataaccctttaaaaacaaaaacgatgatcaactacagtatctcactccgtgccaatcccagtgaccaggatgctcccaaaaaggcttatgccaacgcccagtactcagaaatcatgacactggacaagtttgccgagcatatctcgacccacggctccaaatacaaccgtgccgacatccaggcggtcctgatccaagcggtggactgtatgcgggagcagcttctggcaggacaacgcatccagatgggcgatctgggcactttctccattcatatcaacagcatgggagccgaatcactggaaacatacaatcccgccatccatgtggaagacctgaacgtgcgctggaaagccggaacccgtttcctcagcttgctgaaagacagcgtattcaacctggtccctacccgaaaggccgccaagctggtggttaaagccctgaaagcggggaaaaacactgtggacttgacgggagaggcttccggaccggatgacaagacggaagaaaacgcctgaactttccggacttctgaagtctgatagtattttgtctttttgagatgaacctgttgttctgaaatagacctgtatttctgtaaagatctgtctttctgaaatgaaactgttattctgaagtagacctgtatttccgtaaagacttgtctttctgaaatgaaactgttgttctgaacaaagtgaagaatctgaatgcaatcatttttatgcccacagattcctcgtctttgtccggaatgacagaaaaaacaaatcctttaaaacaaatattcctatgaacaattcaaagaaaatcacctggaagcaaattctgcacgccattatccaagctgccatagcagcgctcaccgccttgggcgtaaccagttgcaccactctcttttaaaaagcccctgacccatcgcatgacactttttaattcttaattccctatttcaattcaaccatgattcaagaaactttccctatgataatcggtgaggaagagattccgaacgaacgtgctctcctcactcaggaggacggcccgatgatggcatcctccgcttccgtgaaatatatcgtcattcattgcagcgccacacgctccacccgggattacaccgccgagcaactgctccgtgaccacaaaacgcgaggtttccgcacggtggggtatcatttttatatccgtcgtgacggaagtgtgacccagcaccgcaagcttctggaagtgggtgcacactgccgcccctggaaccgttgcagcataggtatctgttatgagggcggtctggatgcggacggacgtccggcagatacccggacaccggaacagacggaacaatttattttgttgctgatgcggatggtgaaaatctttcccggtgtccggataaggggacacagggatatgccgggaagtatcccgaaggcttgtccgtgtttcgatgcggagggggtgttcgg

SEQ ID NO: 14550 - DNA, 60153 bp, Unknown
  gut microbiota DNA sequence
cggtatttgtcatacatgatatgccaatatttcggtgtttcacaaaattctatgatggaattgattccagccatggcatttccaagtttgggtttcatgcttttcagatatctgctcttggcgttataccatcggatgtgtttcaagtcatctgtgaccatcaggctgtcatacccgaaaaaaccgcagatcaaacggttctctttgtagttgtaatcataactgaatccgtatcctccgtctatgttttcatattcctcattgaagataggtggatagaagatcggaacccattcaaacttaccggtttttagatttagtgaggcaaatatgtgggtttggggccaatcttctctcttcatgtttggtttgaatataccttgatttaaaaatatgcaagagtctttgacaaaggcaggtgcattatagtaactacagaaaaaaaatgttgtgaatctgccttcaggggttttgactgtataattacgtagtacctctccttggttatttatagtgctgagccgacctatattattctgcgaaatcaatatttgttcagagtcgggcgaaggtctgcttccatatacagtcggcagcccgttgggacctgtcttgtgaagaggtatccgtttggctatttgttgattctctatatcaaaaatgacaatgtcatataatgattttcgtgtattctcaaagtgaagatattcttttccattttcttcgaattggaacatggatttgcttaagtaataggtctgttcgtctaaagggaagaccagctgtttttctgctaccagttctacttcgttctgtctttttccattgttgttctttgagggctggcaagatacaagggttagtataaaaaagaatgatataaaaaggagtgttcgattcataatcttttcggttttatgatgtatgtaatttatgtggccagtaaaaaaccgaccacataaattgtttgttgttaattggtaggggcaccataatttccacctccttgagagccttcaccaggtctgccgattgctccagtaccacattcgcctggtaggtcaatacaaacggttccattgtatgtccatatgcaatcattaacatcttggttgtaagcacagcgtaaagctccccctcgtggcatttgcacggcaggtgctccaaacaccacttcttcattagaagagtggaggttcaagcttattgcaaatgttgcaataacagccacaatcattgtgaatcttgttttcataggcattcgtttttaatggttagatttattgtacttttccttttacggaaatttctatcggagactccggtacattgcaatgaacatggataaacctttcaaattccccctcttcttccgctcgaaaatgaatcgtcagagtagtacactcgccggttggaacaggagaatccgcccattgtacagtggtacattcacaagatgattctatggcattgatgtataaagtatctgttccggtattggtcaatattacttcctcttcctgtatttccgcttgtctgaaactaccccagtcgatatactgcttgtcagcggtcagagtggtcattcgtttcctactctctgccgtaggtctttgataaggccgacgttctacatatttcccgtcttttaagaagtataccataggaaaagtggttaccattttcagtctggctgatactttgtctttatctaggtaaagattgttgaaatccattgattttttgccaccgctcagcaagaaaaaatctttctccgtatcacacataaagacatatatcgtgtctgttgcttccctgatattgtccattgcctcctgaatgcaactgccacaaccgttgccgggaataataattagaaaacatgagtctgaagcgtttggaaggcagatacctacctcctgcaccaactgacggatacatttgtcttcatcagaaagacacccatagcttgtgagaactataagatataacattatctgctgccaacctttcttcataagtatcagatttagattgtctaaatataagaaatttgatagatgctgacaagtataaatggacttattgttcttgctattatgaatgtttaacagaagaatctgcttttctgatacttacaagtattttgacgaagtatgtcggagataaatatatccgatatttatcacaaagaatgagtctttttactatttgtcattagtgtcgctttcaacttgataaattcttttccattacaaatgccttctgcctgcaacttgaaaagatgctcttccgtttcttctaatcggatagatagttgcagtagcggagtttcaagcggattgatggcagacaggaatttggaagaagcaatctgtacatactgcaaaggccggttgactatttgttcggcactttcttttatcatctgtaaggtacagacgcccggaaccaccggctgtccgggaaaatgaccctgatagagagcatgaccgggattcagctctatctctatttcccgtttcccatcttctctttcctttctatgaatgattttataaaagttctccagcagcatctcaagggttgtttatgttcagtttgtccaattgaattcttaaccgtatcagtggatgcttgatttgtactttccctgcctgtccgtttacgaagccggacaaggtgaatatcgtctttccaaatcctttgccactgattctttgttcaaaagtactacttttctttttaatatgtgctttttcattctttagaaatagatttttgaaatcagtttccagtattttcagcatctttttcttcctcatcggttccatgcaactgttcactatgaaggtgtcgcagtgcaaggagaagtcaaaaaggctgaggccaaagtaggtggagcctaggatacggatttcgttattgggcatttggcgaacaatgagcattccgctgaaatgatgtttcatgaaatccagttgcaggttgtacttttgcgactgtgcttctgcctgcaggatgggaggaagtgccgtagcttcccccgtcacccggtgtgagcaagagagcagaataaacagcaatagcagccagctagcgtatcgtaaactttgtctcatctttcaaagaattgaatttcttgttggagaattcgtattcagtatagttggttgcggtttccgataaacgtagtttgtggacagacatgtcttttttgtctaaataaatttgaatctggttgatatatgcctgtaccgctttgctgacgggcttgatttgaatgagatagtaatgggcgtcttcaaaatattctaaaacatagccgggcgacatgttggacaggtcgcccaccatgcaggcggtaagcatatcctgcatctggttcatcatcttgttggagtgaaggtccatgatgcttttctttccgtccgatactattttcagttggttgttgttgatcacgataaggtagttcatgggctgtgcgtagtccatgcatatcttattgctctttttataatagaactttccttttgaggttattttctcatcgaatacatccagatattttatctgagtgaaattactttcgatggactctatatttttagcctcttgcagcagacgggcttcaaaatctttcaaatcagtaagtttcttcatctgttgggcttgcatcggcaggactgtacagaacatcaagagcaaaagtattttcatgtaggtcatactttatagaggtttatccgtttgtaatgggaagcaaagatagtatattttgggaaaccattcatacctttatcgcttatttacgatttttacctgtttctacaatcgttcacatgggcaattataatgaataaaaaagttatatttctgcgttgcaatatttttttgtttcatcaccgcatattattgttaatcaataatttatagtgaagaatcctcctgtatcccctcgaaacggtttatccgttttccctgtcggagtcagtttggcagaaagcgtcattatgcaggatgaaggtctgttggaattcttgcaaggagaacggtaggatatgattttcacttaggtgaagatgggttttcacctgtgtgaagagctgttgtcaccagtgtgaaaccaccgtttcacactggtgaagcaacagtatatatcggaagtttacacactgacatcctattaagttgaacgaaagtacagcatatcctgtcagatttaatctgatatctacgcttctcttgcaaataacgggtgaatgttccactccatcgcttacataccggtttgggggtattacagacttttttacacggcaagttgttggtaatgagtggaatgaagtggcggaagaattttatattttacgtaagacgaagttatctttttatcggtttgatcatgaagggtgaaccggggctcgtttctggaacttggtgatgttgctgttgaaaatatagaagaaatttattttgtcatgtcctttatcaacctgtctaatgttaccaccgtatacccctctttttctataaagtccagaacttgtaccagcagcctgtcactatcgggcatccggtcatgcagcagaaggatggagcccggaacgagccgtttcttgatgcgttttattattttttcaggagtgggttgctgagtgtccagtgtgcggatgttccagccgatgggaaagtatcccagcctgcgcactgcttgggctagggtaggattggtcactccgaaaggcggccggaaccattggaccggttgcccggttactttttccaattcctgttggcaggtaattaaatcatggcacatccgtttgaaggtatagagagggaaaaagccggaatgggagaaggaatgattcccgatacaatgtccttcttttataatttgccggagcagttcttcattgccttttatcttgtttccgatgcaaaaaaagcaggctggtatgtgtttttctcttaacactttcagcacttttggagtctgtatcggatcgggcccgtcatcaaaagtgatggctatgattttctcttcggtcttcttacgacagaagatgcgcatgtaaatacaggcacggatgctgtaagaagcgtaaaagaaaaaggccatgacgcttactatgatgactacagaaattaagatgtgcatcgcttgattaagatgactgagtgatactttaataaatgatcttgtagagattattctaattgcttgtcattatccgtcagtattctgaacttcttttcggtatcaatcgtattcaagtgtgctaattgctctttggccatctgccgaagatgagtaaaccttttagacttgtctaccttacgcttgattaactctgcattgaaggattccatattcgataatacgactaattcatttatgcttgctacatctctgatattgatattcttatctgcgtattgtggatttgcttcacgccattgtcttgcggtacatccccataatgcgagatttaacaaatcagcttcatcggcataaacaagtttttgattgaaatcttctactttaggtataataaagtctttgattgcatccgtatgtatggaataatttactttactaagtattctttttacgttccattcacttaataaagggtgtgattctgcttctttaagtctttggtattctttgatgagatatagtttaaattcagggctgagccaggtcccgaattcaaaagctatgtctttatgggcaaaagttcccccatatcgtccgggcttggatataatccctattgctttagttttttctatccattgtttgggggttagggtgaaactgtttgttccactctccattttaaaagcatcgaattcgatgcctttaaaatttggattatttagtttttcccataacccaagaaaatcaatcgtactacgtagacgcatccagttttgtataatgtagttagtacgttctctgtctttgaaatgtgccatgtctgtcaggcagatataatcattattatcaggtcttacagatatggatatatcaatattcgtaacagttattttcttcattatttttactacttttattttatgagggataaagttaagcattattcctgttttcagtatcttaaaagcatctttttaataggccatgatgcttactatgatgattacagaagctaggatgtgcatcgcttgattaagatgactgagtgattgataccttgatattggttataaatcaatgcgtaacgggatgaagcttcttctttcaaggcttttgccgccatccagagagcataggatgaggcagtctgatattctccgcattgctctttaaagctgctatgcagggcatgaggaaacagactgtgttccagctctgtataaacggcatctgttgcttcctgcccgttcttgccactgataaaccagtcaatgtcttcgggtgcaagctcgtgagattttagaaaatgatgcatcctgttactgatttccggagcactcatccgggtgataaaagtgtccacccctttcagttcagcaaaagtctgttcctcttcttgtgcgcttaacaggaaaaattgtgctccctcaccggctgtcgttcctttcaacagtcctaaacgctgctggatgatgtagctggtaggggttatttcatccatagcgcctgccagtacatgctgtttgccttcggcaatactcatgatgccatctatcagagcactttcaaaacttaaaccacggtgtacatacgtcacattataagcatgtattttgagtagcaaagctatctgtgcaccgatcgtattaaaggtggactgaatgaaagcggtgggattgagcatctgttcccggttatccatcaaggcgttcataaacttttccgtatcggtcagacaacccagtcccgtagcagtgataatggcatctaccttttccggcgagatatctttcagacattccagtccgcaagctactcccatcttgatcatgcggctcatgcgcctccgcagattggcattggtgatcatttctttataatcaggttcctgtgcggagaaataaggcttttcatttctgctttccgcatgaatagaggcgatacgattgatatatactgggcacatacgctatctgtttagagtggaaaatacgagagatgagttgtttccgccgaatccgaaggagttggataatacatgccgtatgggaagtcccgaccggaaaatcgtttcaggaatgagaccgctttcttcatcggacagatggaagttcagattagggtaaatcagtccgtgacggatggagagtacggaatatacggcttctattccttccgaggctcccagggtgtgaccgatgaaagccttgaccgaactgaaaggtggaatacgggtatcgaagatacgccggatggctttcccttcggaagcgtcgttactgggagtacctgtgccatgtacattgatatagtctatggctccggctgtcagtccggcagaggctatggcctgactcatggaaaggaaaggcccgtttccatcgggggaacttcctgtctgatggtaggcttcgttggcattggcgtaaccgctgagttcacaataaggagcctttgtaagggatttctccgattgaagaacaaggtatccggctccttctccgaggtttaatccggcacgtgtgcggtcgaaaggacggcagtgctctttgtccagtatcatcaatgaattgaaaccgttgagcgtgaaacggcataaggcatccgttccacctacgaggacggtgtccagataaccgtgtcgaatcaggcgtgcccctaacataatggcatttgcagccgaagaacaggcggtgctgagggtggtcaccattcctttcactcctaaataagcggctatcatttcggtactggctccacagtcatgggagataatatcacgtaatcttccttttcggttatcctcccggaaagaggcataaaaccgctcgcttgcatccattcctccgatggaagtggaagaaatgagtccgatacggggagaagcgaaatcgagttccgcatcacgggctgcctcttgagctgccaacaagcctagcagggctgtacgtgaatacgttttgccggatggaaggaacaggatttgctttaattcttcattgctttgtttcacttcggacacgggtacgtcaagcacggtggggaaaagggtgattttccccataccatgttttccggattttaaggagtccagattttcttttactccttgtcctatgcccgaaatcactcccagaccggtgacatagatcttcctcatttctgatgggcggtgatgtagtctgccagggtacgcaccgaatagaatatttcctttcctttggcaggattctctattttaatgccataattcctttccagaatcaggataatctctaatgcgtcaatcgagtcaagacccaatccgtcgtctccgaataaaggtgcttcactatcaatgtcctccggagtgatttcttccagattcaatgcttctattaattcaactttcaatttctcaatcaattcttccatattctttattgtttttcaatcagtttaaatactgctctataggtgtttttcaataattcacaccatccgatgatacaatagttcagtttccctttttgcatgactatacgtgcgtatctttccagtttctccggctgataggctttagttatgaaaaaggtgttttccccttgtatcttgtggcggatgcaaatctcgccggacactacattgggtagtgtgtaaacaaatacagccggactggctgcccggtcttcgtcctggtctatcagttgctggtgtctgatatccgtatgtagggatgaagtggcgttggcaagtaacattcccatttccagtggggcgaatgtcttgtctttcagtaagtattcggcggcaacatatcccagtttgcaaaggtcatccattttatagaatttcatattgtttccgcctaattttttataggtatcacgtataaatatgccgaaatccggttcttcagaatgaaaaataagttcgttgtttatgaagacagaactgttttcaatacgaacctcccgtgtacatcggatttcgggcaaggtgttgtcctcatccttgaacggagcatattccggtaaagacaagacaatggctgcgttacacccaccgaatcccgaagcggtttttacacaatgtttcatcggaatgtgttggtgagtcgcatagactggtataggcataggcacacccggtgtttcgtaacccggagtgccgaacaggatgccttgtttcagttcgtgcatacagacaatgctttcaatgattcccgatgctcccaaggtatgcccgaaatagggttttaagctatgtgtgggaacttgttccagatgagccagcgtgagggctttggattccatttcgtcattgtatacggtggccgtgccatgggcattgacaaagctgatgttttggagggctgttcctgcctcctgcatggcttggcggatagcgaaaaagagtccgtctcctgtacgggaagggccggagatatggttggcgtcattacttatggctcctccggagagaatgatgctgtttggcgtcttttccgtacttagtaatacggctccgcaagcctctcccaagttcagtccgtcacggttgctgtcatacggacggcatggacgggagctgagggaccggaaagacaggaaaccactggtgatgaaatgagagagaaggtcacctcccgctacaattaccttgcggtagattccgttctctatcatgcgttttcctgttacaagggctgacactcctgatatgcaggcgttggagatgatatgtacccgttcctcagcatggaaataaccggcaatgttttctgccattttccaaagaaagaccgcttcatcgggatgttccgtatgacgggtcagtaagtcgatgttcccttttgtggtagagaggatgagtccgcaggttttatcctccaaagtttgtccggactgacggatgaggtcgttgatggtcaatataaacagttgttccatccgggtatatgcgcttattcctgctgtttctgcctgttgttgcaatctctcttgcgagatagtagctgccaataggggagtgtctgcaatccgtttgtccgtctgcagggtgatgccactgtggtaggcccggatggcttccaaattttcctgtgtgctgaaacccagcgcgctgatcagggtatcatgggtgatataggtagtcagatgatgttccatttctttttccactctatgtaaaaggcaggattaaccaattccagttctctatttgtattcaggaatacctgtgtagtggttcctgttgccacaatgttttggtctgatgcccggtagatggtgtattcaaaaaggattttggcagcatcactatgaatataccgtgtctcgacaatggcttcctcaccgaatgacagcgactgtttgaactggcagctcaggtctacgataggaactacatagccttcccggtagatgctcatatagtccaagccatatcgctttccgaaagcttcacgtccatcttcgaaataacgcacatattcaccatgccatactatctgcatggaatctatttcactgaagcggaccttgatggtggtccggtctgtcagtgctgcctgctgtggacttgtttttcgtttcattcttttttcagatatattttcatccggcattcggccagaagttcatcgttttctttcacctcggcggtaatcagtgtgatatcgaatacttcctgcacaatggttattccggtatataattctgctccggcagaaggaagacggaatattttcattttttctacagagccgataaagcctagtggtacaggctcttctcgcagcatatagatatatcctacccgtgccgctgctgattgggcgatgtgttctatgattcctgtttcctgtaatacgccgtcccggcagaacagattatcgggggtgacggtcagccctgaccaggatgtattttcttctatcccatagaaacggtctatcatgaccatgggcggacgttgtggaatcagccggaacagttcgtctccccgacaaatgatttcttttctgttcatttcagtctgcattgcaggatactgtgtcccagtcctatgttatcatgaatctcttccacttccagtccggcatttttaatacagcggatcaggtcatccgaatggaacatcttgctgttgccgttggccatggctgtgaagtaaaggctgatttgagtcaggcagtaagagcccgtttcgtatggctgccggtcccacagcgtttccatgatgtagactttactgtctttgctggcggactgtgccacacgacttagaatactggttgcttcctcttccgaaaagcagtccagaaactggctcatccatacggcgtcaaagcctgaaggaaagggcacggtccgatccagcagattggcgccgtggccatggatgcgctctgcaccgggcacgccggcagtttgttttctcatcatttccagttgttgaggcaaatccacaatggttacttctacttcttgattatattggacacatcgggttgcccatctgccggtgtttccaccaatatcgagcagtcgtttcggtgagtgaagaaatacaatttctaatgcctggctgaacgagttgtccgagtagaaatggtcaaagccaaaccagcttttctgtacctgttccggcagttgggaaagtccttcgtaaatggtaggccatccgccgaatactttcaatccttccggctgaccatttaaaagagcctcttccagatagaaaagtccttgatagttcacatcgtgattgaattccatattgacacgtgccattttatcattcagcagaaaccagcctgccttggccagtacatagcggtcttcttccaacaggatggttccgatggccagcgatgcttccagtaatacttgtgctgcatagcgtgtcagtccggtctgcacactgatttcttgcagcgtgtatcctttccgtttgtcggccagcaattggaatattccgaatttcaacatcagacgtgaaacttggaataccacgggaccgaaagcgatctcttgcgccagtctttgtgcctctacagctgtcaattgctcttttgtatatcttttatgcatcataatccagatttgtatttatgcccagaacgggtagtaattgaaccattgttccggatactgccggacgattttttccagcgtttgtgtatattgctccaataatgcttgttcggcccgcttctctttggtatgtactaccgcctcggcaataaagaaatggaaacgatagttttttttcgcttcacgcatggcaaaatagaatacgacaggtactctcattttggaagccagcaggaaaggccccatcggaaattcggcttcttttcccatgaacggactgctgagtaatttctctttattcagatagcggtcaccttgaaagcagacatattctttgcgctccagtgcctctgtaatacggaatacatgggtcagattgtcttcattcacgggaattattttataatcgcgtgtggaggcattcttttccagaatctcttttatccgttcgtgttcggcatcaaacatgacaatattgatttttttgccgtattcatcgaagaaaggagcacctatttcccaattacctacatgggcgcctatcataattacgccggtgtttccattcagtacgttcaaaaatgcctgatagttctcgaactcgaaatgatatttgtctgccatcccattgccgatggctactttgtcaatcaatatctgccccagccggtagtagtttttcaataacattccggcggctttggcacgtccgtatttcagtctgttccgtgcgtattgccaggtactggcggtagctttcggtgcgaaaggtataaaatagaggacgaccaatgacagaaagccgtaagccgcagtgatacccagacagcgaatcatgtagatgaagaacatgtatccgaatgtgcctcctcttgttttacctttccatgtttcgggcatcagtcttctttttgtatgtgcgaaattaccagattatagaaatcctggaaggttttgataccggcaaagtctttggctgtcacggtgaaaccgaaattcctgtcaatcagtactaccatatctaccaaatcaaggctatccaattccaaggtttgcatcaaaggggcgtccggctgaatcaattctacatcaatctcaaattcttcggccagggtggttctgatcttttcgatgatttcttcgttggtcataaatttatatattggtttaaattaattgttttctttgaatttgcggataatcagtgaggaattggttcctccgaatccgaatgagttggacaagaatgtgtcaaattccgtttctacccttcgggaagggatattcagcagggcagaggcttcatcgggctcctcaaaattgaggttgggtgcgatgaagccgttgttcatcatcaaagtggagtaaatgacttcactggctcctgccatccacatctcatgtccggtctgtgatttggtggatgtgacgtagggatgatggctcccgaatacttccgctatggcttttgcctcgttcaaatcacctacaggagtggatgtggcatgtgcattgatgtatgcaatctcttccaaaggaatacccgcatccttgactgccatctgcaaagagcgtctggggccatccacattgggtacggaaatgtgatctccgttggatgagaagccgtatcctatgacttctgccaggatagtcgctccgcgctttacggctgattcataactttccagcaccagactggcgcctccgccgctaggtactagtccgtcacggtttttatcgaatggacgggatgctttttccggttcgtcttcccgggcggagaaggctcccaacccgtcgaaactacccacggaataagggtttacttcctgtgctcctccgcacagaatgcagtcctgaagtcctgatttgataagcagataagccatgccgatggcgtgtgaaccactggcacaggctcccgatatagtgaagttaattccttttagatggaaaataaccgaaagattcatggtaatggtggaattcatggactggaaaatagaaccggaaccaaccaatgccgtattctttttctcgcggataatatctattgcttgaataaccggagcagcactactgtcattgccatacagtattccgacttcgttctccaacaggaacctttcttctatccgggcttgccggaatgcttccagggtagccatataggcgtattctccctgctcggcaaggctatggcgtttcttgcggtccaataatttcttcaaatcgggacgttcgacaagaccggttaacgccgagaaatagcccatttctttgcgagccggagcgattccgatgcctgactttccttgaaacagtgactctttcacttcctcttgattcctgcctatgcacgaatagatgcccattcctgtaataactactcttttcatcttttgcttacgtatataatcctccattgatggaaatcacttctccggtaatgtaggaagcttgcccggatgccaggaagcctaccagtgcggctacttccccgggctcgccgaagcgtcctaccgggatgtgttttttccactcgttctcatcaattccgtctgtcatatctgtacggataaatcccggtgctatggcatttaccgtcacgtgttttttggcaacttcctgcgccaacgctttggtagcggctatgattccacctttggctgccgaatagttggtctgccccggcatccctttgatgcccgacagggaaacgatattgataatacgtccgaatcgctttaccagcatattcttcagcaagggttgggtgacgttaaagaaaccgttcagactgatatccagtacccggctccattcttcctgttccatccacagcatcaagttgtcacggcgtataccggcattgttcaccagtacctcaatgtaagtatcgggatgctgttttatccatccgttcagtgcggcgtgtgtggctgctgcatctgtcacgtcaaatttcatcagttcgccatccgagccttgttcccgtatttgttgcagggtggcttcagcttccgtatcgttgctttggtagtttatcagtatatgatatcccatttcggccagtttcagacaaatggctcgtccgattccccggcttcctcctgttactaatgcgtatttcatttttcttgaaacctcccttttttaagatataccatcatgctttctatctctttatatttaggtgtatcttcccggaaaacagggaaaaatgctcgtatttctttatatacttgttgtgaccgggggcttatccggtcggctatatccaggcaatcaatggcttgtacaatacccatcataaggatagccatcacctgataagcattttcaatgactgtttttgccatcaaggcggaattggtacccatgcttacaatgtcctggttgtcattgttgttggggatgctatgcacatacatcggattagacaaagtctggcactccgccgtggtagaagtcgcggtaaattgtgatgcttgcaagccatagttcaatcccagcactcccatattgacaaagggggggagaatgccgttgatgcggtcgtgaaacaggtaattaatctgccgttcggcaagcatcgtcagtttggtgactgctattttcaacttgtccatttcaaaagatacgtaatctccgtggaagttaccaccatgatatacattctgtgtgtcagggtccactatcgggttgtcacaagctgaatttatttcgtttatcaatactttttcagcattgagcaattcatcataaaccggccctagaatttgtggaatgcaacgtagcgaataatagggttgcactttatgggtgaagatcttctcttcgtgcttcccattataaagttcattctctcttttgcgtacacacaggctgctttttacccattggcgcatcatgcgggctatctcttgttgtccttcatgctgtttggccccgttcagcggttcagacatgaagtcatcgtatgaggcggctatttcattcatcataacagatgcacctaccgcccactgcataagttggcgtgcgtaaatcagattgacaatacctatacctgtcatgactgaagtgccgttggtcactgaaagcccttcgcggatgtgcatttgaaaaggttgcaatccgttttccgccagcacagaggccgtatctcttttcttgccttggtaaaagacttctccttctccaatcagagtgagggcgatatgggcgagttgtaccagatcaccactggcccccacactgccgtgttcgggtacgtatggaataattccccggttgataaactcggtaatgagcagcgccagttctttatgtacgccggattttccttgcagaaaagtatagagacgcgctatcatggcagctttgacatagagttccggaaggggttgccctgctccggtagcatggctgcggatgatattatactgtaattgtgacaaggattcatcttcaatacggtattgggccatcggtccaaagccggtattgatgccatagatgatcttgtcgttggagaatgtttttagaaaattgaaactctcttccaatttttgcatacatgggtcggagagtgtcagtggctcttcttcaaacaaaatcttatacagggacgctaaagttatcttattctcagctagcattggattggtgtgataagcagttttgtataatttctgcaaaaatagttatttaaaaataagtattaccatccgaagggagatttttcagttttgatggttatctgaaaggttcaccacagattatacaaataaacgcagatgcttcttaaatcattgattgttaggttggataatctgtgtgaatctgtatagtctgtggtgaaaaaatatagtaccgctctacgtattctatttattcagtctccatgtgaaaccatctttggtatctttcacttcaaagccaagagcggctagctcatcacggattttatcacttgtagcccagtctttattggctttggctttcatacgttgttccagcagcatatctactactttgccatatgcctcttcacgtgcctcgttattggcggcttcttcttttatacccaagatttcatacataaagagatggaacacacttttcagctcttccagatcttcggcggaaagggtcgcttttttatcaagcactgtgttgatcatacgggcgccgtcaaacagataggcgatgacaatcggtgagttcaggtcatcgttcatggctgtatagcatttttcacgtaagtcttttacgccttctatgccggtggtttgtgcgcttggggtgatgcgttcaagaccttttacagcttctgtcagtcgttccaatcctttttcggctgcttgtaatgcttcgttactgaagttcactgtactgcggtaatgtgcttgaaggatgaagaaacggatggtcatggggctgtaggcttgtgtcagtaacttgtgagtaccgtgaaagaactcatccaagttaataaagttgccgtatgattttcccatcttctgcccattaatggtaatcatgttgttgtgcatccaatagtgaaccatgtcatctccttgtgaagccacgctttgtgcgatctcacattcgtggtgtgggaaaattaagtccattccccctccatgaatatcgaaatgctcgcccaaatattttttgcccattgcggtacattcacaatgccaaccgggaaaaccgttactccacgggcttggccagcgcatgatatgttcgggttgtgcacatttccacagagcgaaatcggcaggattacgcttctcgctttgaccgtccagttcgcgggtggtgttcagcacatcgtccaggttacggccggacagtttgccgtaatgatggtctttgttgtattttgctacatcgaaataaacggaaccttcactttcataagcatagccgtttttcagaatttcttctaccagctctatctgttcaatgatatgacctgatgcatgtggctcgatactgggtggaagtacattcaaggcttccattgccttgtggtagcgattgaggtaatattgtactacttccatgggttccaattgttccaaacgggcctttttggcgattttatcttcaccttcgtctgcatcgtgttccagatgaccgacatcggtaatgttacggacataacgtaccttgtatcccagatgggtaagataacggaacaggatatcgaacgtgatggcgggacgtgcgtgtcctaaatgggcgtcgccatatacggtaggaccgcatacatacatacctacatgaggggcatgcaagggaacgaaaagttccttttgacggcttaatgtattgtaaatggttagtttattttccataattcattctattagaattgcaaagttataaattaaagtgtgtatttggctaataattaacaaaaaatctgatgctggtgtcctctgcttgtctacaaatgatgtttgttggtttaaggaatagagatttatggtgataaataaaagtaagaattaggataaaaggttgtctttgaacgtaaaagaacaaaataatgattttttgtatggagattagggaacctaactctttttccttttcatgaaataggtttctcttgtatctgtttaatgatctttaatttctgctattgacttgtaaaacaggaccactgccccataaacattggtgttgttttgaggggcagtggtcctgtttctatatgaagtttgcgtgcgggagcgggaatgttatttggatttctttccccaatacgtcttgttgttggcatagccggcatagacgatggtatgggtacgtggattggcttcccaatcggtttcacgttgcagataaagttccactccgttaacagtcagaatctgttggtcggcgtcatagctccacatactgcctttccaggtaccttcggtgatagtgtggtcggcggcgagggtcattgttgctgaagttctctgctctccatatttgtatgtaaggtcgatgtgttcccaattgccgggcaattcttcttcggtgatggctactttgggaacggctccgtaacgttcgggcattacgagaggccaaccgtttttcgtccagcggatgctgcgtagatgtcccatcatgatggcgttactggcgttgatgcccggaacatccttaggcatgcgaccttgtgagacgtagaaccagttgtctttgccatcatcgaagatagcacagtgggcgatgcctacccagccgtagcctttgctgaatttatagggatgggtcactatgggcagtgcatcggcaccggcggtcacgtctttgccgtcaatgcctacgtagggaccagtgatgctcttcgaacggactacacgggtgttgtagggcacgtcaagggcgtcgtaggccaggaagaggtagtagtagccatcacggtaaataatttctggaccttcactggcttgccagcggttacctgtctggcgggtggcgattaactgaccatactcagcaggtgcttggcctgtagcccaaggctggcccaaagtttcggcaggcttgcctgtctcgccattgagtttgagagcagctatgccgctatgccatgaaccgtagaccaaccagtgttcgccttcgggcgtgatgatgtaagaggggtcgatggcattccatttgtagtagcaattggcccagtcatttggctttatgttgaagttaagtcctttgtcagaagcattggtgatgacgtagcctttgtccacccagccgttgttgttggcggggtcgttgttttccatcaggccgatgaaggcgcgctccgaccaggtgttggcaccgttgagtgtgccagggcagacgatggaatagtacatgcgatagaggccgttctttaccttgcgtactacgggagcccaatagccgaagtcattaatattagggttaacttcggcaagtcccatttctttgcgtatttcattgagcttaggtactacccattcgggcaggttcttcattgtaccgccgaggtattcccagttgacaaggtctttggaacgacgactgtggaagtgcccgcctgccgtgtgggcgtttccataggaagcatctgtctgatacatgtaataataaccatcttcggccaataccaccgaggggtcgtgtacgttggcaagattccattgagagcgtttgctccagtcacttatcgaggtatagtcatcggcgtaggtgggggccacataattcttgagttcatcgtctaagcttaagctttctgtggtggccgtgatcacctcagaatagacatagcggctgtcacagtagacgtatgcacggatatagtaagaggtaccggtggtcaaggttgagagggtggcgctgaaattctcatcggcattcaccacgtggtctttgatagtcggtgtggaagttgctgtactgtaacagaagcctttcttgactatttggttcagatcacccgtaaccgacgcggtgacggtcaatgaggtgggtgtggttgtagttactttcggagtacttacagttgcataatagcggtctatatcttcgctgttgtcagaacaagcggctaaaacaaggaatattggtaagaacatccacagggataatagttttttcatctgttgatagtttaaaggccatgccgcttcttctggttcctgaggaaaacggcatggtttgtgtgattactgattcggcttagaagacgagatgtccgccttcaatcgttaaagcgaagttcaagtcgttcatatctactttgttgatccctaaatagtattgggcataggaggtacctgaagtgccttccattaccgcctgaatgtcggttgtaccattgccgcaattggtcacgtagacggtgactttggctccgttcatatcggcaagccaagtagcccagtcgccttgtgtaccgttgtgaacgaggctggcatttccatcgtatcctgcaccccatccatagttgtcggcgcgtaccactgcatattcggcaagatcggctttgcggagaacgacagcgaagttgctccagttattagccaggctggtgtaattggtgaagctgatggacttagtttcaccgatcggcacgttgaaattgtcagaaaagacagtccaccactccgttgtattgtcttcggttcccagaatgtctgcagagttgctgacagtggaaactgttgattcggccactttaactgctacggtagcggtagcttcatcggcagtaatggttacggtctgtgtaccggctttggcgacaatggcagagaaactgagttttgtgttgtcaataatttgggtgcttccgtcggcataagtagccgttactttcaatccttccggaaggaatgccagcgtacgatccgtcatcgcctcggttgcagccgaagtataatagtaatattgtgtatgtgtaggttgagccgtcacttggatggatacaatcttttccactacttcaaacgtagcattggctaccaccggcaagttgcaattctcacccttgaaggtcttgttatagatggctaccagtgtcttcgtacccagttcttccatattggggatggcggtgaactggagttcttcggcggttacggtcttagtcaccccttcttcgaagctgacgacggcagtaataccgaccacggcttcttcgagtgaagtgccggcattgacctgatcgggtacattttgcagtaccatcgagagcggattcttgtcctcggcagaagtaaggccaccgataggaatgatgtttgattgtaagaagttgatataagagccttcaggtactaggaaacagcggatgttggtattgctcttgtctatattcagattgggtaacttgtacggctgtttgtaggttttggttgccgaggcgttctggattttgatagagaaggcattttcactggttcggtctacggtgagtgtcactttgccgcccaatttctgtacagtttcgtccagattatcaacgggtgacagcatcagcgtgctggatgtgtatttgaaaaaaagatgggaaccccattgggagttataggccaaagtatcgtttgtagtgtcaaaacgataagcaccatattccgtatatccttctcctccacggtctgtatcgttggtaatgacgagggcgaagtttttataataggtattgtcggcgggattgatgttgagattgaacaccccatgccatttctgcccgtcgggcacgacgtaatacttggagaaagctgtccagaaaccggaggtgtagtctgtgttaccgaaggagtagacatcttcctgcataccttccagtacttcttcttccggctctttctttgaatctgctatagagtccactttctcggagatccagtcaggggcgtttacatcatataactcgccaccctcgcagcttgacaatgccatcaaccccaaggtgatggaacagcaaacgtatactaattttctgagtattctcattgtcttaaattttaataggtttgtttatttgcttaagtcaacaaccggacgaactgtccatccattttcactgaaataagtagagttgtctgtgctgaagttcgcggagttaccactcaaattggggttcttgttcaacaactgctgtacgatgggcaggaattcgtgtccgggtaagtaagtgtcgaaagaacttttcagttcgggatcggttgtgatatcgttgtagtttacagggtccttggttccgattaaagaacggcgtacgacgctgtgttccttgagttgttgcaaacggtcattcttatagaagaatccccagcggataaggtcgaatccgcgtccgaactcgcacccgaattccttcggacgctccacattggcaatctgctcgaagagtttgtcggctgtagggaagtcagccagttcaaggtcgggcaagtcagcacggttgcgcacttcgttaatccagtcgatggcctgttgtgtggggccgttgacttcgttttcacattcggcggcgcggagcagcacatcggagtaacgcatcagacgcaagttgattccatcgtgcaaacctgtaataaccgtgctatagagaccggtacgaaggtttgtgaacttggcgatgggcagaccaccgtatgtgttgttggttacgatgttgtcagtggctgtaagcttgttcgtataagctacattaccgaactcgaaatcttcccagtcggattcataagtaccgatggtccagtacagacgtgggtcgagtttcccgtcagttgtacgctcagctttgaagagatggtagagccacggggatgccgagatgtctgcccaaccaccataattgccgggagcgaagttactctcgatggccgaaccttgggtggcattcggactggtgttcaccggagtccactcgtcatcggttccttgtgattccaagtcgaggaattgcacttcgaaaaggctttctttgttgttctcataggcaggaccttcacgaaagttgtcgccatagttatccatcagttcataagtaccatatttcttgccgataatgtctttcagcacagtaagggcatctttgaatttatggcgtgtcatgagtgcacgggcatagtagccggctgcagcaccgcaggtggcacgtcctttttcccattcaccaccttgatctcgtgagggtaacaattccatggcttctttgaaatcactttccacttggtcgagtacggcatcgtatgtgctgttgccggtataaagtccatccaatgaagaataggtagcataatctgtgatgaggggtgggttctggtaataaccaaccagattgtagtatgacaggccacgcaggaagagtacttgtcctttgatgcgtttcattttctcggaaagctggctgttgtcttcatcgcaacgggaaatggcaaaattacatacattaatggtatagtaccattcgcgccagggccaccacgtgatgtccgaggttacttccgcattcaggtcatcgaaaggcagataccatacttgtgatgagttccatgcttcatcaccacgacacacgtcgatggtgtagcctacacgggcgtaagaaccttccatacggatatggttataggcggcaataacgctctcttccaaatcatcggcattgaagccgaatgtgtttgaggtttgctggttgggattcaacagctccaaattatcattgcaagaagccaatgtgcctaatcccaaaatgagagccaatgcatatttattgagtttcatattgttatgtttttagtgattagaaagtgaaatgaacaccacacatgaaggtacgtgcggtaggataagaacagaagttatatcccggtgtgaaggtacctcctgcatagtctacattataacctttgtacccggtgaatgtgtgtaaattctgtgctgacacatagagacgtacgtcggatatgtatttgccaaaccattcgttggggaagttgtagcccaattctatattggcaattttccaataagctgcgttctgaattttgcggtcgctgaagagatcgttccaggccaagctggcactgttggtaacataggtacgtggcacgttggaaagataggtactgccgtcttcactgaaacggttcgcgtcaagcatggctacatctttgttgccccagccgtagcaggagttcagagagttgtggatatcatcgcttacgtgatagttgagtgcaccgaacgtagcgatgctcagatcgaaacgtttgtattcaaagcgggcgttcaaaccgaagttgatcttaggcataccgctgcccagtactacttggtcataggcatccacctttccatcgggctttccgtcgggaccgcttacgtccttatagaggcagtcaccaatctgggcaccttcttgtgtggcatggttgtccaggtcggcttgtgtgcgggcgatgccgtcataaacccatccgtagaacttaccgatttcttcacctacgttggtgatgtaggcaccggatatatatgaatcggtaccgaagcccaatgaggttacgcggttacggatggtgctcaagttggctgacacttcatatttgaagtcgtggtcgcggttgcggtaggtagtcgtaaattcaaaacctgagttattcatcgaggcggcgttcatcgttacagtggtgttggatacaccggcttgctcaggaactggaacggcatacagcaggtcttcactggtattcttgtaccattcagcggtgaattccaaacggttgttgaagaaggcgaggtcgatacctacgttgtagcttttcttcttttcccaagaaaggttattgtctacgaaagtagaaatggcagaaccggtgatgggtgtgttaccaaagctataagtcatgttgttacgtgccattacagcctgatacatgtattcaccgatgttttcgttaccgagttcaccatagctggcgcgtaccttgaacatgttgacaatgtttctgttgaaggggaaaaaagtttccttgtcaaaacgccatcctaaagatacggaggggaaagtaccccaacggatattcttggacaagcgggaactgccgtcgcggcgcacggttgccgagaacaggtaacggtcatcgtagttgtagttgatacgcccgatgtaagagaggatggtgtgtttgtattcgaagctttcggcataagtgttggcggcattctgaagttgcaggaagtaaggctcggtgaagttgacgccccagcctgtcaacaggtcggtgttttcttcttcgtaagtctggccggctaccaggttaaaatggtgtttgccgacggtagcatcataagtcagcacgttttcaatcaaagcatcggcataagaacggctagccttagtgaggcgttcgttgctcttggccagatagacacgattgctctgtacccatgcgggaatccaggtgaagtccttgcaatgggttttgctgtaagagagattgactttatagttgagcttgtgattcttgctgtcaacgccaatcatcttcaggagatccacatcggcagaagctgttcctacgaagcggtccacgcgggtgttgcgcttcagcagattgttgaccagcaaggggttggaagccgaaatgtcaccatgtacagtatcgtagtaaacaccatagccgtaagagtcatagttgaagttattggcgatacctaccagattgtcaagtacccaagtagagttgtcataggctttgatggtgggctgcatcagcaaagtaccacgcagcacattggttacgtcgccatacagaccttgaacgtattcggaagcgtttgacaaccccatgttgtcttgatcggagtgagagtagacaaggctggtatggaacttgatgaatttggtgtccatcgtgttgttgacacgtgccgtgtaacgttcatagttaggaccggcgccttccagtgttcctttctggttgtagtagtctaatgaaacattataggtgttgtgggcgccgccaccggagagattcacattgtgattctgacggatacctgttttgaatacttctttaaaccagttggtattggtgttgtcctggaaatgatattttccggtggtactgtccagcttgtaaccgccgggcagcggagtgttggagttggtacatgcctgaccgatgtattggctgtattggtcggcatccattacatcatagacattactggggatatagtccatacccacgtagccattgtagtctactttcagcggttggtctttctgaccgcgtttggtagtgatgatgaccacaccgttggcggcgcgcgaaccgtagatggcagcggctgatgcgtcctttaggatttggatggtttcaatatcgtttgaagagaaatcgcggatggaggtacccataggaacaccatcgataacataaagaggagaagtgtcaccgaaagatccgacaccacggatgcggacggtagggtctgcaccgggctgtccgtcggaggtgacttgtacgcctgatactttaccttctagcatggtggagatattggaatgggatgtctgtttcagggcttccgcatctactacggctacggaaccagtcaagtcggatttcttctgtgtaccataaccgatgacaactacttgctcaagcatctgattgtcgggttgcaattggatggattcaatgatggcgcggttgcgaacagctacttcacgatccttgtagcctacatagcttatcgaaaggatagcgttaccggcaacctccaattggaagtttccgtccacatcggtaatggttccgccttgtccgtctttgattctgacggtagctcctgtgaggggttcaccttgttcatcgataacttgaccgcgaaccttgatagtcggagattgcgccacggtagccataacaggtgtggaatacaccatcatgccacccatagcacacagactaagcattacggaaaataataaatgtttcctcatttttttaagtattaaattagtagattaaattgttgctgatatattgaattgagatgttggattattgtacaatccaatgttgaatactctaggtagacaaaccacagagtttataaatatgctggagctattcttcataatatttaagattaggattaaattttaaaagcaggggtctcttccgaaagttgagtaccgattgcatgacaaaagtaaaatttatgccgtaaacaggggtggacaaacggttttatagggtggacgaatgaataatgggaaaaaatgtatttatttcgcttatagtttatgtcttttggaggcggtgagataggctcaggagaaggcttttttataaaaaatcatgtagccggacaacctgatgaaggactgtccggctacatgagggataaaatacaattctctgaaaggaattatttcacaagtaaaaatcctccttccgcctgcatcgtaatgctgacttcatcattcctttttaatgttatctcttcagcgtgaggatttagttttttatcgtcctgataaagcatcactttatctcctttagtacacatgggaaggttcaactttaatttcagcggttctttttgtgcattgattccggctatataccattgatcggcatgccggcgtgccagtactacgtatttgcccggatagccgtcaatgaatcttgtttcgtcccatgtggtgggaacttgcttcatgaaatccaaacaaacttgaggggcatcggtcaggttattaggcgccaacgcaaaattctgaataggattttggaataaaacggctgttgccagttggaatacatcagtggtcttgcgtatgcttcctccgtcattgttgcggttgaggcgtttgttgaggaatgtgccaccaaactccatgcaaccgatggtgttgcggataaatggatgtagacaggcattaaatgcttcttcatcgcaaaaatgttgttggaaaatcaggttttccgatgcgagcacggcttcacttcctacataattaggatacatacgctcccatccgcgaggaagggtacagccgtggaaaatgaccatcagtccatgatcatccgcatcgctcaggatggcttcgtacagacgcatggtttcctgcttgtcacctccgaagaagtctactttgattccttttactcctatattatgcagccatttcatttcctttttacggataatgggattgtccatataattggtaggaccttgcactatatcattccagtagccgctggaactataccataaaaatacatcaaccttcttgctgtgtgcatagtctatgaagtctttcatacgttcacggccgatgttggtatcccaccagttgtctatcaatacatattcatatcccatggcggcggcgaggtctacatattttttctggtcatcgaaattgatgcttccatcttgccaaagtatccagctccaggttccgcgtcccattttgtatgtatgctccgttgggtaaagaggttccacgacatcccatggaatcgttgtctctacaatcggctttaggttttcgcctacagtaatagtacgccagggagtggaaccgggcaatgcaaggccgggagatgccgtgccgttaccgttgttttcttcgggcatggggaaagcgatggtataaagtccgtcggcagtagcatcgcttaagtgtgagccacagtatttgctgtctactccggtttcactgataagtgcccagccattttctcctacatggaacagacaaggaaatgtgtaaccgtgcccatattgtgaacgtacattcataggagcgtcagccttatattcttcctcatagctgggtttggtacgtttccaacctatcatggcgtcactttgcgggcacaggaaagtagtggtgaaggatgggaagtcaaaacctgtcgtttctttttctatcactatgcttcctgtatcgccatatttgggcatttcgtagcggaaagcaatatcgttgttgcttacgcggaatattatatttatatttttcttttctttattggtaaaggtgcatgtaagttcattggcttgataatgaatttgtgattgtttgatacggtcttgtgtataggttttatctattttattctctttttgtccggtgaaagtcatatcccggctgaagtcccccacattggcaatgaaacctaaaggtgaatcttccaggatggtcttgtccttataggtgacggaataaacggggatgccttgttttacggatacatttactcttaaaaaggagtcgggtcctgtaactgtagcttgttgggcaaaagctgacattgtagtgatggcaagcagccaagtcataaattgttttttcatgggtattaaatatgctattataatgtagagcaaagataatttatttagcaagacgagagcgtagaaaaacggagcatttatggtatacaatccgttcattttacgctctggaataagtcagtcggttccattctccatcatcgaactgggggttgttccgaaatgttttgtaaagcagcgtgtgaagtatttgggatcattgaatcctacttcgtatgctatctcagatatattcatattgtgcgtcagacggttacggataataagttcccgcgcaagattcagccggtagttacgcatgaattgtccggcagactgtcccgtcagattttgcatttttttgttcatcaaacttttgcttacccccattgcttcgatgaaatcgcttatttcgtaataagagttcttatagttttctttcacaatctgcattgctttgtccaggaacttcttgtcactggattctttttcgatattcagtgcatccacgtccatactgtatgagaacttttgttggaaacgtttgcggttttccagtatattggatatccgggccagcagcaaagtgtcatcaaatggttttaaaaggtactcgtctacacctatacggaaactttcaatgcgcgattcgttggatgttttggccgtaagcatcaggaaggggatatgcgagatggcaaaattggattttacccggcgggacagttccataccatccatgacaggcatcatcaagtcactgactatgaaatccacgttctgggattggagcacagtcaatgcttcttcaccttgggatgcttcgagcacgttataatattcggccagaatggaacggatatagtcgcgcatatctttgttgtcttctactaccagaatcgtcagttttccattggtggcaggttgcaatgtcatcggagagtcgaccggttctttaacttgctctgttggtgtgggcagactgtccgcatcggcatattgcaaaggaagtaaaatacggaaagaacatcctttgctctgattattcttggcacaaattgaacctccatgcaactggacaattcgtttgcatagatagagaccgattccagtcccgctttgtccgttgatagaggaatgcgtcttattttgtgattggtagaagcggttgaatactttgtctatctcttcttcgggaagtcctggtcctgtatcccgaatacagatgaataacttttcctgctcttcctggcggaggggggtggcatagatggtaatttgtcctcctttgggggtaaatttcaaagcatttcctattaaattgacaatcactttatgcatggcatcctcatcgtacattatttcacatgaaggaaggcggaagcgacgttcgatggttattcctctttcggaagcatatgcgtcgaagggtactagtagttcattgagtaatttggcaaaattgcccgggttgcggacaatttccattttccctgattctactttgcggaagtccattaattggttgaccagtgagagcaagtattttgagttgcgctccacaaaatgtaattgttcaatgacttgaggattgtagcttagtttcaatgctctttctataggtcctacgattaatgtcaacggagtacggaattcatgggtgatattggtgaagaaggcgagtttgtcaaccgtcaattcctgcaccttttttgacatttggatcagttgccctttttgtttggttattttttcgttttgctgttttaatagttggttttgacgatagagctcgcttgcctgagtggaaagcagttttttctgttcttccagttcacgggtacgttcctctactttgatgtggagtatttcttgttgttcttttaacgaacgaagcctccatgataataccttatatataaggaaagatagaagaaccaatatggacagaatgaaccagatggttttatagaaataaggtgatacggcaatgtggagttctgccatttcttccagccattgtttgccgtcgggtgcataacgcagttcgaaagtatagttgccgggacgcagattggtataggcggcttgtcgtctgttggccggtacttttatccatttgtcgtcaaatcctttcaagcggtaataataattggcaaatgtcgatgcatcataatccaatgcggcaaattcaatatagagagatttgtcgcgttcgtgtaactgtaaggtaccgtttgtgtacaatcgctctttatttgccacacggacatgggtaaacgccaagggaacagcttccttcgggtttatatctatgaccggcttgaccacagacagtcctttggtacttcctatatataaatctccattggcggcacggcatattgcgttccaatagaactggttggataatagcccgtctttccgggtatagttaaagaagctgttgttgttaggattgaagcgggagagtccgttggtggtggtaatccaaagatacccttctttatcttccgatatgcagcggacactgttgtttatcagtccgtcttcggtggtgaaggagcggaaggtatattctccgttttctgttggtgaggatttgtagaaaccatatccgttgctgcctatccaaagggttccgtctttagactgggtgatgtaggttaccctttcctttaactttgactccggttcgtctagcttgatcctccagagttgataaatcagtctaggggttttcaaactgcttaaatctattcggcaaagtccttctgtaagtcccagccacaggtggttatccttatctatgtagtatcctgtacaaccttcaattccacctaggttcatgcccttgaatggttcggtgagcgtttgtgttttcaaatcgtaaacatagatattgatactggttcctacccagatggcattattcaagtggtcatagcagatacttccggcccatccccatgagaagtctccgcattcgggtatttctatgtggtgaaattgtttgttctgcggatttttcatatctatccatcctatgcctcctccccaagttcccatccaaagtcttccatcgttatcgctggtaaagcaactgacggtattatggcttaggtgggcgggtgcatcggtagtatagtgctcaaaagtgttgctgccgggagcccgccggttcaaacctccttctacggttcctacccataaaacacccgacgggtcttcataaatggcattgacgggattttgggaaagacttccgggaatggcgggagtatgataatagttttgtacgaacagcatccggcggctcatcttgttcagacctcccacttcggtgcctacccagataatatcaccatcggtcagcagacagtttacgaagtcacagtttaatgtgttttgtacgatttctccttctccggtatctttatttatccgctcaaaattgtctgtcaacgcattataaaggtttataccttttagggtggcaaccagcatggtatgttctcctgtttctgctatgtctgtgataaagttttgggaaagcgaactattgtcattcggatcatacatataatgcttcatcagttccgtatccatattgtatcggaaaaggccttgtgcgctgccaatccaaatttcattttctttccggcagattacttgtatggacacaccgggtaattgaagggcagatgaaatgaatgtgggttcctgtacttccatagccgattctttgatgcggtagataccgtctttgtagtttatccagagatagtcttctacttcacaaatagtccggatggattctcctgccggtacttcgcatgttttaataatttgttttatatctccttgtttgtcaaaggtaattttgaataaattgttttccgaacaaacccaaatatttcccgctttgctatggagaataagatgagaggggcggttacacagtgaaataagtttgtctttcatatcagtgacttgtactgtctgcatggtttgtatatccagtatgtcaatacccatttcactgacagcccaaatacgcttgaagttatcctcacacagtttgtttataaagttacttcgtagcttgatacgggtgtttcccatatggaaggcggtgaattcataaccgtcataacgggcgattccttccccgcgggtagcgatccataaaaagccctgactgtctttcaatatatcatccacaaagttgtgaggcagtccttcatccatcgtaatggcagtgaaattataacgttcggaccattttccggctgttccttcagcttgcatatacagactagataaaaagatgaacagagcgaatagaaaacaatgttttttcatagtgtgttgttcattaatgacgtaagaatataccgttacttatacaaagatataccttttcgtttttcctcaaaaacaaataaatcatttttatccctctgctgcacaaatgtccaccctttaagcgatattgtccacctggcgagcttttgattgcagttatatttgcattaataatagttagtcaatgtgacagttggctgcgttatatgccgcatgtcattggcaaattagtacattagcaaatggtcacataataaaaaaatactatgaaacagcaatttttccctcaaagattattcatggacatgaaaaggttaataataaataggttggtcggtttaggcctgttggccgtaggggtattggcatcatgcagtgcacctacggctttcgtgcctgtcccttctcccaatccttgggctgatgattataccgctctttcatctatggagaattacaagcagtggggaacatataatgtacacgacccggcttgtaaaaaaataggagatacttattatctgtattctaccgatgctatttttgctgagaaccggaaagaggcgaaagagaagaatgtgcctctgggttttgtccaggtacgcaaatcaaaagacttggtacattgggattttgtgggctgggcttttcccgagattcctgctccggctatagaatgggttcatagtcaggcggagggaaaaggggcgactaatatctgggctccttatctgatgccttatcagggtatttatcgtttgtattattgtgtttcggcattcggcaggaatacatcctatatcggtatggccgagtcggattctcccgaaggtccctggatacagaaagggtgtgtggttaagacaggagaaggggatgcgatgaatgccatagacccttctgtggttgaggatccggaaaccggaaagtggtggatgcactatggctcttatttcggtggtctgtactgtgtggaactgaatcccgaaacaggaatgactatgcagccggaggatcatgggcacttgatagcacgccgggccaattaccggaaagataacttggaagcgccggaaatcatgtatcaaccccaacttggcaaatattatctgtttacatcctacgatccgctgatgactacctataatgtacgtgtcgcttattccggttctcccgaaggaccttttgtggatttctacggagaggatataaaagatacaacgaataatgttcctatattgacagctccttaccgcttcgaaaatcatccgggatgggcgggaacggctcattgcggtcttattgatgccggtgacggccgttattttatggtccatcagggacggctttccccccagaaccagttgatggatttgcatgtgcgcgaagtgttctttacggtgaatggatggcctgtggtttctcccgaacgctatgcaggtactgctccacgttctttcactaaagaagatttggtaggtgagtgggaaattatccgtattcaggaaccgcctttggaacgtagtttggaagctggacaaatattgtggggtgaaggggacttgcgaaatggggagcaggcgttatctgcccgtgttgttttggaagcagatggcagtgttggagatgcaacttgggattttaatgttaaaaaacaacttcttactataaaaacagccacagaagatattaacaatttgattatctttgccggacacgattgggaaaatgaaacagaaaccattctttttaccggcctggatgctcaagggcattctgtgtggggaaagagaattgactaataaaaatcaataatattactatcatgaaattacacagaactctattcacagcatgggtatttgctgccggagtagcgctacatgcacagaatgcgcacaacatggtcgtgcagactaataaattaggtgcggaaatacaaccaaccatgtatggtttgttctttgaggacattaattatggggcggacggaggcttgtatgccgaactgataaagaaccgttcatttgaattcccacaacgttttatgggttggaatattttcggcaatgtgaccttgatggacgatgggccgttcgagcgaaatccgcattacgtccgtctgggtaattccggacacagggaaaagcacacaggaattgaaaacgaaggtttcttcggcataggtgtcaaggaaggggctgagtatcgcttttccgtatgggcacgtggtgaggaccagaaacttcgtattgaattgatcaagaatgatacgatggaggaacgtcaggcttttgagtcaaaagaactgatagtgaattcgaaggattggaaacaatatgaggtgatattgaaatcgccgagaacggagcccaaggctcatcttcgtattttccttgaaagtgcgggaacggtggatctggaacatgtttctcttttccctgtagatacttggaaagagcgtaagaacggtcttcgtaaagacttggtgcaggctttatatgatatcaaacccggtgttttccgttttcccggcggctgtattgtagaaggtacggatgaggctacccgttacgaatggaaaaaaacagtaggtgcggtagagaatcgcccgttgaatgaaaaccgctggcattatacgttcaagcatcgtttcttccctgattatttccagacctacggactgggcttctttgaatatttccagttgtcggaggatataggcgccgaaccgctgcctattctgaactgcggattgatatgtcagtatcagaatgaccccgaccagcaggtcagcctgtcaaagcttgattcgtatatacaggatgcattagacctgattgagtttgctaatggcgatgtcacaagtacttggggaaaagttcgtgcggatatgggacaccctgctccctttaacttgaaattcttgggcattggtaacgaacaatggggaccggaatatccggaacgtctgaaacagtttgtcgaggtgcttcgtaaggctcatcctgaaatcaagattgttggtagttcgggacctcagtctgaaggtaaagactttgattacttatggccggaaatgaaaaatctgaaagtggatttggtggatgagcatttctatcgtcccgaaagctggttcctggcacaaggcaaccgttatgacaattacgaccgcaaaggaccgaaggtctttgctggagaatatgcctgccatggcaaaggcaagaaatggaaccattttaacgctgctttaatggaagctgcgttcatgaccggactggaacggaatgctgatgtggtgcacatggctacttatgcgcctttgtttgcccatgtggaaggatggcaatggcgtccggatttgatctggtttgacaatctgaactcggttcgtacttgtagttactatgtgcagcagctttatgctcataacaaaggtactcatgtgttgcccctgactatggataaaaaagctgtgagtggtcaggagggacaggatggtctgtttgccagtgccgtatgggataaggatgaaaaggcttatatcgtgaaaattgccaatacttcggagcagacacagccagtatcattgactttcaacgggttgaagaagagtgataaacttgtggaaggtaaatgcatcacactccagtctgccgatttggataaagataacacggtagagcatccgaatgtcatcactccgaaagaaagtactgctacggttgagggtaatgtactgaatgtagagatggcaccgaagactttcgtgctttataagtttgttaaagcaagtaataagtaaaagatgaatcattcctttaaatactaacacagaggatagagaaacataaagcagccgaagggctgctttataatcccaactgcatccggaacttttaaaggaaatgtatacctgcctcccttggttgtaccaagggagttttttttgattatacgtatattatcatcttggattatgcgcagcactttgctgtaaatcagtgatatgttgcgcaaatacattctaaatccccctgaaacggtttgccattttctgctgccaaatttggtttgacggatatcggttgttctaattcctgtgtcatagctacggttgttcctttgcaggggagcgtcataaggcgtatttttgttcgggtgcgttcgttgcttcactaaggtgaagagctagcttcacttaggtgaacagccgctttcacctaggtggaataattgcttcaccttggtgaaatatcaaatggagtgaggtgaagataagatgagaataggttcttatgatgcctacgagttgccgggaggtaacgagggggtgattttacattctgtccgagagaatccccgaagcagatttatttcgccaccggcataccgattgaggaggatttgaaagactattacacagaaagtggttggtaatgagtgagttgctgtgatggaatgtttttgtactttatgtaaatgtgttaaaagtgatttttgttgtcgttatgttgtaggggcggactcatgggtctgcccctacggtggaacatttgatagttacttcgaacttttgaaatatcctcttattggatgagtcctgtttacatctttattctcttattgcgtacttgcctcagaattgtctgcaactcaaatactttcttaggatacttttctgctacattctcttgttcgttcaccttttccatttcatataactgggggacgttcaggtttccggtctctattttttctgccttcatgaaagtggtcggatcatcattcggttcaatgtatttccagtctttggtacggacggacaacgtgtggttcatggattgttccacaatccatgggcggtctgtcttatcggttcctatcaaattccctaaacggtcatagctgtccggagcgctgcctttaggtaatctggcgttgaccaaagctcctaaagaggctagccagtcaatctgtgacattaatacgtccgagtctcctgtcttttttatcttctgtggccagcggacgatgaccggaacggctgttccaccctcgaaagcgctgtatttgttccctctccatggaccggaaggtgtatgtccgttcaacagctcttctgccttgtccttatatccgtcgtctacaaccggaccattgtcgctggatagaataatcagcgtgttttcagttagtccaagttggtccaatgtttccatcagctggcctaccgtccagtcgaattgggcgattgcgtctccgcgtagtcccataggattctttccacggaagcggtcatgaggaaaacggggaacgtgtacatcattggtcgcaaaatacataaagaaaggctcgtctttatgctgtttgataaaatcgatggcatgaacggcgatggaatcggcaatgttctcatctttccaaagtgcctttccaccccctttcataaatccgatgcggctgatgccattgacgatggacatgtcatgtccgttgctgggatgtaggttatacagtagttcgggattatcttttccggtcggttctcccggaaagttcttggtgtaactcacttctataggatcggacggatcatagttggctaccttgccgttttctataaatacacaaggtacacggtcggctgtagcggccatgatatagtgatagtcaaagcctaagtcacccaaagcggctggtaaaggagcattccaatcctgtccgcctgtcttgtctcctagtcccagatgccatttgccgatagcggctgtagcatatccggcacttttaaacatatctgccatggtgtattgttcgggacggataatcatttttacatctcctgcggcaatatccgtatccggtctgcgccatgcatattctcctgtcagcaaggagtagcgggatggggtgctggtagcggctacagtatgtgcattagtaaaacggatgccttccgatgccagtttgtcaacatggggagtttctacattcttggctccgtaacattttaaatctccatatcccaggtcatctgccagaataacgataacattgggctttttcaggtcttgcgtactgtttttttgaacggtttctgctgttgcagagttacaagcggctaatgaggcaagtaaggatatgcctgcataatttctacttttcatctctatttatttaaggtttgattcggatacatgtctattttcactttccggtttctcgacctgaaggtgaaaaacgacggaaagttatcaagaaaatcttgaagcagcaaaaaagagagccgaaatatgatttgaaagtgtctggaattagatgataatgcccccacccagtactacatcatccctataaaaagcggctgcttgtcccggggcaatggctgtcagcggctcatgcagttgtacatgcagggtgttatccggttgcagggttactgtgcagcggtttgcttgtttccgatagcgtattttgacgatgatgtcgtccttatttagtaataaagcgggattggtgatgcgccattctttcagtctcatttctgttttttccagtgctttcaagtcgctcagtatgactttgttttctgccggaatgatttctttgacaaagacagctcggttaagatctatgcccaatcctctccgctggccgatggtatagaaaggataacctttgtgccgtgcgataaaattccccatttcatcgaagaatttacccggtaggatacttccttcaggcaattccttatgcaggaatgtgcggtagtccatggggcagaagcagactcccagactgtcccgtttatgggcggctttcagaaaaccacgctctgccgcgatctcacggacacgggctttagtcaggttgcccatagggagaagcatacgttgcaggatttcttgtggcagcccccataggaaaaaggattggtctttatccgggtcggcaccggtagtgatgtgatagtatccattgatgaggcgtcggcgtacataatgtcctgtagcgaagtgatagatccccatttcatcggatattctcttcaaaagaggccatttcaggtagttgttgcataaagtacagggaaccggggtatgacctgccatatattcgttgatgaaatagtcaatgatggttttccggaaggtgccacgaacatcgtatgtgagatgggggatacccagacgttcacataaagtgcgggcatcctccagatactctgtatcatttcctttttcataaaaacggaaggtgatgccggttacctcgtatcctgcatcctgcaatagaagggcggctacggaactgtctgttcctccgctcatgcctagtaggactttattattgggttctgcttctttcatctttatagcagttttgtgaggatagatgctgggatatccattttggagaaggcaaatagtttctttcccaaatctttcaaagaggctccgatgtgatatacgtcggatcggtctataataagaaaacggtcatgtgcctggcggtaggttcttatgtttataggaggatattgattgttgtgtcgggtaaggtctagttgaagttgcggtgtgattcgttgtgtatagatggtggcatctactcctgttgtgcgtttggaaagcatgagaagtgtgttttcatctatatagttgtctatcaggataagggaattcttggcggatttgataaggttcgtggcgaaagcgtatgcgtcgaaaatctgtccgtcaaagaaaattccttcgaccggagggagagaggtgcggacaaaaaaatctactttctcatttaatctggtcagttgcatatcataagaaagaaactttgcatccaccctttgttcaaggttgctgatgcgttggttgatgacatgaccttttaataaataatcttttaaaacttggcttgcccaacggcggaacaaagtggcatttttgctgttgacacgatagcctacagaaatgatagcgtccaaattgtatgttttggttttgtatgacttgccatccgaggcagttagttccaaaatggaacatactgagttttcgttcaactcgccgctttggaatatattcttaagatgtttggtaatagcttggcgtttggtctcaaataactctgcaatttgtgcctgagtcagccacactgtttcatcttcaatgcgtacttccatcctcaccgattcatccggctggtagagtatgatttctccttgttgttccatgtgttcgatttttggggtacaaagctagcaaatataaatcagactgatcttgctttcaggttataattgaaatgtagggtaggaaatgaaactccgatgacaatctatatgatagcgccatcggagttctgacacactcttcttattaaggaaggaatgcttgcgatatttttattttatcggcatcaatgtgaatccccaatgatattccttattggcgggcagggtatgttccggcagcgggcggtctccccagctgtcataaccggctacaccttgctgcttcatatcaatacatacttcaacgaaattacgtggagtgatatcgttgacgtgggtcatgcggcgtattacatttttagcctttgcctcgtcgtggttggcaatctcttcgggggtgaaattagtccactggcgaggacggttaatggcttcttccgaatcaaagtcctctacagaattgcgcagtgcattgaaaccgatggtactgtcagcgcgtattaacagaccttttccgcctttacggctcagttccacccaacgggtgtcggtgcggtgtccgttttcttgcggacggacgtagttgttggtgtacatctggtcggctgtggtgtggtagaggtcgacgaaactacttgcattacggtcaatgtagttttcacccggtccgcggccgaaatattctacctgattcatatccgatggcaagcggaaacgtacgccgatacgtggtacgttcagtttggaagaggccagacgctgggcatcctgtcccggtgtgaaggtggccatcagagttgcttctgacacttcggtactggcggctttcatatccgtagaagtaaaggtgatatctgcatgaaccactccgtcaggataaatggtatatttcatgatatacaggttacctgctgccagtaaatagttggctgttaatatagtcttgttgccgtctgtttctgtagtgacatccgctacattgaagttcttgctggactgtttccatatttgctcgcgcttaggcccaccgttaccataatcattgtctgtcggtgcgcgccagaagttaggttgaataccaaagccttcagcgaaatattctgtaccgtttactttgtatgaggacactagtccgcttttcttgttgaaaacaaactgcatacgtgatgataatacggtgatgacgtcaccatccgtgctgacggtagtcttaccgcttgctttatgttcggctatagccaatggttctatgggcaggcggaattgttcggaagcaatatcgtgccctgcaggaatcaagggttccggctctgtggtggtaactacaaaatttacaaaatattctgtgccggccttgggcttcaatccgttgaggttgatgtccagttctttggagctttgcggttcgatatctaatgatacttttccgcctttaattgtttttccgtttgcctttacggtataactgatcatatacttcttcaagttggtgaagtagaaacggttctttaccaggaatttgccggcagccgggtcgatggcttcaaaacctacattctgatgtgcatatttcacttctgtcatggccggatgcggagtgcggtccggagctacgattccattgcataggaagtttccgtcgctgggtgcattggtcccgtaatcacctccgtaggtccagtaggtacgtccattttcgtctttttccagaataccttggtctacccagtcccaaatgtaaccaccttgcaagttcgggtacttgtagatcgctctccattgtgctgccagattaccattggaattgcccatagcgtgtgaatattcggatggcgcaatgggacggtcgctgccttttttgcctatttcttccagccaggcggcactagggtattggggtacatacatatctgtgttccattcccaaagggcgcgttcataatttacaggacggttcatcccttttacttcgcgttctttcagccataaataggtctgatagaaattataaccgtttccagcttcgtttcctaatgaccaaatggctacagaaggatggtttttgttacgctcgtacatattaatggtacggtccatgtgcggcttcagccattcgggatggttgcccaatgttccgcctcggcttaagttgtaatacataccgtggctttcgatattggcttcatcatatacatagataccatattcatcacacaattcatagaacttgcggtcttgcggatagtggcagagacgtacactgttgatgttgttctgtttcatcagggtgaagtccttgcgcatcagctcttcgggaacataatgtcctgtttcgggattatgctcgtgtatgtttacgcctttcagcttgatgggttgtccgttgatgaacaagcaaatgtatggtttgccgttttcggctatctgatcggttggtttgatctcgaaacggcggaaacctaccgtataaggaatgatctcgcttgttttttctccgtctttcagagatatcagtaaccggtacaggttagggtgttctgatgtccaggtcttgacgttgctgagggtggcttcaaaagagatactcttctgcccgtccgctgtaacaggacagggggtgttaccttctgccaccactttctttgcggcatccagcaattcgtatgctacggttacctctttgttgcctgctgtatggttggttacgtctacatccagtttgaagataccatttttataggtgtcgtccagcgtagacatcacgttgaaatctttgatgtgagttttgggctgtgagaacagaaatacatcacgttcaataccgctcatgcgccaaaaatcctggcattccagataagaaccggtactccagcggaatattttaatgaccagcgagtttttaccgggtttcaggtagttgttgattaaaaattctgccggattcttggagtcttcgctgtatcccacttcctgtccgttgacatacacgtatacaccggattttgctccttccaaacggaggaatatgtcgcgtccatcccaatcggcgggaatttcgatatcacgctgatacacaccgaccggattggcttcgggtaattgcggcggttgtggatttctgggcttgaattcgtatccatgattggtgtagatggccactccgtagccctgtacctcccagttgccgggtactttaatctccttccaggctatgttggcatccggttgctcaatgttggcaggcagatctttgtatgtatctgcataataaaagttccatgtaccgtttagtagtttgtaataagggctgttttcatactcgccggtcagtgcctggtcccggttgtcataagtcatgaaagctgtacgcggatattccttgttgacggctacggtctgaatatctttccaataaggtagttttgtatcttctgcatgaagaacttgtgttgaaaaagcgcatacagcggcgccaatcaggcatttaaataaggttgtcattttaggtttcataggttcaaatagaaaaatgaagaagaaagggcgctagtaccggcgcccctttccttaagtccttttatgtaaaatagcaattatttaattgcgtctgctagttcagcacctggtttgaacttggttacttttttagcaggaatagtaatcgttgcttttgtggatgggttgatacctgttcttgcacttctttcagcaacagagaatgttccgaatccgattaatgatactttgtccccttctttgagggcctttgttacagttgaaacgaaagcttcaactgctttttttgcgtcgactttgctcaagccggcttcagcggcgactgcgctgataagatctgccttattcataacgaaaatgattaattattaaatgtaacacaaaagttttaccaaaatcagtgacaaatatatgctttcaaaattagaaatcaaacagatagcctaaaaaagatgctccaaaaatcaaaaaaacgtaagagaactcttgttttctgttatataacagaataaaattgtaaatttgcgcgcaatcaatgttttattagacgaagaatatttatgaacagtatacctacagtaaccaagaatttattgataataaatgtgttgtgtttctttggaggcgtggtagccatgaagtatggaattaacctaaacgacctgctgggactacacttttttatggcatctgattttaatcctgcccagttgattacttatatgtttatgcatggcggtttccagcatatcttttttaacatgtttgccttgtggatgtttggacgtacgcttgaacaggtttggggaccgaaacgtttcttgttctattatatggtatgtggtataggtgcgggattggtgcaggagctggtgcaatatatacaatatgtgaccgaattatcgcaatatgacagtgtgaatacggggattgccgtgattccgatggcggagtacttgaatctgatgactacagttggcgcttcgggagcgatatatggcattttgttggcattcggtatgctattccccaatagtcagatgtttgtattccctatcccatttcctgtcaaggctaaatattttgtgatgggatatgctgctttggagatatttttgggattgggtgcttcgaccgatggcgttgcccactttgcacacttgggaggtatgatttttggttttatattaataatgtattggagaaaaaagaataataatgggcagttttattactgatttgaaaaatagcttcaacaaagggaacatatatatccagtttatatatattaatgtaggggtattcattgtaacttccttattggggattttatggatgctgttcaaccggaatggagcatttgtgcttcaatatttggaactgccggcctggacgttgcagtttgtcaagcagccttggtctttgctgacttatatgttcatgcatgcaggcattttgcatttgctgtttaatatgctgtggctttattggttcgggcagatgtttctgtctcttttctcggcaaagcatttccgcggactctatctgttgggaggtatttgtggcggtttgttgtatatgatcgcttacaatgtttttccttatttcagtgattctttgtattattcttatttgttgggagcatcagcttccgtacttgctattgttgtagctactgcggtacgtgcaccggaatatagagtaaactttatgtttattgggactgttaggttgaagtatgtggctttgtttatggttgtgaccgatttgctgtttatgacatcgggcaatgccggtggccatatcgctcatttaggaggtgctctggccggatggtggtttgcttccggattgtcccgcggacatgatgctacgtcatggataaaccgatgcttggattgcttctcagaaggcctttcgtttcgtcgtcaatcgaaaaagccgaagatgaaagttcattatggtgataaggcaaaagattacgattataatgcccgtaaaaaacagcaaagtgaggagatagaccgtatattggataaattaaagaaatctggttataacagtctgactaccgaagagaagaaaagcttgtttgatgcgagcaagaagtgatatatgaaatatattggtcgttttttgggatggatactactgggcataaacttgtgtatggtggtattgttactggtatgtgcttacagcccttatattgatcctgtggctcatccggtatggtcatgtgccggtttggcttttcctgcttttttgattgttaatcttttgtttctggtcttttggttggtgatttatcgtaaatatgcgttgctttcatttttaggcttggtatgttccattggtgctatccgtacttattttccagtcaatgtatttgtatctgatgtaccgaaaggggcaatcaaattcttatcctacaatacgatggcctttgagaagaaccgtgcgaacaccaaggataatccgaaccctgtgttggaatatttaagaaacagcaatgcggatataatctgcctgcaggaatatattgtagggggacggttaaccaagaaagaggtggattatgctttaagagattatccttataaaaattattataagatatcgggggctaacggtttgggttgttattcccgttttcctattttgtcggcacatccggtgagatatgccagccttaacaatggttccattgcttataaaatcaaagtgaatggtgataccttgctggttgttaataatcatctggaatccaataagctgactgagaaggataaagaagtctatcgcgaaatgatgaaggaccctgataagcaaaaggtatcgcaagggtctcgtttgctgatcagaaaactggcggaagcatcggctatacgtgccgttcaggctgattccatagctcgtttggtggccggttacaaagggggaggcataattgtatgcggtgacttcaatgattctcctatatcatacactcacagggtggtaggggaaggcctgaatgatgcttttgtggagtcgggaaacggctttggcatatcttataatcaaaatcatttttatttcagaatagacaatattttattgagcaagaatttaaaatcttaccgttgtacggtggataatacgataaagagttcggatcattaccccatttggtgttatgtggcggagaagtgattttacatacctttaattgacagattatgaaaagactattatttacgttagcgacgtgttgtgtaatgtgtgcatgtgaacagaaaacagaaatgaatccgttctttacggaattccagaccgagtacggtgctcccgattttactaagatcagactggagcattatgagcctgctttcttgaaaggaatagaggagcagaatgcggaaattaaggcaatagttgataatcccgaggaacctacttttgaaaataccattgtggcgctggataaaagtggcgggattctggcgagagtaagtggggtgttttttgcattgaccgaagcggatacaaatgattcgttgacggccttgaatgaaaagatggctcctgtactttcagaacatagtgataatatttatttgaatcaggatttgtataaacgggtggctgatgtgcatcaacaggaaaaggaaggtaagataactcttacgactgagcaacaccggctgttggacaagtattataaagcttttgtccgttcgggtgccggactggatgccggaaaacaatcccgtttgagggagatcaataaagaattgtcgactttggggattgctttcgacaatcatatcttaaatgagaataacgcttatcagttggttatcgagaatgaggctgatttggccgggttacccgaatgggtgaaagcgggggccgcagaggaagcgaaagctgctggaaaagaagggaaatggctattcactttgcaaaactccagtcgcttgccttttttgcaatatgctgaaaaccgtgagctaagaaaaaatatttatgaagcttatatcaaccgggggaatcatgatgatgcgaatgacaataaagagatattgggaaagattatggcattgcgtttggaacaggcaaaattattaggattcgattgttattccaattttgtactggatgagaacatggctaagaattcgcagacagtcatggatttcttgaataacctgtggggatactcactggaaaatgcaaagaaagaggccgccgagttgcagaaaataatggataaggaaggtaagggagagaagctggctgcatgggactggtggtattatgccgaaaaattgcgtcaggaaaagtatgatttgaatgaagatgaaatcaagccctatttcagtttggaagatgtgcgtagcggattgtataccgtggccaacaaattgtatggcattacattgaccgaactgaatgatgtgcccgtatatgagtctgatgtgaaagtgtatgaagtaaaggatgccgatggctcatttttgggattgttctatgcagattactttccacgcgcaggtaagcgtggtggcgcatggatgagtaattttcgtgaacaggccggtgaagtacgtcctttaatttataatgtggcaagttttactaaacctgcaggaaatatgccttctttactgactttggatgaggtggaaaccatgtttcatgagtttggacatgcattgcacggtatgctgaccaaatgtaactacaaaggagtgtctggtaccagtgtggcgcaggattttgtagaacttccttcacagattatggaacactgggctgtagaacctgaagtgctgaaactctatgccaagcattatgaaacaagagaagtgattccggatgagttgattacgaaaatccaaaatcagggtacttttaatcaaggttttatgactacggaattattggcagccgctttgcttgatatggaactgcataacctgactgatacagaaaatctgaatgtcgttgcttttgaaaaagaaacgatggacaagctggggctgattcctgaaatagctcctcggtatcgcgccacttattttagtcatattataggtggatatgctgctgggtattacagctatctatgggcagaagttcttgacacggatgcttttgaagcgtttaaagaacatggagtgttcgataaaaataccgcagactctttccgtaaaaatattctagagaaaggtggaacggaagatcctatgaccctttacagaggttttcgtggggctgatcccagcttggagcccttgcttaaaaataggggtttgaaataaaataggctgtgagatagaataatttaggctgcaaaaaatgcttttgcagccttttttctcttttggaatctaaatatttgtgtttgataccgtgggaatgtgaaaaaaaaactatatttgcaaccttgtataaactaagaattaatcaaaaagtaaaaataataaatttcaaagtaacatgcaaaacaaaggatttgtaaaggtttttgcggtattactcacccttgtatgtgtgttttatctttctttctcttttgtgacccgctatcacatggacaaagcggcacaggacccgaaaggtgaagcacattaccttgattctatgcagaatgaaaaagtttatttgggtagttatacgctgaaacagtgtcgcgagatggagattggtctgggtctagacctgaaaggtggtatgaacgttatccttgaagtttctgtaccggatgtagtgaaggctttggctgacaacaagactgatgaagcttttaacaaagcggttgcagaagcatcaaaacaatctatcactagtcaggatgactttatcactctttttgtaaaagagtataagaaacaagctcccaatggcaaattggctgaattatttgctactcagcagttgaaagacaaagtaaccacccgcagttccgacagtgaagttgaaaaagtattgcgcgaagaggtaaaggctgctatcgacaactcttataatgtattacgtacacgtattgaccgttttggtgtggcacagcctaacattcaggcattggaaggaaagatgggccgtatcatggtggaactaccgggtatcaaagaaccggaacgtgtcagaaaactgttgcagggatctgctaacttggaattctgggaaactttcgacgcaaaagaaatagttccttatctttcttctgtagataacagactgcgtgatattcttgctgttgaaagtggtgctgcttctgctgattctgtagcagctgatactgttgctgttgcacaggcttctgcaatttctgctgccgacagtcttgcagccgcattgaaaggcgaaacggcaagtaactctgccgcaatggagcagatgaagaaagaacatccgttggcttctgttcttcaattaaatccgaatggttacgggtcggtggtaggttatgccgattataaagatactgctcaggtaaaccagtaccttgctatgaaagaagtgaaagaaatgttgccgaaagatcttcgtttgaaatggggtgtaaaggctgctgattttgacaagcagggacgtatctttgaattgtatgctatcaagtctactgaacgtaacggacgtgctccgttggaaggtgatgtgatcactgatgctaaagatgaatatgaccagttcaacaagccttgtgtcagtatgtctatgaacactgacggcgcgcgccgctgggctgttctgacaaagaacaatgtaggcaaggctatcgctatcgtactggatggttacgtatacagcgctccgaatgtaaacggtgaaattacgggcggacactctcagattaccggtaactttactccggaggtgacaaaagacttggctaacgtattgaagtctggtaagatgcctgctcctgcacgtatcgttcaggaggatatcgttggtccgtcattgggtcaggaatctatcaatcaaggtatcatttcatttgttgttgcgttgattctgttgatgatctatatgtgcgctatgtacggattgattccgggtatggttgccaactgcgcattggttgttaacttcttcttcacattaggaatccttacctcgttccaagctgcactgaccatgtctggtattgccggtatggtgttgtcattgggtatggctgtagatgctaacgtgttgatttatgaacgtacaaaagaagaattgagagccggtaaaactgttaaggctgctttagcagacggttattctaacgcattctctgctatttttgactcaaacttgacatcaattatcactggtatcattctgttctatttcggtacggggccgatccgtggttttgccactacgttgattatcggtatcctctgctcattctttacagcagtattcttgactcgtattgtttatgagcacttcatgaataaagacaagtggttgaacttgacattcactacagggatttccaagaacctgatgcagaacgtgaattacaactttatgggaatgatgaaacgttcattcacggtattcggagcgattatcgttatctgtatcatttcattctttatccgtggtttggcgcagagtattgactttaccggtggacgtaacttcgtagttcagtttgaacagcaggttgaacctgaaacagtgcgtgacttgttgaagaagaaaatcacagaagataatgtacaggctatcgccttgggtacggataagaagacaatccgtattacaaccaactaccgtattaatgaagagtctcctactatcgactccgaaattgaagagttcttgtatcagtctttgaaagatggtaacttgctgggcgaaggtaccacattggaaatctttattgatcgtgataatcgtgtcggtggttctattatcagttctcagaaagtaggtcccagtatcgctgatgatatcaagacatcggctatttggtctgtattgtttgcactggtggctatcggtttgtatatcttgctgcgtttccgcaatgtagcttatagtgtgggtgcgactgttgcattggctgtcgatactattctgattatcggtgcatactcattatgttatggatgggttccgttctcattggaaattgaccagaccttcattggtgccgttttgaccgctatcggttattctatcaatgacaaggtggttatctttgaccgtatccgtgagttcttcggtctgtatccgaaacgtaaccgtatgcagttgtttaacgattcactgaatactactttggctcgtaccatcaatacttcattaagtacattaatcgtattgttgtgtatctttgtgctgggtggtgacagtatccgcagcttcgcttttgcaatgattttgggcgttgtgatcggtacgttgtcttctatcttcattgctgctcctatcgcttacctgactatgggcaacaagatgccggaagaaacaaaggcataaaaagaaagtttcttttaagaaataaataaaaagaggaggatgctcatatcatgagaatcctcctctttttataatgactgaatggaattgatttgtggaaaaaggatagatgaatcttctgtggcttcaaaaataaacttaagtacattggataagtaacttagcttgcttgccccatgaagtaaacttgcttttttacgctacattttgcagatcaattctgtttggctataatcatgaaaatagttatctgactactcttcctgaagtgtttccttgcattaatccttccacttcttctactgttacttgattgaaatctccatatatggtattttttaatgcagatgcggcaagggcgaattctaatgttttttggtcattgtcggagtaggtcagcaaaccataaatcatgccgcctacaaatgcatctcctgcacctacacggtctacctcatggacaatatcgtaaataccggtatgccttaatgtccctttagaataaagtatggctgccagcagattgtgattggaagtgatggtattacgcaattccagaaatattttctggcatcggggcgcttgttctgatactttttgaccgaatactttgaaaccggacaaatctaatggatatgaggtgtctacagctttaaaacctaccgggggaatgccgaaaatttctttgtattcgggttctgcaccaaaaatgacatcactatattggacaagagggagcattacttctgaagcggatttaccgtaattccataattttttgcggaaattcaaatcgcacgagatagttaaccctagacggtctgctgtttgtagtgcttccaggcaggtatctgctccttcctgtgacagggacgccgctatacccgaccagtggaaccagcctgcatcggaaagaatcttttcccagtctatcatgccgggacgtaaagtggcaaaggaagatccttcacggtcatatactacattggagttacgaaatgctgcaccgctctccagaaagtataatcccatgcgtttcccgccataaataatgccgtctgtacctaatccgtaagcttggagtgagtttacacaagcttgtgccattgcattctcgggaagtctggtaacgaattctgtggagatgccgaagttgaccagtgatatggctacattcgcttcacttcctccataagtagcaataaactcgtttgtttgggaaaagcgctggaaattgggggtggtcagccttaacattacttctccgaatgtaacgactttcttgtttttggtaatagctcttgtattcatagtatgtttttaatcagtatgttaatttgcacgaagatacgatcaaaattttatataagtgcaagaaatgtataaaaatagccttctctattctatatggaaaagatagagaaggctatttttatacattcaatattagtggtttatttattgaatcgtacttttagtttggcaagcatatcctgtgtcatactgtctagatcatattccggtttccatccccattcctcacgggcacaagtgtcgtccagtgagttcggccatgattcggcgatagcttgacgtagtggatctactttgtactccatatggaagtcaggcatatacttctttatattattataaataatttccggatcaaaactcattgaagcaatgttgaacgaattgcgatgaattagtttgtcgggattcgcttccatgatttcaatggctgcacgtaaaccatcaggcatatacatcatatccatgaatgtatcggctgcgataggacattcaaatttttcaccttttacagccgaataatagatgtctacagcataatcagtggtcccgccacccggaggtgtgacatacgaaattaatccggggaaacgaacggaacgggtatctacaccaaaacggatatggtaataatcgctcagtaattctcctgatacttttgtaacgccatacatggtacgcggattacggatagtgtcttgtggagtcttgtctttaggggtgttgttaccgaagacaccgatagaacttggggtaaatacggcacaacccatttcgcgtgctacttccaatacattaaacaggcctcccatgcctattttccatgctagttgaggtttggcttctgctacagccgagagtaaggctgccagattgtaaatggtgtcgatgttgtactttgatacagtttcggcaatttgttgttcattggtgatatctacgatggcagaagggcctgattcttttaattcccctttaggctcggcaccgggaatatatccggctacgatattaccattgtaaatacttctcaatttcatggttagttccgaaccgatctgaccggtggagccgataattaatacatttttcatagtttgctatttgctttaagtttccttttggaagcaaagatagatagaaaactgcatattttatcaaaattttctctataatttaattggatatcaaaaaaaaataagaactttgtcaagtcagactgatttttaaacttaaactatatacttaataaaaaaacaaagctatgtatggtaaaatgaaggagttccttgcgaaggaactggctgatattaaggcagccggattgtataaaaatgaacgtatcattaccacacctcagcgtgcagacatcaaggtgaatgacggagaagatgtgttgaacttttgtgccaacaattatttaggtttgtcagataaccaacgtttgatcaatgctgccaaagaggcaatggatacacatggcttcggtatgtcttccgtacgctttatctgtgggactcaggatttacacaaacagctggaagctgccatttctgattattttaaaacagaagatactatactttatgctgcttgttttgatgctaacggtggtttgttcgaaccgctgtttacagaagaagacgctattatttcagatgcgttgaatcatgcatctattatagatggtgtacgtttgtgtaaggcaaaacgctatcgttacgctaatgctgatatggctgacttggaacgttgtttgcaggaagcgcaggcacagcgtcaccgcattattgctacagatggtgtattctcgatggatggtaatgtggctccattggataagatttgtgaactggcggaaaaatatgacgcgttggtaatggtggatgaatctcattcggccggtgtagtaggtcctacagggcatggcgtggccgaacaatttaaagcatacggtcgtgtggatatttttactggtacattagggaaagcatttggtggggcaatgggaggatttaccaccggtaagaaagaaattattgatatgttgcgccagcgttcacgtccttatttattctctaattctgtagctcctgccattatcggtgctagcttggaaatgtttaagatgttgaaggaaagtgatgccttgcatactaagttgatggataatgtgaattatttccgtgacaggatgctggctgctggttttgacatcaaaccaactcagagcgcgatttgtgctgtgatgctttatgatgcgaaactgtctcaggattttgctgccaagatgcaggaagaaggcatatatgtaactggtttctattatccggttgttccgaaagggcaggcacgtatccgcgtccaattgtctgccggtcatgaaaaggcacatttggataaggcaattgctgcatttattaaagtgggtaaaaaacttggggtgattaaataagtaatctaaagaatttctagataaaataaaagcagtaaatgattgtatagtaattgtttactgcttttgtagccccgaggggaatcgaacccctatctaaagtttaggaaacttctattctatccgttgaactacaaggcccttttatggctacaaaggtactcctttttgttaaaatggcaatatgaaagatcgaaaaatgtcttaagtgggaagaaaataatcctttctttgttgttttgttgttttttgtctgttttttataatctaataatgttattattctgctatgaactttcatgttgtttataaaacatggataaaaataataaattgtaaaaatgaatcgtttttgctgctgtcataatgatagaaatttatgcttttaaacaggtaattatctctactttttcttagcttggaaataaataaacctttaattttgtacattttgatattcaaacgtagtttgacagcggaatattttgtcctttgacagaactttccgaactttgcaaacagtgaaattttgtaaccctaaataataagttatggcagatgaaatgatagtcaaggagttggaccaagtggtggtccgtttctcaggcgactcaggcgatggtatgcagctggccggaaatatcttttctaatatttcggctacagtgggaaatgatatcagtacattccccgattacccggcggatatacgtgccccgcaaggttcgttgaccggtgtgtcaggtttccaggtgcatattggtgcgggtaaagtttttactcctggtgacaaatgcgacgtattggtcgcaatgaatgccgctgcattgaaaacacaatacaaatttgcgaagtccacagcttgtatcattattgatacagattgttttcagaaatcagatctggacaaggcggctttcaaaacagacaatccgattgaagaaatgggtattaagcaggatgtaattgctgctcctatttcacagatggtgaaagactgtctggcagatacaggcatggacaacaagtcaatgttgaaatgtcgtaatatgtttgctttgggattggtttgctggttgtttaatcgtgacctggcggttgctgaaaattttttgcgcgagaaatttgcaaagaagccgcaaatagctgaagcgaatattaaagtgatacacgccggatatgattatggccacaatacccatgcgtctgtggatcatacttataaggtggaaactaagtctaaagtccccggaaagtatatggatatcagcggaaacaaggctacggcttatggcttgatcgctgctgccgagaaagcaggcctgcgtttgttcttgggatcttatcccattactccggcaacagatattttacatgagctttctaaacataaatcattgggagtgactactgttcaatgtgaagatgaaatttcaggttgcgctacggctatcggtgcctcgtttgcaggtgcgttggcggctacttctacttcggggccgggtgtttgtctgaaatcagaggctatgaatctggctgttattacagaattaccattggtggttattaatgtacagcgtggcggtccttctactggtttgcctactaagtctgagcaaacagatttattgcaggctttgtttggccgtaacggtgaatctcctat

SEQ ID NO: 14551 - DNA, 1871 bp, Unknown
  gut microbiota DNA sequence
aactaattttgtaaccaaaaaaaggagtgagttatgcgaagtacattcaaggtcttattttacgtgaagaaaggcagcgagaagcctaacggcaacctgcctttgatgtgccgccttatggtggacggagagattaaacagtttagttgcaagatggacgttcccctgcggttgtgggacgtgaagaacaaccgtgcttcgggcaagagcgtcgaagcgcaaagaatcaacctcgcggtggataaaatccgagtggaggtaaaccgccgctaccaagaactgatgcagacggacgggtatgttactgccgccaagttgaaagacgcctatctcggtatcggcgtcaagcaggaaaccttgctgaagctgttcgagcagcacaacgccgagttcgccaagaaagtcgggcacagcagggcgcaggggacattcacccgttatcggacggtctgcaaccacattcgggagtttctgccccatacctacaagcgcgaggacattccgctaaaggaactcaacctcacattcatcaacgacttcgagtatttcctgcgcacggagaagaaatgccgcaccaataccgtgtggggctacatgattgtgctgaaacacatcgtttccatagcgaggaacgacgggcgtctgccgttcaacccctttgcagggtacatcaactcgcccgaaagcgtcgataggggctaccttacccaaaaggagatacagacgctcatggacgcaccgatgaagaacacctgccatgaactcgtacgggacttgttcgtcttttcggtgttcacgggtttggcgtactcggacgtgaagaacctcaccgccgaccgcctgcaaacattcttcgacggcaacctatggataatcacccgacggaagaaaaccaacaccgaatcgaacatccgccttttagacgttcccaaacgtatcatcgagaaatacaaggggctggctcgggacggtcatgtttttcccgttccgagcaacggcagttgcaacaaaatactcaaagagataggcagacaatgcggcttcaaggttcgtttgacctaccatgtagcccgccacacgaacgccacgaccgtacttttgtcgcacggcgtacccatcgaaaccgtgagccgcctattggggcacacgaatatcaagaccacgcagatatacgccaaaatcaccgcccagaagataagccaagacatggaaaccttgtcgcacaagctggaggagatggagaagaatatctgccgagccatttagccaccttaaaactacataccgatgaaagaagaaaggaacatcatcacgatagatgaatacggcaatatctccctgccgaccgatataggcgcaaccgccatgaccgagtgggaaatctgcgaattgttcggggttatcgccccgacggttcgggcagggataaaggcactctgcaagagcggagttttgaaagagtacggcatcgaacgccttatccgtctatcggacggaagcagcatagaggtttacgacctcgaaacgataaccgccctcgctttccgtgtcgaatcgttcggggcggcgaaagtccgcaaagtgttgttggagcggataacgcaccggcgaaaagagaaaacgacggttatcgtgtctgtcgttgccgacaccgagccgagccgccgatggatggcgtaacggtctgtcggtcggggtatcagtccgtaatacggtcatacattcatacggtcataccgtcgcacggacggaaaggggctgtttcccgaccgcaggaaagcggagcagtcattcccgtttacaaaggcgaagcaagcacggggctttccgtcggctgcaaggtcgggcggctacgccgttaggggaacaat

SEQ ID NO: 14552 - DNA, 204 bp, Unknown
  gut microbiota DNA sequence
taagaaattgaaaggacggcaggatattgtgaattatagattacaaaaaaagccatccctagggggacggcttaatgactgaatttgtatacttattgtgcaagacgctccttcacgttgttcattgcttctttcaggctgctgttcatgacccgtgcataatgctgtgtcatacgtgtggaggcatggccgagcatgacggaa

SEQ ID NO: 14553 - DNA, 448 bp, Unknown
  gut microbiota DNA sequence
tgttcattgcttctttcaggctgctgttcatgacccgtgcataatgctgtgtcatacgtgtggaggcatggccgagcatgacggaaacatcttgaagaggcacattgttggcaagcgtgaccgtagtcccgaaagtgtgacgggcaacgtgcgtggtcagattcttcttaatgccgcagaaatcggctatttccttgagatagctgttcatcttctggttgcacatgacgggcaaacagcatcctttcttaatgcaggtcggatgttccttgtatttctccaatatggccaggggtacgggcagcaatggaatattgctgatggaagaagccttcctacggtgttccaatttgacccttccttttcttatccaccagtctccgagattgtcctgtaccagattctctttgttcagactggcaacatcggagaatgccagaccggtgaa

SEQ ID NO: 14554 - DNA, 16344 bp, Unknown
  gut microbiota DNA sequence
aagcagatgaaaacaaacgcataccaggcataattacctgaaacgataccggtggtaaatccggcactggcggaggctatcagcatggaagggcccacattggttccccacatggagaaaccgatgtgatgccacttcagggaacgctcggcaagaaaaaggctactgccttttttgcgtttcagactggcccatatgccgatgcctataagaatcagaaagtaggcaataagaatgccccaatctaatgtatctaaataattagcgtgcataattcatgtatcagattaagatgaatattccgtttatttatgaagccccatcagttccttggctaccgctacggccgtattggcattgtcgctatacccgtccgcacctatttcatcggcgaatccctggcttacgggagcgccgcctatcatcactttcacttgattacggataccggctgcttccagggcgttgatgacatcctgcatataagtcatggttgttgtcagcaaagcactcatacacaagatatctgccttgtttttcttgacctcttccacgaacttgtcacaagatacgtcgatacctatgttaatgacttcaaagccgcaaccttcaagcatggatgccaccaggtttttaccgatatcatgtagatcacctttgacagttccgatgactaccttgcctatggtagttgctgcacttccctgcaataaaggtttcagaagttccaaagctcccttcatggcgcgtcctgccatcagcagttggggaacaaatgcttttccatcttggaagcgttgtcctacttcccccatagcttttatcatgtaattattgataatttcttggggttgtatgccttcggctatggcctttttggttacttctacggccggttccagctttccgtccacaatggcgttgaacaaaggttttagagcttcatcttcggcggcttcgggacttttgattataattgtttcttgtttcgttgcagcggcttcctctttcgaaaggctttctttggatgcggcaggtgatgaagaggagtattcttcgacaatgcgcatggcttgttccacttcttgttcattatgaaaatccatttccagatgtacaccgtccgctccaatgttgtccaataaaggtttcagttcatccaaagttacccaacatgccatgatactctttccaccggcaaggattttcttgtaaaggtcataccatttaggtgatcctccttgtggctcacctacgcccggagtccattgaatggcattcagttcctcaatttcaagaagggcaggcagatgatgcatggcgcccacaccgtccagatgatacagggtatagtctatcttttggcattgttcgcggatgaacggttgcacgaagcgacgataatcatcctcactgatcatggtggagatatcgctttgaagcttgctcatctttcccggtgcccatgaagagaaatagcagaaggccatttcgtccccttcacggatgatatcgtaaagttcatcgaacaccttgaagtagatgtcattaatctgttgcatctgctgttccagtacttcgggttgcattacagtatccagcaacactttatccgtacctttcagtgcggccaacacatccaggccttccatcagatcgggcattcctacgtaataatgaccgtttgccttcgctttgcatgctttcagtaattccttatgcagaatccagttagggtgctcgggattgaaaacaatttcatcgttgaaatccggatcaggatgaatccagattgtatcttctcctccttcgaatacgcctcctaaaatagctgccagtgaaccggggcctaactgggtattggcaaccggcaggatatctgctttcaggctgctgtgcgctacgtaccaatccagatattctgcacgccattgtgggtcgaaccatttttgattcaaatctttcgccggagccggtgctggaatatctgcgtggggcttcactcccttttggaagtgttcccacatattcagtatgattcctttatgattccaccaatctatatatcgcttttttgtttcttctaaatttgttttccaagtttccatgttcgttagtctttaaatattcctttaaaatgattgtcaatgtgcaattcagcgctcttacttaaatccatctcatccgtacactccacctcatccgggtaaacaggaatagtcgctccctgacgtacatatacgggcatttcgtccaaggggacatccaggtcttttaaccaacgtcctccttccagcacttcaccagtgaagaaattcacccattgtccttcgggcagatagacgtcacggcggttttcactgttcatgaccggagctaccaggaagtcgttaccgaaatagtactcatcgtcgatgtgccagcacagcttgtcttcagggtgatgaaaaatcagagcttgcaagagaggtgctccgcttgagatagctttccggctttgtgctataatataaggtataagtgtatagcgtaatttccaccatttttttattatcggagcaatagccggataatgccacggctcacgtttgtttgttccgtgatagcggatgtgtgaggagaatacgccgaattgtgtccagcgcatgtatacatcatcggctactacagagttcatgaagttaggtaatgtatggaatcccggaacatcatggctccagaatgcaaatccggagagtccgaaatgtaagccgcctttcagtgagcctgccatcccatcccatgaactgcatgagtcacctccccaatgcagcggatagcgctggcatcctgcccatgccgagcgtgcccatacaatgccgtcaccggtaacgtcttttgtgatttcataagcggctttctgataaagcaatgcatacaggttgttcagcaattcgggtttcatgcctttatagagagcatccatgtggatgttttctccaaaatcggttttgatacaggtcacgcccatatccagcagattcttcagcagtcctttataccattcggttgctttgggataagtgaagtcaatggttccggcatagtccaaagcggagaaattggaaccttccgaatcttgtttctttgttagcggagctatataatcgtttttgcgtgcttcgtctatctgttcggcgttttcggccacgtaggggagttgccataaggatacgcggtatccttttttcttcaggccttggatgaaccctttgggatcgggaaagcgttcttcgttgaatttccattcgcacagccagtcggtcttgaaccagccggtgtccaggtggattacatcgcaggggtaatgctcggcacgcatccggtcgcatatctcattaacctcatcagcactgaaataagtcatgcggctcatccagatgccgaagctccagaggggaggcatagaaggatatccggtcagatcccggtagccccggaggatttcttccatagtattacctgctatgatgaagacgtccagcatggcctgatcgctcagaaactgtaccgagcgggtggattgtcctgccaatgacagtttactatgggcgcaggtatgatagaatgttccatacatccggctggagaggtagaaaggaatattcttataagtacggcggttgtttacaccttggccatcctgattctttaagaagaaagtttgtccgcttaagtccatttttgcgaagcgttcccctgttccggcaaaacattcatcaggctttgattcaaaggaaagagtggcacgttccttcattccgtttcgtttgcagaaagccaatggcagcgcatcgtaacggggaggggagaagtggtcgtaggcagccaggcggatttcacgtttgccgtcagggtaaaggcgaagatccaatgtttcttgaggatcgggcaggagttcgctccaacggtctaataccggaggctttatattgataagtgcccgttgtattccgtcttgggtggagataatccattcaccttctacttgtgttacttgcaaaggaagtttctttatccggtcgctgaattgaagcatttctgattgatccgtcatgctttcttcaccgaatccgataaagagccgggtgatgcctgaggtatattgacggatgaccagcgtatattcttcacgggggaatgcagtatcgggtgccatatcgttagagagcacttgcttttggaaggggacacttatgcagatatctccatctttttcatagactgcggcgggcttgtatgctttccataatgattcgtctcttgacagatcaggatcaaagtccagaaaatcgaataagtggtaattggttggtttcattctttttttgttattttgtttttataatgattttcggttgttttcctttgctgtaggggaggactcaatgtgcccatccggtggcataagggggattcaaggcgaccctgcctgccttttgttttatactttcatctacttgcggaccattcttcttccacacattatgaggtcccggacggttggagtcgaaacgttcggacggacaccagttgttttctacggtatagccatccgtcgcttcatcaaagtagatgtaaaacgcacggtcgttggtagcgtatggcgcgtcgattaaatgttcaatccggttattgcgcatcacggagccgggttggttggagagggtataaagtcctcctgcatcatacagcctccgggcaaagtggtggacgtaattggcttcaatccgattgcccctcattccgctttccagcagggtccatccccagcccacacagatacctgaataattgacgtggcagacttcattatgtatgatatggatattctttacatatccggctccgatgcctacacctccccaatcttcattggtcacttcctcaatcaggttgttccgtatggtgattcccgtacataattcctgttcatgaaaaggtgtataaggcacatgggtttcaaatccttcatcgggaaaggtgcccaccagtaaggctgttccaccaatatcggtgaaatggcaattctcgacaatggaagccgatacggcgcgttcataatctactcccgtagctgccaagtgctgaaatgtgcaatggttgaaattgatgttattaccgcattttatctgtattgcagctttgggtctgcctatccatgcctggttttccagttccgctttttcaggcagccccggtatgggtagtttgtaagcatccagcagatggaaacctccttgcaatgtaacgtgtccttgataagaggggcgcatccatgaagtatgttcgaaagatatattttgaaaatgtatatttcttaccggacgttccaaagtgccgtttaccgttagcaaggtttctaaagccgggataatgacttgcgccttcgtcatgtcttcgtgaggacgcgggtaataatagatgcgtccggaaggataatcctgataccattctccgggctggtccaataactccaaagcgttgaccagacaaaaggaggagtttcctttttctccgtcaatgacaggttgaggccagggatgggcaaactccaaccggctttcgggatcatgaaaacggacaactgtttttgctccttcagtaatcatttccttcactctcagtatggcgatggcccaacgttggtgaacgatcatctctacttgtgaagcggtatttaaccctgctgtttgtggagtgggaatggtgatcgtctcttcctcagggttaaaatcaatcatgcgttccattactccgtcgggaaactgtgcggcccgctgtgcttttgctccgttgacccacatttgtcgggtttccaatatcctgtttctcatacggggcgcttccgctacccatattttatttctaagtgtttttggtattctggtatcttcgcatccttgttcccaacctgtcacagggactccgccacttaagactacatgggcattgggaacagtggtgatacgagtgggagagtctgttgtcccgctatcttcggggcggatgaacaggcttttatattgtgggtatattccttcctccaataggatatttatgcctccggttgtttcgggtgattgcaatctcctccattcgcgcgcttgcttgatggcttgttccagagtctggaggggagattggcgtgtaccggcagctttgtcgttaccgtaaggagaaacataaatatctcctgcggttaaataaaaggtataactgataaatgcgataaagcagatcatttttgttttcatgggttctccggatttaaaggtctttttaagcagacggaaggaatctgtttttgtacccattggataatttgctaatgtgtcaatttgctgcattctactctacgtggtaatgggcatattagcaaattgatgcattgacatattgattgaagtataataaaaaaacaggccataccttaatgaaaaggtacagcctgcgtcatttaataaaaaagatttattttttatgagttcatgctcatcaggaattcttcgttgtctttggtattttccaaacggctttttacaaaatccattgcttcgataggattcatatctgccagatatttgcggagaatccacatacggtccaaagtagtcttgtcgagcagcaagtcgtcgcggcgggtgcttgatgccacgatgtttactgccgggaagatacgtttgttgctcaagttgcggtccagctggagttccatattacctgtacccttgaattcttcgaagattacttcatccatcttggaaccggtgtcaatcagtgcggttgcgataatggtcagcgagccaccgttttcaatgttacgggcagcaccgaagaaacgtttgggcttatgcagggcatttgcatccacaccaccggataataccttgccggaagcaggagaaaccgtattgtatgcacgtgccagtcgggtgatagagtcgaggaagattaccacatcgtgaccacattctaccatgcgtttcgctttttccagtacgatacctgcaatctttacgtgacgttctgccggttcgtcaaatgtagaagcgatcacttcggcatttacgctgcgcgccatatctgtcacttcttcgggacgttcgtcaataagcagcatgatcatgtacgtttccggatggttggctgctattgcgttagcgatgtctttcatcaggatcgtcttaccggttttgggctgcgccacaatcaaagcacgctgtcctttaccgataggtgagaacatatctaccacacgggctgaaaggttgtcactatatcctcctttgcaaagtttgaactttttatcggggaacagcggggtcaggtgatcaaacggaacgcggtcacgtaccaatccgggatccagaccgtttatcttttccacctttaccaacgggaaatatttttctccttctttcggcggacggatagagccttccactacatcaccggtcttcaaaccgaacagttttatttgcgattgtgaaacgtaaatatcatcgggtgaggaaagatagttgtaatcggatgaacggaggaagccgtatccgtcgggcatgatttccaataccccggtaccggtcaggataccttcaaattcgtaaggcttttccacctgtttgcgttccggttgttgaggaatgctggcagacgcttctccctcagccgtcgtattgttattattgtttgcctgacgaggattgttgtaattgttgttgcgcggattgttatacttctgattttgatcgcgctgctggcgtggttggaatttgggggcaggtgtctgtaccggagccggtgtttctactttggtagcctcaaatttgccgaacaactcagtaggaagttctattttttctgaaggaagatcctcgataggaataaaatcatcggtttcactgccgaattccagttcgggaagaatcacttctttttcttcgggaatagccggtgtttcttctttttttgcttttttgggtgtcggtttcgccggtgcttcagctttcacttcctcttttgcggtttctttcgtttccgttgcaggttgttcttctgtcttggctgttactttcttactacccggtttgcgtcctctttttttaggtgttttttcttccgtgcttgtttcggccacggtttctgtttgtggtgttaccgctacaggagcagtttcttttactgtttcggcagctgtggcggcaggttgcggggtattggcttccagcttctgtgccttgtccttggttgcagtatagaccttgtcaccgtcttttttaacgttgatacgtgatcttttacggggttgactttcattggctttttctgccgctacttttttggttgctccgactatggcttgctcgtccagaattttataaaccagatcttctttttttagagagtctgttttcttgatacccaactctttggcaatcgattgtaattccgacaagtctttgtcgtttaattgaataatgttatacatagagtatagttattagtaatatatttctttataatcttttaatggtataattaaggagcgcaatctacacgaaaatgtgttagaagggggaaatgcactcataattacgattatgggattgatgttgttttgattgttatcaggaagtaaacagactttcccggatagggaactgacgtatttaccgaggacaaaagtagatatttttttttaatctcatgcatattacagaagattttttgccgaatttaatgaaattaataaaaaaaacgacgtttggaaacatcctttctgtctgtgaaaaccctgatgttaaatgaacgtaaaaatagatcagattgttcagcagagtctgcatgaaatagcgaaaaaaatactaatttagcccgtcaaatttgatttttacttaattataaatagaaaaaagatgaaaaaagtgatttttacggaaaaggctcctgctgctataggtccttacagtcaagctgttgaagtgaatggtatggtattcttgtcaggtcagattcctgttgatcctgctaccggtgaatttgttccgggaggagtgactgaacagactattcaggtttttgagaatatcaagaatgtattggcagaagctggtctgactactgctaatatcgtaaaaacaaccgtatttttggcagatatgtctttgtttgctgaaatgaacgctgtttatgccaagtatttcgaaggagatttccctgcccgttctgctgtagctgttaaggctttgccgaaaggagcgcttgtggagatagagagcatcgcagtgagataatgagcttttcgtcaccgattgcacggattgatgcagattgtttctattgaaaagcaatcgcttggtatggaacctgtgtcaatcagtgtagtctgtagtgaatgatggtggatggggaatcataaaaacaactgattaacagatagcgtagaaaagtggaatatgaaacaactggacaagtggcaatggtccacattaatattatctgctatactggtaatggcattttcagtctttatttatcggtatgagccttttaaatccgggttcgagattaccgaccagctgggtggtaatatttttccagcaaccattctctctaccgcaaccacagatgccaatttaatcgtacctgccgattccgattatatcggaaatcctaagtcgtgtatcgccatccggctgaagaacagttatgccaatagcaaattgcgtatagaagtggccgagactccttttttctctcagtctgtatctgagtttattttacccaaggcggggaaagaatatctggtttttccggatattatatggaactatcaggctttgcgtgataataatcaggcagtgcccgttagcatctccgtcaaggcggaattgaataaaaaagaacttccacagcgtttgaaaaccatctcaatgcgcagtattaatgagtgtcctttaggatacgtggacgataaaatgaagtttcacgatacgggagagttttttgcggcctacgtcaacgaggagcatcctcagattgacaaattattgcgtgaagccttggatacacgtatcgtcaatcgttttcttgggtatcaaggtaatgcacaccagtcggagaatgtggacaaacaggtctatgcattgtggaatgtgttgcaaaagcggaactttaagtatagctccaccaccaataccagtctttcgtccaatgtggtttatacacagcgcgtccgtaccttggacgatgcgctggaatcctcgcagataaactgtgtggatggcagcgtgttgctggcttcactgatgaaagccatcaatatcaatcctattctggtgcgtattccgggacatatgtttgtgggttattacacagacaaatcacacaagaatatgaattttctggaaaccacgatgataggggatgtgaatctggatgatttctttccggatgagaagctggattctaccatggtgggcaaatcccagaaccagatgtcgaaactgacctacgagaaatcaaaggaatacgctacgaggaaataccgggagaatgactccctgatacattcgggtaaagtgaattatatgtttctggaaattgataaaaagacccgtgcgcaggtacaacctatcggtaaataaatttgttgtatggatatggaacttacttatatatatcatagcggattcgccttgtcaggcgatggcttcactgtaatcatggattattaccgtgattcggaggatggacaggcgcagtcggatttgaaccggctgatggatgggactttcagcaatcaagaggccggaatgccggaaggaatcgtacacagcgaattattgcggagacccggaaaactgtatgtgctggccagtcattttcatccggatcattttaataaagaggtattgcaatggcgtgaacagcggccggatatcatctatattttctcgaaagacattttgcgtcatcgcagggcgcagaaagaagatgccgtctggctgaaaaaaggagaggaatataaggatgaaacattgagcgtgcgtgctttcggttccacggatgtgggagtatcgtttttgcttcaggcaggtggaaaaaagatttttcatgccggtgatttgaataactggcattggatggatgagagtaccgaggcggagtggaagggggccgagaagaatttcctgcatgagctggatgatctttacgcctatacgcccgaagtggatgtggccatgtttcccgttgatccccgtttgggaaaagaatacatgcggggtgccggacagtttgtaacaaagataaaaactcatatctttgtacccatgcatttcacaccggagtatgccaaggcaaatgctttctgcgactttgccgaagcgcatggagtgcgttttgtgtcattgacgcatcgcggacaaaaaatagagattgaataacaaaagaataacacaatatgaaagtaaaaggaagatttgatcatttcaatatcaatgtaactgatctggacaagagtatcaagttttatgaaacagcattaggtttgcatgagtctcatcgtaaggaagcttcggacggttccttcgtgctggtgtatatggccgatgaccacagcaatttcttgttggaactgacttggttgcgtgatcatacccagccatacgagttgggtgagaacgaaagccatctgtgtctgcgtgtggaaggtgattatgacgaagttcgtaaattccataaggaaatgggatgtgtttgcttcgagaacaccgctatgggcttgtatttcatcaatgatcctgatgattactggattgagatattgccggtgaagtaaaacaatcgtttccgttagtaatgaattaaaaagatagagactatgaaatacatttctcccggtggctggttctcattggaatacccgatgggctggcacgagtttgaagatacagaagagagttttttattctataaccctgaccggtggacaggtaatttccgcatatctgcttataaggatgaagcagctgactatggtccgcagtgcatcgcatacgaattgaaagaaaatacctcttccgccctggtgaaagtgggcaagtgggattgtgcttacagcgcggaaacttttcaggaagaaggcgcctggtacaccactcatatctggatgacaggagaggagaatctctctttcgaatgttcttttaccgtgtccaaaggaggagacaagcatccggcagaagaaatcatccggtctttacagatccgcaaagaaggtgtaagtcacccgcgtgagatcattccgatccgtgttttggaaatcggggaggtgaacaccgcctttgagtgggcttctaccgcgattaaaaagcaactcaccaaggattttactgcgtcggagagcgatattgacagtatacagcaagtaatagacagcggacgtttccagacccagcagcgtatggcgtgggagaatttcggtattgccttcggagccattctggtgaatgagatggaaggtatggaatgggtgactgtcattgagggacagaaagaatatcccgccttgcagtttatgtgttcggatatggtgctggaccctgccgcactggtgtggggaaaagctaaaaagggactcccctgcgacttgaaatctgaattcaggaaaattaagcgagaggcggaggcagtgttggatgatttaaataaatagacaaataatgaccccatatatgcaagtagacgggcttaccaaatcattcggtgacttggtattgttccggaagatttcatttggagtggccgaaggacaacgcatcggtctgatagcaaagaacggtacaggcaagactaccttacttaatataatagccggtaaggagggatatgatgaaggaagcatcgtctttcgtcgtgatctgcgggtgggctatttggagcaagacccacattatcccgaagacctgaccgtgctcgaagcctgtttctatcacggaaacagcacggtggaactcatcaaagaatatgaaagctgcatggaaaccgaaggcaatccgggactggaagagctgttggcacggatggagcacgaaaaggcatgggattatgaacggaaggcgaaacaaatcctttctcaattaaaaatccgggatttcagccagcagatcaaacatctttccggaggtcagttgaaacgggtggctttggcgaatgtgctgataaccgagcccgatttcctgattttggacgagcctaccaaccatcttgatctggatatgacggagtggctggaggggtatctcggccggggaaacatcagtctgctcatggtgacgcacgaccgttatttcttggaccgcgtctgctctgaaattatcgagatagacaatcagcaggtttattcatataaagggaactacagctattacttggaaaagaggcaggagcgtatcgaggcggccaatgccgaaatagcccgtgccaataacttgtaccgcacagaactggagtggatgcgccgtatgcctcaggcacgcggacataaagcgcgttatcgggaagaagctttctacgaactggagaaagtggcgaagcagcgtttcaacgatggcaatgtgaaactggatatgaaagcctcttacatcggctccaagatttttgaggcggatcatctgtacaagcgtttcggtgatttgaagattctggaagatttctcgtatatctttgcccgttatgagaagatgggcatcgtgggaaacaatggtacgggaaagtccacattcattaaaatattgatgggcgaacagaagccggacagtggaacactggatatcggtgagacagtccgtttcggatactattctcaggacggcctgaagtttgacgagcaaatgaaggtcatcgacgtggtgcaggatattgccgaagtcatcgagctgggaaatggcaagaaactgaccgcatcccagttcctgcaacattttctgtttacccccgaaacacagcatagctatgtatataaactgagtgggggagaacgccgccgcctgtacctgtgtacggtgctgatgcgcaatcccaactttctggtgctggatgagcctaccaacgatcttgatatcatcacccttcaggttttggaagaatatttgcagaacttcaagggctgtgtaatcgtagtaagccacgaccgctatttcatggacaaggtggtagatcacttgttggtattcaaggggcagggagacattcgtgattttccgggtaactactctgattatcgtgactggcgcgaggcgaaagagcagcgcgagaaagaggcggagaagccgaaggaggaaaagaccgcccgcgtgcgcttgaatgacaagcggaagatgtctttcaaggaaaagaaagagttcgagcagctggaacaagaaatagccgggctggagcaggagaaggccgatatagaagccgccctttgcagcggtacgctgggagtggaggaactgacggagaaatccaaacgattgccggaactgaatgatttgattgatgaaaagaccatgcgctggttggaactgagcgagatagaagggtagaataaccggaggtgcaacagtgtacctgatgccatattgctatattcgttttgaataacaaaaccataatatagaaaagaaatatggcatccattaaattgaaattccgcccatcgagcgtaaaaggaaaaaagggcgtattaagttatcaaattattcattacagactgacacggctcatcaagacttcttaccggatcatgccttccgagtgggacgacttcaccggcagtctgcttatttcaacacagtctgaatgtaaagcgcgtcttctgctgatacgtgaccagacgaattgggagatgacgcggttacaaggtattatcaatgatctggagcggaccggtgtggaatacaccattgatgatatcgtggcttctttccggaaaatcccttctgtagagagtgtgttcaacttcatgcaacgatgtatcaataaactggagcggcagaaaaggggacggacggcagaaggctatacctcgacaatgaacagctttatccaattcagaaagaatgaggatctgagttttgaagcctttgattcggagctgatggagatgtatgaagcctatctgaaagagaaaggcttggtaaagaacagtacttcctattatatgagaatctggcggagtgtgtataacctggctgtagagcaaggctataccaccgacaaaaaacctttcaaacatgtttataccggcatagacaagaccgtaaaacgggccgttccttttaaaatcatcaaaatgatcaaggagcttgatttgtcattcgaaccccagttggagctggcaagggatattttccttttcagtttctatacccggggcatgtcgtttattgatatggcacacttgaaaaagagcaatctccagaatggaattctgacatacagccggaaaaagaccgggcagcggctgactattctgtgggaggagctgatgcaggagattgtggataaatacaaggatgacagttccgagtacctgctgcctatcttgcggtattgtgacataaatgaccgcaagcaatataaactgagggccaagcagataggacggggcttgaataaaataggcttgcggctggaattaaaggcgccgttgactttctatgtggcgcgccatagctgggccagcatagcgcaggacaggaaggtgtctacagacatcatccgcgaagggttggggcacgataatgaaaagaccactcatatttatctggcatccatctccacttcacagatagacagagccaatcagattattttaagggggctgtaggggaagtattcattcaggctgtaggatgacagcctgaatgttctattggcttggataaaatcagatcattttcggagaaatatttctaaaatcctaacataagagctgggggaatattcaatattcggcaaagtaatcaaaatatgccttgttggtgatagatacaaaatattgaatgactttagtatggggagatatagaaatatgcagaatgctgatctaaaggatcgtgccattaggaaatgctgtgtgacttcgtgtgatatctaatttaggataatttattttttatcatgaataagtgtgataaatctgaaaatcagctgtttgatagcatggttcgttttataaaaaatggggttctcttagtaagagatccccatttggttgcaaaagtagctataattcccaagaaatggaaatct

SEQ ID NO: 14555 - DNA, 266 bp, Unknown
  gut microbiota DNA sequence
ggcactttcattaaaatattctttgtcgtattccaataatagtccaaactaccacgaacccaattattaaagaaaccaaaatcaacacctaaattacgactaatagtagtttcccatttcaaatcaggatttcctttcatatcaccaggtacataagtggttaccttttcaccatccactgtaatttgttctgttttccatgtttctctccataaagaagcatcaatattatcagaaccagaagtaccatacgatacacgaagttt

SEQ ID NO: 14556 - DNA, 1865 bp, Unknown
  gut microbiota DNA sequence
tattttaaaggtgagataggtactcctaatcatactttatcttggtttggtcgtgctaattattcttataaaggtaagtatcttttgacagctacattccgtgctgatggttcttctaaatttgcacctagtcatcagtgggggtatttcccggcagcagctgcagcatggagaatttcagatgaagctttcatggaaaatacaagagattggttggataatctgaaacttcgtgtatcgtatggtacttctggttctgataatattgatgcttctttatggagagaaacatggaaaacagaacaaattacagtggatggtgaaaaggtaaccacttatgtacctggtgatatgaaaggaaatcctgatttgaaatgggaaactactattagtcgtaatttaggtgttgattttggtttctttaataattgggttcgtggtagtttggactattattggaatacgacaaagaatattttaatgaaagtgcctattgatgcagcgtctggttatagctatcagttccaaaatgtaggtaaaacctcaaataagggagttgaattggctttaggctttgacattgttcgtggtaaagattttaatttaggtgtaaacttgacttataattataataagaataatattgacgaactgatggatggggtcttggcagatacgagagctatgaatgattggggttcatctatggctaagcctgcttatgattatattatccgtgaggggcatcctgtaggtacgatccaaggttttaaatctgaaggatattatacgattgatgattttacttatgcggatggtaaatacacattgaaaccaggcattccggatattcaaggtattgtgaattatccggatggagttaaagtactggcagcagatggacaaaccgccgtaccgggtatgcctaaatttgcagatacaacaggtaatggtgttgtggacgaggatgacaaaacgattatcggcgaagctatgccacaacatacaggtggttttacaattaacggtaattggaaggcaatcgatttttctgtaggctttacttatcagattggtggtgatgtgtataatgccaatgcaatgcattccttgatgggaaataaagacaattccgctggtcagaatcgtttgaagttcgtttctgaaactttcaaatattatgatgtcgatacaaacggtgacttgatgctggtgaaagatcctacagctttggcggctcttaacgcgaatacaaactacagttctttcttctctgaatatggaatcgtaagttctaaatttattgaagatgcgtcttatttgcgtttgaatacattgacagtaggttatactttcccgaaaaattggatgaataagattggattacagaatgcacgtgtatactttacaggaagtaatttgttctgtattgatggatattctggtatagatccggatgtaaacacgaagactgatggtaaggatggtttccctacaccttattttgattaccagtcttatcctaaggctagaacttatacctttggtgttaatttaactttctaattaatggagatgaatcgtatgaaaaaaatagtatattcaacacttttctttgctggaatgtttttgactacagcatgtagtgattatttggaggttggctctccttctattgtagattcggattttgtcttttctaatccgacaacagcacgtgccgcattagacggtgcttatgaacagtggagggattgtgcgcagaataaggtttttggtgatggattgttttatgctgctgatattgccgggtctgatatagaacggcacccggagtctttctctaatcagttggggcgccatta

SEQ ID NO: 14557 - DNA, 341 bp, Unknown
  gut microbiota DNA sequence
cggaaaaaggaagccgcacgaccggaggaagagaaacaggaaaaggcatggcagacgctcaaacgcgacatcaagagcagtgccgataccatccacgggattgataccggacaatgccggggctatagccgtgccctgtttgtcagcagcatcctgaacaaggtatccactttggccaatcacggggaagtggaaatcgtccgtagggccgtggacttcatttccgaatataacgcaagggtgaagaaacccgtcatcacaccgagaaacaaattcttccaattgccggaactggcggaacggatgcgcgaaaagctgaaagcgatgcaaagccgggaaaa
